United States Patent Application Publication US 2024/0327476 A1 - sequence listing, part 110

SEQ ID NO: 210428 - DNA, 933 bp, synthetic construct
  misc_feature 1..933: note = Description of Artificial Sequence: Synthetic coding sequence
  source 1..933: mol_type = other DNA
atgcccctgatcttcgtgggcggcgtgccccggagcggcaccaccctgatgcgcgcgatgttggacgcccaccccgaggtgagatgtggagaagaaactcgcataattcccagggtactggcgatgagacaagcctggtccaaatccgggagggaaaagctcaggcttgatgaggcaggcgtgaccgatgaggtgctcgacgccgccatgcaggcattcattctggaagttattgccaagcacggtgagcccgcgcgggtcctgtgtaataaagatccatttactctgaaaagttcagtgtatttgagtcgtctttttcccaattctaaatttctactgatggtgcgggatggccgggcttctgtacactcaatgatcaccagaaaagttactatcgctgggtttgatctttcatcttaccgcgactgtctcacaaagtggaataaggcaattgaagtgatgtatgctcaatgtatggaggtgggcaaggagaagtgcctccccgtttactatgagcagttggtgctccatccacgaagaagtttgaagttaattctggattttctcggaattgcatggtcagacgcagtgctgcaccatgaggatctgataggcaaacccggaggggtgtctttgtccaagattgagcgttccactgatcaggtgatcaaaccagtcaatttggaggcgttaagcaagtggaccggccatattcctggtgacgttgtgcgcgatatggcccagattgcaccaatgctggcccagctgggttacgatccctatgcaaatccccctaattatggcaatccagatccattcgttattaataacacacagcgcgttttaaaaggcgactataaaacccccgcaaacctgaaaggctatttccaggttaatcagaactccacatccagccacctcgggtctagctag

SEQ ID NO: 210429 - DNA, 1587 bp, synthetic construct
  misc_feature 1..1587: note = Description of Artificial Sequence: Synthetic coding sequence
  source 1..1587: mol_type = other DNA
atgggcgacgcccccagccccgaggagaagctgcacctgatcacccggaaccttcaggaggtgctcggagaagaaaaactgaaagaaatcctcaaggaacgtgagctgaaaatttactggggcactgctactacaggtaaacctcacgtcgcctacttcgtgcctatgtcaaagatcgcagacttccttaaggcgggctgtgaagttacaatcctgttcgcagatctacacgcgtatctggataatatgaaggccccctgggagctcctggagttgagggtttcttactatgaaaacgtcatcaaggccatgcttgagagtattggtgtaccactagagaagctgaaatttattaagggcacagactaccagttgagtaaagagtacacgcttgatgtatatcggctgagttctgtggtcacacagcacgacagtaagaaggcaggcgccgaggtagtcaaacaggttgagcaccctctgcttagtggcttgttgtaccccggactgcaggcgctggacgaggagtatttgaaggtggacgcccagttcggcgggatcgatcagagaaaaatctttacctttgcagaaaaatacctcccagcacttggctactcaaaacgggtgcatttaatgaatccgatggtgccaggactcaccggcagcaagatgtccagctcagaggaggagtcaaaaattgacttactggaccgcaaggaggatgttaagaaaaagttgaagaaagctttctgcgaacccgggaatgtggaaaataatggcgtcctatcattcattaagcatgtcttgtttccacttaaaagcgagttcgtgatcctcagggatgagaagtggggcggtaacaagacatacactgcctatgtcgacctggagaaggacttcgccgcagaagtcgtgcatccaggtgacttgaaaaacagcgtcgaggtcgcactaaacaaattgctggaccctatccgagagaagtttaacacacccgccctgaagaaattggcttctgccgcctatcctgatccctccaagcagaagcctatggccaaaggccccgccaagaactccgaaccagaggaggtcatcccttccagactcgacattagagtcggaaaaatcatcacggtggagaaacatccagatgccgattctctgtacgtggaaaaaatcgatgtgggcgaagctgaacccagaacagtagtgagtggcctggtacagttcgttcccaaggaagagttgcaagatagattagtggtggtgctttgtaacctcaaacctcaaaagatgcggggcgttgagtctcagggcatgttgctctgcgcttccatagagggcattaatcggcaggtcgagcccctggatccaccggcaggatccgctcctggcgaacacgttttcgtcaagggatatgagaaggggcagccagatgaagagttgaaaccaaagaagaaggtcttcgaaaagctgcaggcggactttaagattagcgaggagtgtattgcgcagtggaaacaaacaaactttatgacgaagctaggctcaatttcttgcaaatcgctcaaggggggtaacatttcttag

SEQ ID NO: 210430 - DNA, 1434 bp, synthetic construct
  misc_feature 1..1434: note = Description of Artificial Sequence: Synthetic coding sequence
  source 1..1434: mol_type = other DNA
atggccgcccccatcctgcggagcttcagctggggccggtggagcggaacattaaacttatccgtgctgctgcccctcggcctgaggaaggcacacagcggggcgcagggcctgcttgctgcccagaaagctaggggactcttcaaagatttttttcctgagaccggaacaaaaatagaattgccagagctgtttgaccgcggaaccgcgagttttccccagacaatttactgtgggtttgacccaaccgccgatagcctgcatgtagggcacctgttggcgctacttggcctttttcacctgcaacgcgctggacacaatgtgatcgccctagtgggaggcgccactgcaagattgggagatcccagcggacgcaccaaagagcgcgaggctctggagaccgagcgggtcagagctaatgctagagccctgcgtttgggactcgaggctcttgcagcaaatcaccagcagctctttaccgacggcaggtcctgggggagctttaccgtactggataacagcgcatggtatcagaagcagcacctggtggattttctggccgccgtgggcggacatttcaggatgggcactctcctgtctagacagtccgtgcagctccggcttaagagccctgagggcatgagtctcgccgagttcttctaccaggttttgcaggcctacgacttctattacctcttccagcgatacgggtgcagggtccagttaggcggtagtgaccagttgggtaatatcatgagcggctatgagttcattaataaactgaccggtgaagacgtcttcgggattaccgttcccctgatcactagcacgaccggggcaaaactcggcaagagcgccggcaatgcggtctggttgaatcgcgataaaacgagtccatttgagctgtaccagttctttgttagacagccggatgattctgttgagcggtacctgaagctgttcacctttctgcctctccccgagatcgatcatatcatgcaacttcacgtgaaagaaccggagcggaggggcccacagaagagacttgctgcagaggtaacaaaactggtacacgggcgcgaaggcctggattctgcaaaacgttgtacccaggctctctatcattcatcaatagacgcgcttgaagtgatgtccgaccaggaactgaaagagctatttaaggaagctcccttcagcgaatttttcctggaccccgggacgagcgtgcttgatacctgtcgaaaggctaatgccattccggatgggccacgcggctatcggatgattacagaaggcggagtgtcaatcaaccatcagcaggttaccaacccagaaagtgtcctcatcgtaggacagcacattcttaaaaatggtttgagcctcctgaaaatcggcaaaaggaatttctatattattaagtggctgcaactgtag

SEQ ID NO: 210431 - DNA, 723 bp, synthetic construct
  misc_feature 1..723: note = Description of Artificial Sequence: Synthetic coding sequence
  source 1..723: mol_type = other DNA
atggccgagtacctggccagcatcttcggcaccgagaaggacaaggttaactgctccttctactttaagataggagcttgccgccacggtgatcggtgtagtcgcctacataataagcccaccttttcccaaactatagctctgctgaatatctaccggaatccacaaaacagttcacagtctgcagatggactgaggtgtgctgtgtctgacgttgagatgcaggagcactacgatgagttctttgaagaggtgtttaccgaaatggaggagaagtatggagaagtcgaggagatgaacgtatgcgataatttgggcgaccatttagtgggaaacgtgtacgttaagtttcgccgagaggaagacgctgagaaggcagtgattgacctcaataatagatggtttaatggccagcctatacacgccgaattatcaccagtgacagattttagagaagcttgctgccgtcagtatgagatgggggagtgcacccggggcggtttctgcaacttcatgcaccttaagcctatctcacgcgagctccgacgcgaactgtacggccgacgtcgcaaaaagcaccgttcccgttcgcgctcccgagaacggcggtctcgtagccgcgacagggggagaggcggcggcggaggcggagggggcgggggaggcggtagggaaagagatcgtcgcaggagtagagatcgagaacgatccggtcggttctag

SEQ ID NO: 210432 - DNA, 723 bp, synthetic construct
  misc_feature 1..723: note = Description of Artificial Sequence: Synthetic coding sequence
  source 1..723: mol_type = other DNA
atggccgagtacctggccagcatcttcggcaccgagaaggacaaggtgaattgctccttctatttcaagatcggagcatgtcgacacggggatcggtgttcaaggctgcataacaaacccacgttttctcagactattctcatccagaatatatatcgcaatccccaaaactcagcccagacagcagacggatcccattgtgcagtttccgacgtggagatgcaggagcactacgatgagttctttgaagaggtgttcactgaaatggaggagaagtatggtgaagtcgaggagatgaacgtttgcgacaacctcggcgaccatctcgtgggcaacgtttatgtcaagtttaggcgggaggaggatgctgagaaggcggtgatcgacctcaacaacaggtggtttaacggccagccaatccatgcggagttgtctccagttactgattttagagaagcctgttgtcgccagtacgagatgggcgaatgcacaagaggcgggttctgtaatttcatgcaccttaaaccgatttcccgggaactgcggagagaactctacgggaggcgaaggaagaagcacaggtcgcgctcccgatcccgagaacgaaggagcaggtcacgcgacagaggacgcggcggcggagggggaggaggagggggcggcggcggcagggagagagatcgccggcgatccagagacagggagagatcaggaaggttttag

SEQ ID NO: 210433 - DNA, 504 bp, synthetic construct
  misc_feature 1..504: note = Description of Artificial Sequence: Synthetic coding sequence
  source 1..504: mol_type = other DNA
atgcaggagcactacgacgagttcttcgaggaggtgttcaccgagatggaagaaaaatatggcgaggtggaagaaatgaacgtctgtgacaaccttggcgatcatctggtgggtaacgtgtatgtgaaattcagacgggaagaagatgcggagaaggccgtgatagatctgaataatagatggtttaacggccagccaatacacgctgaactgtctcctgttactgattttagagaggcttgctgcagacagtatgaaatgggggagtgcacacgtggcggcttctgtaacttcatgcatctgaaacccatttcccgcgagctgcgcagggagctctacgggcggcgccggaagaagcatcggtccagaagtcggtcgcgggaaaggagaagcaggagtcgggatcggggtaggggcgggggcgggggcgggggcggaggaggcggaggtcgcgagcgggacaggcgcagaagtcgcgacagagagcgctccggccgtttctag

SEQ ID NO: 210434 - DNA, 504 bp, synthetic construct
  misc_feature 1..504: note = Description of Artificial Sequence: Synthetic coding sequence
  source 1..504: mol_type = other DNA
atgcaggagcactacgacgagttcttcgaggaggtgttcaccgagatggaagagaagtacggtgaggtggaggaaatgaacgtgtgcgacaatctaggggaccacctcgtcgggaacgtatatgtgaagttccgacgggaggaagatgctgaaaaggccgtgatcgacctgaataatcggtggtttaatgggcagcccattcatgccgaactctcccctgtgaccgacttccgcgaggcttgctgtcgtcagtatgaaatgggagagtgtactcgagggggattttgcaatttcatgcacctgaaacctatatcaagggagctacggcgcgagttgtacggaagaaggcgcaaaaagcatagaagtcgatctagaagcagggagagacggagcaggagcagggacagggggcgcggtggcggggggggaggcggggggggcggcggcgggagagagcgagaccggagacggtcccgggacagggagcggtcaggtagattctag

SEQ ID NO: 210435 - DNA, 1218 bp, synthetic construct
  misc_feature 1..1218: note = Description of Artificial Sequence: Synthetic coding sequence
  source 1..1218: mol_type = other DNA
atgttcgtgcaggaggagaagatcttcgccggcaaggtgctgcggcttcatatttgtgctagcgacggagcagagtggttggaagaagcaacagaagacacatcagttgagaagctgaaggaacgctgtctgaaacactgcgcacacggatcactggaggatcccaaatcaataacacatcacaagctgattcatgcagctagcgaacgcgtcctttctgacgcccgcacaatactggaggagaatatccaggatcaggatgtgttgctgctgatcaagaaacgcgctccgtctccactgccaaagatggctgacgtgagtgcagaggaaaagaaaaagcaagatcagaaagcacccgacaaggaggctattctgcgagcaaccgcaaacttaccttcatataacatggacagagccgcggttcagaccaacatgcgggacttccaaaccgaattacgtaaaattctagtcagcctaatcgaggtggcccagaaacttctggcgcttaaccctgatgctgtggaactcttcaagaaagctaatgctatgctggatgaagacgaagatgagagagtggacgaggccgccctaagacagctgactgagatgggttttcctgagaacagagccacgaaagcgctgcagctgaatcacatgagcgtgccccaggctatggaatggttgattgagcacgccgaagaccctacaatcgataccccactgccaggacaagcacctcccgaagcagaaggagccaccgccgctgcttcagaggctgcggctggcgcgagtgcaaccgatgaagaagctagggatgaactgaccgaaattttcaagaaaattcgccggaagcgggagtttcgggcggatgcaagagctgttatttctctgatggaaatgggcttcgacgaaaaagaggtgatcgacgcccttcgagtaaataataaccagcagaatgctgcctgcgaatggttactcggagatcgaaagccctccccagaagagctcgacaaaggaatcgatccagactctccgctgttccaggcaatactggataacccagtggttcagctcgggttaacaaatcctaaaaccctcctggcatttgaggacatgctggagaaccctctgaattcaactcagtggatgaacgaccccgaaaccggaccagtgatgttacaaatatcacgcatcttccagacgctgaatcgtacgtag

SEQ ID NO: 210436 - DNA, 540 bp, synthetic construct
  misc_feature 1..540: note = Description of Artificial Sequence: Synthetic coding sequence
  source 1..540: mol_type = other DNA
atggccgccagccaggtgctgggcgagaagatcaacatcctgagcggcgagaccgttaaagccggggacagggatccactcggaaacgactgtcccgagcaggaccgcctcccgcagagatcttggagacagaaatgtgccagctacgtgttggcactcaggccttggtcttttagcgcctcccttacccccgtcgccctcgggtcggccctcgcttatcgctcccacggtgtacttgaccccaggctgctggtgggctgcgctgtcgctgtgttggccgtgcatggcgccggaaatctcgtcaacacttattacgacttctccaaaggcatcgatcataaaaagtcagacgaccgaaccctcgtcgacagaattctagaacctcaggatgtagtgcgcttcggcgtcttcctatacacattggggtgcgtatgtgcggcttgtctatactacctgtctcccctgaagctcgagcacttggctcttatctattttgggggactaagcggctctttcctgtacacgggcgtactgatctag

SEQ ID NO: 210437 - DNA, 1017 bp, synthetic construct
  misc_feature 1..1017: note = Description of Artificial Sequence: Synthetic coding sequence
  source 1..1017: mol_type = other DNA
atggccgccagccaggtgctgggcgagaagatcaacatcctgagcggcgagaccgtcaaagccggggacagggatcccttaggcaacgattgtcctgagcaggaccgccttccccaacggtcttggagacagaaatgtgccagctacgtgctggccctgcgaccttggtctttctctgccagcttgacccctgtggctctggggtcagccttagcctatcggtcacacggggtgcttgaccctcgactgttagtaggatgcgctgttgccgtgctggccgtgcacggtgcgggcaacctggtgaatacctactacgatttctctaagggcatagatcataaaaaatcggatgacagaaccctcgttgacaggatcctggagcctcaggacgtggttaggttcggggtcttcttgtataccctgggttgtgtgtgtgctgcgtgtctctactatctgagcccattaaagctggaacacctggctttgatttatttcggtggccttagtggatcatttttatacactggagggatcggatttaagtacgtagcactgggagacttgatcatcctgatcactttcgggcctctggcagtgatgtttgcctacgccattcaggtggggtcactggccatattcccactagtgtacgctatccctctggcactgagcacagaggccatcctccatagcaataacacacgggacatggagtccgatcgtgaagccggaatcgtcacacttgccatcctgataggacccacattctcctacatcctatacaatactctcctgtttctgccatatttagtctttagcatattagcgacacattgtaccataagcttggctctgcccttactgactatccccatggcattttctctcgagcgccagttcagatcccaagccttcaataaacttccccaaaggaccgccaaactcaacctcctgctcggcctgttctacgttttcggcattattctcgcgcctgcaggatctcttccgaagatctag

SEQ ID NO: 210438 - DNA, 3405 bp, synthetic construct
  misc_feature 1..3405: note = Description of Artificial Sequence: Synthetic coding sequence
  source 1..3405: mol_type = other DNA
atgagcgagccccaccgggtgcagttcaccagcctgcccggcagcctcaatccagcattcctgaagaagtcaaggaaagaagaggcaggggctggggagcagcatcaggattgtgagcccgcggcagccgctgtgcgtatcactctgaccctgtttgaacctgaccacaaaaggtgtccagagttcttctacccagagctcgttaagaacattcgggggaaagtaaaggggctgcagcccggggataaaaagaaagatcttagcgaccctttcaatgacgaagagaaagaacggcacaaggttgaggcactagccaggaaattcgaggaaaagtacgggggaaaaaagagacgcaaggataggattcaagacctcattgatatgggctacggttacgacgagtctgactcatttatcgataacagtgaggcgtacgacgagttagtacccgcatctctgactaccaagtacggcggcttctatatcaatagtggcacactgcagtttagacaggctagtgagagtgaagacgactttattaaggagaagaagaaaaaatccccaaagaagcgaaaactgaaggaaggcggcgaaaagatcaaaaaaaagaaaaaggacgacacatatgacaaggaaaaaaagtctaagaagagcaagttctctaaggccgggttcactgctctcaatgctagcaaggaaaaaaagaagaagaaatatagcggagccttgagcgtaaaagagatgctgaagaaattccaaaaagagaaggaggcgcagaaaaagcgagaagaggaacacaagcctgtggccgtacctagtgccgaagctcagggcctaagagaactggaaggggcctccgatccactactgtccttattcggctccacatcggataatgacctcttacaggctgccacagcaatggattcacttacagacctcgatctggaacaccttctgtctgagtcaccagaggggagcccgttcagagatatggacgatggatctgattcccttggagtgggcctggaccaagagttccgacagccatccagcttacctgaaggattaccagcacccctcgaaaagcgggtgaaggagttggcgcaggccgcccgtgccgccgagggtgagagcaggcagaaattttttacacaagatatcaacgggatactgctggacatcgaggcgcagacccgtgaactgtctagtcaggttcgatccggcgtgtacgcatatttagcctcattcctgccctgctctaaagacgctttgctaaaaagagctagaaagctgcacctctacgaacagggaggacgccttaaagagccattacagaagctgaaagaagcaattggccgggcaatgcctgaacagatggccaagtaccaggatgagtgtcaggcccacactcaagcaaaagtcgccaaaatgctcgaggaggagaaggacaaagagcagagagaccgcatttgcagcgacgaagaagaagacgaggagaagggcgggaggaggatcatgggtccacgtaagaagttccagtggaacgatgaaattagggaactgctgtgccaagtggtgaaaataaagctggaaagccaggacctagagcggaataacaaagctcaggcatgggaagattgcgtcaagggtttcttggacgccgaggtcaaacctctttggcctaaagggtggatgcaggcgcggactctgtttaaagagagcagacgcggccatggacatcttacgagtatcttagctaaaaaaaaagtgatggcgccctccaagatcaaggtaaaggaaagctcaacgaagcccgacaagaaagtttctgtacctagcgggcagattggcggccctatcgccctcccaagcgaccatcagaccggaggtctgtccattggcgccagtagccgagagctgcctagccaggccagcgggggactcgcaaaccctccccccgtgaatcttgaggattctcttgacgaggacttgatcagaaacccggcctcttccgttgaggccgtcagtaaggaattagccgccttgaactcccgggcagcgggcaattcagagttcaccctgccagccccttccaaggcccctgcagaaaaggtaggtggggtactgtgtacagaggaaaagcgaaatttcgccaaaccgtccccctcagccccacctcccgcgtcatcattgcagagcccactaaatttcttggccgagcaggcattggcactcggacagtcatctcaggagaagaagcccgaatcatctggatataaagaactctcttgccaggctccactcaacaaggggctcccagaagtgcaccagtccaaggccaaacatcacagcttgccgcggacctctcacgggccccaggttgcagttccagtgcctggccctcaggtgaaggttttccacgctggtactcaacagcaaaagaattttactcccccaagcccattcgccaacaaactgcagggccctaaagcctcgcctactcagtgccaccggagcttactacagcttgttaagaccgccgccaaagggcagggctttcatccctctgctccagctacatctgggggtctctctgcctcatctagcagctcccacaagacacctgctagctcgtctagtgccttgtcgcatccggcgaaaccccatagtgtgagcagcgctggctccagctataaaaacaacccttttgccagcagcattagcaaacatggagtgtcctcaggcagtagcagcagtggcgggacccctgtgcaatcgagcgtgtccggtagcctcgtgcccggcatccagccaccctccgtggggcaagccaccagcagaccggtgccatcgtccgcaggcaagaaaatgcccgtatcgcagaaactcacgctcgtagccccaccaggtgggccgaacggggactcttcagggggaacgcagggtgtggccaagttattaaccagtccctccctgaaaccttcagctgtgagttcagtgacctcctccaccagtttgagtaagggggctagtggcaccgtgctgctggcaggtagttctctaatggcgagtccttataaaagcagctccccaaaattgtctggagccatgtcctccaattccctgggcataattacacccgtgccgatccctgttcatgtgcttagtttcagcgcagattcatccgcaaaggcgggagtgtccaaagacgccatagtcacagggccagcgcctggatctttccaccacggattaggccactcactgctggccggacttcattccagccccccacacgccgcaccactgcctcacgccgcagtgcctacacatatcccacagagtctgcccggtgcaagccaactacacggaaaagggcccgcagtaccacgtaaattatag

SEQ ID NO: 210439 - DNA, 3405 bp, synthetic construct
  misc_feature 1..3405: note = Description of Artificial Sequence: Synthetic coding sequence
  source 1..3405: mol_type = other DNA
atgagcgagccccaccgggtgcagttcaccagcctgcccggcagcttgaacccagcatttcttaagaagagtcgcaaagaagaagctggagctggcgagcagcaccaggactgcgaaccagctgcagctgcagtgaggatcaccctcaccctgttcgaacccgaccacaaacgatgtcccgagtttttttatcctgagttggtgaagaatatcagaggaaaagttaagggcttacaacctggcgacaaaaaaaaagacctcagtgacccgttcaatgacgaagagaaggagaggcataaagtagaggcgctggcccggaagtttgaggagaaatacggtggcaaaaagagacggaaggaccggattcaggacttaatcgacatgggttacggctatgacgagagtgactctttcatcgataactctgaggcgtatgacgagcttgtgcccgcaagcctgacaaccaagtatggaggcttttacattaatagtggaactcttcagtttcggcaagcctccgaatctgaggatgacttcattaaggagaaaaaaaagaaatcccccaagaagcggaaactgaaagaggggggcgagaaaatcaagaagaagaaaaaggatgatacttacgacaaggagaagaagagcaaaaaatcgaaattctccaaggcaggctttaccgcccttaacgcttccaaagagaaaaagaaaaagaagtattctggggctctaagtgtgaaggagatgttgaaaaagttccagaaagaaaaagaagcccagaagaagcgggaggaggagcacaaaccggtggctgtaccatctgcagaggcccaaggtctgcgcgagctggaaggtgcctcagaccccctgctaagcctcttcggctccacaagcgacaacgatctgctgcaggctgctaccgctatggacagccttactgacctggacttggaacatttgctgtccgaaagccccgagggatctccctttcgggatatggatgatggaagcgattcattgggagtggggctggaccaggagttcagacaacccagttctctccccgaaggcctccccgcccctcttgaaaaaagagtgaaggagctcgctcaggccgcaagagcagcggaaggcgagagccggcaaaagttcttcactcaggacattaatggtatcctcctggacattgaagcccagaccagggagctgtcaagccaggtgcggtcaggagtttacgcttacctggcatcctttctgccttgctcaaaagacgctcttcttaagcgagctaggaagctgcatctgtacgagcagggagggcgactgaaggagccactccagaaattgaaggaagcaatcggccgggctatgcccgaacaaatggcaaaataccaggacgagtgtcaagcacatacacaggccaaagtagcaaagatgcttgaagaggagaaagacaaggagcagagggatcggatatgctccgacgaggaggaagatgaagaaaaaggcgggagaagaattatgggtcctcggaagaaattccagtggaatgatgagattcgtgaactgctctgccaagtggttaagatcaaactcgagagccaggacctggagcgaaacaacaaagcgcaggcttgggaggattgcgttaagggtttcctcgatgctgaggtcaaacctctctggcctaaggggtggatgcaggccagaaccttgttcaaagagtctagacggggacatggtcacctgacatctatactcgccaagaagaaagtgatggcgccgagtaaaatcaaagtcaaagagtcgtccaccaaacccgacaagaaagtgtccgtaccttctggacagataggaggcccgatcgccttaccatccgaccatcagactggtggtttgtctatcggcgcatcaagccgcgagctgccaagtcaggccagcgggggcctggccaatccccctccagtgaatctggaagactctctggatgaggatctaatcaggaatcctgcctcttccgtagaggcagtgtctaaggagcttgccgcacttaatagtagagccgctggaaattctgagttcactcttcccgccccttccaaggctccagccgagaaggtcggcggggtactgtgtaccgaggagaagaggaacttcgctaagccatctccctcggctcctccgcctgcctcgagcctccagtcccccctcaactttctggccgaacaggcccttgcccttgggcaaagctctcaggagaaaaagccagagagcagtggatataaagagctgagctgccaagcgccgctgaacaaaggtcttcctgaggtgcaccagagtaaagcgaagcaccactctctgccacgtacatctcacggacctcaggtagccgtgccggtacccggtccacaagttaaggtgttccatgcagggactcaacaacagaagaacttcacaccacctagtccctttgcgaacaagctgcagggcccgaaagccagtcccactcagtgccaccgaagcctccttcagctagtgaagacagcggccaaaggtcaggggttccacccctccgcccctgccacttctggaggcctctctgcttctagctcttctagccacaagacgccagccagcagctctagcgccttatcccacccagctaaaccacacagtgtgtcatccgcaggtagtagctataagaacaatccattcgcaagttctatatctaagcacggggtctcatccggcagctccagcagcggaggcacacctgtgcagagtagcgtttccggatcactggtgccaggtatccagcccccaagtgtcgggcaagctacaagcaggcccgtgccatcctcagccggcaaaaagatgccagtgtcacagaagctgacattggtcgcgcccccaggtgggcctaacggtgatagcagcggaggcacacagggggtggccaaactccttacttcaccctccctcaagccgagtgccgtgagctctgtgactagtagcaccagcctgtccaagggcgccagcgggactgtgctgctggccggctcttccctgatggcatcgccctacaaatctagcagcccgaagttgagtggtgccatgtccagtaattctctcgggatcattacgcccgtgcctattccagtccacgtgctgagtttttccgccgattcatctgcaaaggctggcgttagcaaagatgctatagtgaccgggcctgcccccggatcattccatcacgggttgggccactcactcctcgctggcctgcatagtagtccgccacatgcggcgccactccctcacgctgcggtgccaactcatataccgcagtcattgccaggggcctctcagctccacggcaaaggacccgctgtcccaagaaaactttag

SEQ ID NO: 210440 - DNA, 3315 bp, synthetic construct
  misc_feature 1..3315: note = Description of Artificial Sequence: Synthetic coding sequence
  source 1..3315: mol_type = other DNA
atgagcgagccccaccgggtgcagttcaccagcctgcccggcagcctcaaccccgctttcctgaaaaaatctcggaaagaagaggctggggcgggcgaacagcaccaggactgtgaacccgccgccgcagctgtaaggataaccctcaccttgtttgagcctgatcacaagcgatgccctgagtttttttatcccgaattagtgaagaatatccgtgggaaggtgaagggtctgcaacccggggataagaagaaggacttgtccgacccctttaacgacgaagagaaagagcgccacaaggtcgaggccctggcgcgcaagttcgaagaaaaatatggcggaaagaagcggcgaaaggaccgaatccaagacctaatagacatgggctacgggtacgatgagtctgacagttttatcgataactcagaggcttacgatgagctggtacccgcatcccttaccaccaaatacggcggattctacatcaacagtgggactttgcagtttcggcaggccagcgagtccgaggatgactttatcaaggaaaagaaaaagaagagcccaaaaaagcgcaagttaaaggaggggggcgagaagatcaagaaaaagaaaaaggacgatacgtatgacaaggagaaaaaaagtaaaaagtccaagttcagcaaagcaggcttcaccgccctgaatgctagcaaggagaaaaagaaaaaaaaatactccggcgctctgagcgtgaaagagatgctcaaaaaatttcaaaaagagaaggaagcccaaaaaaaacgcgaagaggagcacaagcctgtcgccgtgccttctgctgaagcacagggacttcgagaactggagggggcctctgaccccctgttgtcactctttggatcgactagtgataacgaccttctccaggctgctacagcgatggactcgctcacggacttagacctagaacatctgctgagcgaatcccccgagggaagcccattccgcgacatggacgacggctccgattctctaggcgtcggcctcgatcaagaattccgacagccttcttccctgcctgaagggctcccagccccactggagaaacgagtgaaggagctcgctcaagctgccagggctgcagagggagaatccagacaaaagttcttcacccaagatattaacggtatcctgctcgatattgaggcgcagactagggagctctctagccaggtccgatctggagtgtacgcttatctcgcctcttttttgccatgttccaaggatgcccttttaaagagagcccggaaactccacctctacgagcagggcgggcggctcaaggagcctctgcaaaaactcaaggaagccattggcagggccatgcctgaacagatggccaaatatcaggatgagtgccaagctcatacccaggccaaggtggcgaagatgctcgaggaggagaaagacaaggagcaacgagaccgaatctgttctgacgaagaggaggatgaggagaagggagggcggagaataatggggccccggaagaaatttcagtggaacgacgagatcagagagctgctgtgtcaagtggtgaaaataaagctcgagagtcaggacctcgagcgcaataacaaggcccaggcctgggaagactgtgtgaagggctttctggacgcagaagtgaaacccctttggccaaagggctggatgcaagccaggacactgtttaaggagtcccgtcggggtcacggccatctaacaagcatcttagcgaaaaaaaaggtgatggccccaagcaaaatcaaggtgaaagagtcctcaactaagcccgataagaaagtgagcgtgccaagtggccagattggtggccctatcgcactccccagcgatcaccagactggaggcctctccattggcgcaagtagccgggaactgccctcacaggccagtgggggactggctaacccacccccagtgaacttggaggacagcctggatgaggacctgattagaaatcccgcatctagcgttgaggcggtcagcaaagaactcgccgctttaaattctagagccgcaggtaatagcgaattcacactaccagccccgagtaaggctccagctgagaaggtcggaggagtgctctgtacagaagagaaaaggaattttgccaaacctagccccagtgctcctcccccggcaagctccctccagagcccactgaatttcctggcagagcaggcattagccctggggcagtccagccaagaaaaaaagcccgagagctccggttataaggaactatcttgtcaagccccccttaacaaaggcctgcccgaggttcaccagtccaaggcaaaacatcatagtctcccaaggacatctcatggccctcaggtggccgttcctgtgcccggtcctcaggtgaaggtgtttcatgcgggtacccagcagcaaaagaatttcactccacctagccctttcgccaacaaactgcaggggccaaaagcatcacccacacagtgccaccggagtcttctccaactcgtcaagaccgctgccaaagggcaggggttccatcctagtgcacccgcaacttcagggggtttgtccgcgagctctagttccagtcacaaaaccccggcttcatcttcctccgctttaagtcatcctgctaaacctcactccgttagctccgctggcagctcctataagaataatcctttcgcttcctcaatttcgaaacatggcgtttcctctgggagctcatcgtctggtggaactccagttcaatcatctgtgagcggatcactcgtgcctggaatccagccacccagcgtgggccaggccacctctcgaccagtgccttcttcagctggtaagaaaatgcccgtgtctcagaaactgaccctggtcgccccacctggggggccaaacggcgactcatcaggaggcacacagggggtggccaagcttctgacttcaccatcacttaaaccatctgccgtgagctctgtgactagctccacctcattgagcaagggtgcaagcggcactgttctgttagccgggtccagtctgatggctagtccttataaatcatcaagtcctaagctaagcggagccatgtcaagtaacagtttgggtattatcaccccggtaccaatacccgtgcacgtactgagcttcagcgcagattcctccgccaaagccggtgtcagtaaggacgcaatagtgacaggcccggctccaggctccttccaccacgggctgggacatagtgccagccaactgcacggcaaaggtcctgctgtgcccaggaagctgtag

SEQ ID NO: 210441 - DNA, 3795 bp, synthetic construct
  misc_feature 1..3795: note = Description of Artificial Sequence: Synthetic coding sequence
  source 1..3795: mol_type = other DNA
atgagcctgcagcgggagcccccccggcccgagccccccccccccttcccgccacttccattacaacctccacccccacgagagtccgcgtctcgggcagaacagccacccaggccccctcgcgaaactgttcggctcgaacttgtcctcaaggatcccaccgacgaatcttgcgtggagttttcctatcctgagctcctattgtgcggcgagcaaaggaaaaaacttatacacacagaagacccgtttaacgacgaacatcaagagcgtcaggaagtggaaatgctggccaaaaagttcgaaatgaaatatggcggcaagcctcggaagcacagaaaagaccggttgcaagatctcatagacatcggttttggctatgacgagaccgaccccttcatcgataacagcgaggcgtatgatgagttagttccggcatctttgaccacaaagtatggggggttctatattaatactggaaccctacaattccgccaggcatctgataccgaggaagatgacattaccgataaccagaaacataagccccccaaggttcctaagattaaagaggacgacatcgaaatgaaaaagcgaaagcgcaaggaggagggcgagaaggagaagaaaccccggaaaaaagtgccaaaacagcttggggttgtcgccttaaactcccacaagagcgaaaaaaagaaaaagcggtacaaagattcattgagtctcgctgccatgatccggaagttccaaaaggagaaagacgccctcaaaaaagagagcaatcctaaggttcccgtgacccttagcactccttccctcaataaacccccctgcgctgcagctgccctggggaacgacgtgccggacttaaacttgtcaagcggcgatccggatctaccaatttttgtgagtacaaacgagcacgaattgttccaggaagcagagaatgcacttgagatgctagacgactttgactttgatcggctgctggacgccgcgagtgatgggtcgccgctgtcagaatctgggggcgagaatggaacgacaacacagccgacctacacaagccaggtgatgcctaaagtcgtgccaactctacctgagggactgcccgttttgctggaaaaaaggatagaggatttacgcgtggccgcaaaactgtttgatgaagagggtaggaagaagtttttcacccaggatatgaacaacatcttgctggacatcgagctccaactgcaggagcttgggccagttatccgctctggcgtgtactcacatctagaggcctttgtcccttgtaacaaggagacgctggtcaagcggctgaaaaaattacatttgaatgtacaggacgaccgcctgcgggaacctctccagaagttgaagctagctgtaagcaatgtgatgcctgaacagctctttaagtatcaggaggattgccaggcaaggagtcaggcgaaatgtgccaagttgcagaccgatgaggagcgggagaagaatggctcagaagaagatgatgacgaaaagcctggcaaaagggtcattggccctaggaaaaaatttcattgggacgatacgatccgcaccctgctatgcaacttggtcgaaatcaaactggggtgttacgagttggagcccaataagagccagtccgctgaagactacctgaagtctttcatggaaacagaggtgaagccattgtggcctaaaggatggatgcaggcccggatgctttttaaagaatcaaggagcgttcataaccacctaacatcagccccagcaaaaaagaaggttattccagctcctaaacccaaagttaaggaagtgatggtcaagaccctacccctgcattcatttcctacaatgctgaaggagtgcagccctaagaaggaccagaaaaccccaacatcactggtggcgtctgtctccggcccacctaccagttcttctacggctgctatagcagctgcatcgtcctcaagtgcaccagcacaggaaactatatgtttagacgactcccttgatgaggatctgtcatttcacagcccctcgcttgatctggtgtctgaggccctggcagtgattaataacggcaataaggggcctccggtaggatcaaggatttccatgcctaccaccaagccgagaccaggcctgcgcgaggaaaaacttgccagcattatgtctaaattgccactcgccactccaaaaaaacttgatagtactcagaccacccactcaagttctctgattgcagggcataccggccccgtccctaagaagccacaggacctcgcacatacaggtatctctagcggactgatagcaggaagcagcatacagaatccaaaagtctccctggaacctctcccagctcgtctgttgcaacagggcctgcagagaagctcccagattcacactagctccagctcgcagactcatgtgagctcaagttcccaggcccaaatagccgcgagttctcacgctctgggtacttctgaggctcaggatgcctcaagcctcactcaagtgacaaaagtgcaccaacatagcgcagttcagcaaaactacgtgtccccactgcaggccacaatctccaagagtcagacaaaccccgtggtgaaacttagtaacaatccacagctgagttgtagtagctccctaatcaaaacttcggacaagccactcatgtatcgattgcctttaagtacgccatcacccgggaacggtagccaagggagtcatcccctcgtgagccggacggttccatccacaacgacgagcagcaattacctcgcaaaggctatggtatcccagatctccacgcaggggtttaagagccccttctccatggctgcttctcccaaactcgcagcttctccaaaacccgccacaagtcccaagccgcttcctagccccaaaccgagcgcttctcccaagccgtctctgagtgctaaaccaagtgtttcaacaaagcttatctccaaaagtaatcctactcctaaacctaccgtgtctccctctagtagctctcctaacgcactggtcgcccaaggttctcactcctcgaccaacagccccgtgcacaagcaaccctctggcatgaatattagtcggcagtccccaaccttgaatctcctcccatcaagtcgtaccagcggactgcctccaaccaagaacttgcaggcacccagcaaattgaccaattcatctagcaccgggaccgtcggaaagaattctttgagtgggatcgctatgaatgtccccgccagcagaggaagtaacctgaattccagcggagccaatcgcactagcctgagtggcgggacgggcagcggaactcagggcgcgacaaaacctctgtcaaccccacaccgtccctctaccgcaagcggcagctccgttgtcacggcgagtgtgcagagcaccgcaggcgcctcattgcttgcaaatgcgtcccccctgacacttatgacttcccccctaagcgtgaccaatcagaatgtgaccccatttgggatgctgggcgggcttgttccagtcaccatgcccttccaattcccgctggagattttcggcttcggtactgatacggcaggagttacgaccacctccggttcgaccagtgccgccttccaccattcattgacacagaacttattgaagggactgcaaccaggaggagcccagcacgccgccacgctttctcattccccattgcccgcgcacctgcagcaagcctttcacgatgggggtcagtccaagggggacacaaagttaccccggaaaagtcagtag

SEQ ID NO: 210442 - DNA, 4044 bp, synthetic construct
  misc_feature 1..4044: note = Description of Artificial Sequence: Synthetic coding sequence
  source 1..4044: mol_type = other DNA
atggccgagccccggcgggtggccttcatcagcctgagccccgtgagacgcagggaggccgaatatcctggccctgagcgggaaccggaatacccccgagaaccgccgcggttggaaccccagccctaccgtgaacctgccagggctgagccacccgcccccagagaacctgccccccggagtgatgcacagccccccagccgagagaagcctctccctcaacgcgaagttagcagagccgaacctcctatgtctttgcagagggagccaccccgccctgagcctcctcctcctttccctccactgcccttgcaaccacccccccccagagagagcgctagccgtgcagaacagccaccgcgcccaccgcgcgagaccgtgcgcctggagctggtgctaaaggacccaacagacgagtcgtgtgtggaattctcgtacccagaactgctcttgtgcggtgagcaacggaagaaattgattcacacagaagatccctttaacgatgagcaccaggagcgtcaggaggtcgagatgcttgctaaaaaattcgagatgaagtatggtggcaagccgcgaaaacatcgaaaagaccggctgcaggaccttatcgatataggattcggatacgacgagacagacccatttattgataactctgaggcctacgatgagttggtgccagcctccctgacaacgaagtatggtggcttctatatcaacactgggaccctacaattccgccaagcctcggataccgaggaagatgacataactgacaaccaaaagcacaagccccctaaggtgcctaaaatcaaagaagacgatatcgagatgaagaaacgaaagcgaaaagaggagggcgaaaaggaaaagaagccacggaagaaagtacccaaacagttgggagtcgtcgcactcaatagtcacaagtcagaaaagaagaagaagagatacaaggactcattatccctagctgcgatgattagaaagtttcaaaaggagaaggacgctctgaagaaggagagcaatcctaaagtcccagttaccctgagtaccccctctctgaataaaccaccttgcgcggccgcagccctcggtaatgatgtcccagaccttaatctgtcttcaggtgacccagatctgccaatcttcgtgtctacaaatgagcacgagctgtttcaggaggctgaaaacgctctggaaatgctggacgattttgattttgataggctgcttgacgccgcctctgatggttcaccccttagcgagtcaggtggtgagaacggaacgactacccagcccacatacacaagccaagtcatgccaaaagtggtccccaccctcccagaagggctgccagtgctgttggaaaaacgaatcgaagacctgcgcgtggcagcgaagctttttgacgaagagggacgcaaaaaattctttacacaagatatgaataatatcctcctggatattgaactccagcttcaagaacttggccctgtgatccgctctggcgtgtacagccaccttgaggcctttgttccatgtaacaaagaaacactggtgaaacgattgaaaaaactacaccttaacgtccaggacgatcgccttagagagcctttgcaaaaactcaagctggctgtttcaaacgtgatgccagaacagctgtttaaatatcaggaggactgtcaagcgagaagccaagcaaagtgcgccaagctgcaaacagacgaggagagagagaaaaatggatccgaggaggatgatgacgaaaagcccggcaagcgcgtgatcggcccccggaaaaaattccactgggacgacaccatcagaacccttctgtgcaatctggtcgagatcaagctgggatgctatgaactcgaacctaacaagagccagtccgcagaggactacctgaaatcctttatggagacagaggtcaagcctctctggcctaaagggtggatgcaagcccgtatgctgtttaaggagagcaggtccgtgcataaccacctcacgtccgcacccgccaagaaaaaggtaatccccgcacccaagcctaaagtgaaagaggtgatggtaaaaacattgcccctccactcatttcctactatgctgaaggaatgctctcctaaaaaggatcagaaaacccctaccagcctcgtagcttctgttagcggaccccccacttcttcatctaccgcagccattgccgcagcttcttcgtcgagtgcaccagcccaggagacaatctgcctggacgattcgttggacgaagacttgtcgttccatagcccctctctggacctggtatctgaagctcttgctgtgatcaacaatggcaataagggcccaccagtgggctctaggatcagtatgcctaccaccaaaccaaggccaggcttgagggaagagaaattagccagcattatgtctaaacttccgttagcaacccccaagaaactcgatagcacacagacaacgcactcctcctccttgatcgccggccacacaggcccggtgcctaaaaagccacaggacctggctcatacagggatctccagcggtttgatcgcagggagctcaatccagaaccccaaggtgtccttggagcctttgcctgcaaggttgctccagcagggactgcaaagatcctcacagatacacacgagctcaagctctcaaacacatgtctcctcaagcagccaggcgcagattgccgcctcaagccatgcactggggacatccgaggctcaggacgcctcttccctcacacaggtgaccaaggtgcatcagcactccgcagtacagcagaattacgtgagtcccctgcaggccactatatctaaaagtcagacgaaccctgtggttaaattgtctaacaaccctcaattgagctgtagcagcagtctgataaaaacctccgacaaacctctcatgtaccgtctgcccctttccaccccaagtcccggaaacgggtcccaaggatcccatcctctcgtctctcgtactgtaccgtctaccaccactagtagcaattacctggcgaaggccatggtttcgcaaatatctacccagggattcaaaagccctttctcaatggctgcttcccctaaactggctgcgtcacctaaacccgctacaagccccaaaccgctcccatctcccaaaccgagcgcctcccctaagccttccctgagtgcaaagccctccgtctcaacgaagttgattagcaagagtaacccaaccccaaagcctaccgtgagtccttcctctagctcccccaatgcactggtggctcagggatcacattccagcacaaatagtccagtccacaaacagccgtccgggatgaacattagtagacagagcccaaccctcaatctactgcctagtagcaggaccagtggtcttccaccaactaaaaaccttcaggcgcccagcaaactgactaacagcagctccacagggaccgtggggaagaatagcttaagcggaatcgccatgaacgtccccgcctctcgcggtagtaacttgaatagctctggagccaatcgcaccagcttgagcggcgggaccggttcagggacgcagggggccaccaagccactttcaacaccccaccgcccaagcacagcgtccgggtcgagcgttgtaacagcctctgtgcaatctacagccggcgcctctctcttggcgaatgcatcaccgttaacactgatgacgagtccactgtccgtgaccaatcagaacgttacgccatttgggatgctggggggtttggtacctgtgacaatgccatttcagttccctctcgagatatttggctttggtaccgatacagccggtgtgacaacaacatctggctcaacctccgcagcattccaccactccctaacacaaaatctgctgaaggggctgcagcccggaggagctcagcacgcggccacactctctcacagccccctgcccgcgcacctccagcaggcttttcacgatggaggacagagcaaaggagatactaaactgcctcggaagtcacaatag

SEQ ID NO: 210443 - DNA, 1686 bp, synthetic construct
  misc_feature 1..1686: note = Description of Artificial Sequence: Synthetic coding sequence
  source 1..1686: mol_type = other DNA
atggccgagagcggcgagagcggcggcccccccggcagccaggactctgcagcaggcgccgagggcgctggggcccctgcagctgctgcgtcggccgagccaaaaatcatgaaggtcacagtgaaaaccccaaaggagaaagaggaatttgctgtgccagagaacagctccgtccagcagtttaaggaagagattagtaaacgatttaagtcccatacagaccagctggtactgatctttgctgggaagatactcaaggatcaggacactctgagtcaacatgggatccatgacggtctaaccgtccacctcgtcattaagacacagaatcgaccgcaagatcatagcgcacagcaaacgaacactgccggatccaatgtaacaacatcatcgacacccaattccaactctacaagtggcagcgccacttccaaccctttcggccttggagggctggggggtctggctggtctgtcatcattaggactcaacactaccaattttagtgagctgcagagtcagatgcagaggcagctgttaagtaacccagagatgatggtgcaaatcatggaaaatccattcgttcagtcaatgctgagtaacccagatctgatgcgtcagcttattatggctaatccccagatgcaacagctcatccagcggaacccggaaattagccacatgcttaacaatcccgacatcatgagacagactctcgaattggctcgcaacccagcgatgatgcaggaaatgatgaggaatcaggatcgcgcattgtctaacctggagagcatcccaggtggatacaacgcattgagaagaatgtataccgatattcaggagcccatgctgtctgccgcgcaggagcaatttggaggaaacccattcgccagccttgtgtcgaacacttcctccggcgagggctcgcagccgtccagaactgagaaccgcgatccactgcccaatccatgggccccccagacatcacaatctagctctgcttcttcagggacagcaagtacagtgggcggcaccactggttcgaccgccagcggtacttccggacagagtacaacagcccccaacctcgtcccaggtgtgggagccagcatgttcaacactccaggcatgcagagtctgttgcagcaaataaccgagaatcctcagctcatgcaaaacatgctgtccgctccatatatgcgaagcatgatgcagagcttgtctcagaacccggatttggccgcacagatgcagaacccagacactctgtctgctatgtcaaaccccagagccatgcaggccctgctccagatccagcaggggcttcagaccttggcaacagaagcccccggcttaattcccggatttacccctgggctcggtgctcttggatcaactggtggttcctctggcacaaacggtagcaacgccaccccctcagagaacacaagcccgacagccggcactactgaacccggacaccaacagttcatccaacagatgctgcaggctcttgccggtgttaaccctcagctacagaacccagaggtccggttccaacaacagcttgagcaactcagcgctatggggtttctaaaccgtgaggctaacctacaggccttgattgcaacaggcggggatattaacgctgctattgagaggctgctgggatcacagccctcgtag

SEQ ID NO: 210444 - DNA, 1770 bp, synthetic construct
  misc_feature 1..1770: note = Description of Artificial Sequence: Synthetic coding sequence
  source 1..1770: mol_type = other DNA
atggccgagagcggcgagagcggcggcccccccggcagccaggactcagcagccggagctgaaggtgcaggagctccggctgccgcggcgagcgcggaaccaaagatcatgaaggtgacagttaaaacacctaaagagaaagaggagtttgctgttccagaaaactctagcgtacagcagttcaaagaagagatcagcaagcgattcaagagtcatacagaccagctggtgttgatcttcgctggaaagattctcaaagatcaggatactttgagccagcacggaatccacgacggattgactgtacatctggtgatcaagactcagaaccgaccccaagaccacagtgcacagcagactaacacagcgggctctaacgtgaccaccagctctactcccaacagcaactcgacatccggtagcgccacatcaaatccctttggtcttggcggactaggcggactagcaggtctttcatccctgggcctcaacacaaccaatttctcagaactgcagagccagatgcagcgccaactgctgagtaatcccgagatgatggtgcagatcatggagaacccattcgtgcaatctatgcttagtaacccagatctgatgaggcagttaataatggcgaatcctcagatgcaacagctgatccaacggaatccagagatcagccatatgctgaataatcctgatatcatgcgtcagacactcgaactggccagaaacccggctatgatgcaggaaatgatgcgtaaccaggaccgggctttgagcaacttagaatccatacctggcggctataacgctcttaggcgaatgtacactgacatacaagaacccatgctgtcagccgcacaggagcagtttggggggaacccattcgcttcactggtgagtaacactagctcaggcgaggggtctcagccgtccaggacagagaatagggacccgctgcctaacccatgggcgccccaaacgagccagtcttcttctgccagtagtggcaccgcttctacagtgggaggaacaacaggttcaaccgcctccggaacatccggccagagtacaaccgccccgaacttggtgcccggcgtcggcgcctcaatgttcaataccccaggtatgcagtcactgctgcagcagatcacggagaacccacagttgatgcagaatatgctgagcgcaccttatatgaggtctatgatgcagtccttatcacagaaccctgacctcgctgctcagatgatgctaaataaccctctgttcgcaggcaacccacagttgcaggaacagatgagacagcaactgcctacctttctgcagcaaatgcagaaccccgacactctcagtgctatgagtaacccccgcgcaatgcaggctcttctgcagattcagcaagggctgcagacgctcgcaaccgaggcccccggattgatccccgggtttacccccggcctgggggccttgggctcaacagggggaagctcagggaccaacggtagtaatgctacaccaagcgaaaacacgagcccaactgccggcacaacggaacctggccaccagcagttcattcagcagatgctgcaggccctcgccggagtgaatcctcaattgcagaaccccgaggtgcgttttcagcagcaactggaacagctctcagccatgggcttcttaaatcgcgaagcaaacctgcaggccctgatcgctactggaggtgacatcaatgccgctatcgagcgcctcctgggctctcagccttcttag

SEQ ID NO: 210445 - DNA, 1875 bp, synthetic construct
  misc_feature 1..1875: note = Description of Artificial Sequence: Synthetic coding sequence
  source 1..1875: mol_type = other DNA
atggccgagaacggcgagagcagcggccccccccggcccagccggggcccagccgccgcccagggtagcgcggccgctcccgccgagcctaagataatcaaggtaaccgtaaaaacgcccaaagagaaggaagagttcgcggtgccagaaaatagctcggtccaacagttcaaggaggccatctcaaaacgtttcaagtcacaaactgatcagcttgtgctgatattcgctggcaagatattaaaggaccaagataccctgatccagcacggcattcacgatgggttaaccgtccatctggtgataaagtctcagaaccggccccaaggccagtcaacacagcccagcaatgcggccgggactaatacaacgagtgcctctaccccaagatccaactccactcctatcagcaccaattccaacccttttggcctcggctccctggggggtttggcgggactgtcaagcttgggactaagctcgaccaacttttcggagcttcagtctcagatgcagcagcaactcatggcatccccagaaatgatgatccaaatcatggaaaaccctttcgtgcaatcaatgctctccaacccagatctgatgcgccagcttatcatggccaacccacaaatgcagcagctgattcaaaggaatcctgagatttctcatctcctgaacaatccagacatcatgaggcagactttggagatcgccaggaacccagcaatgatgcaggaaatgatgcgcaaccaggatcttgcactgtccaacttggaaagcatcccgggcggttacaacgccctgcgtaggatgtataccgacatccaggagccaatgctcaacgccgcccaggaacagtttgggggcaaccctttcgcatctgtgggcagtagctcctcatcaggagaaggcactcagccctctcggaccgagaacagggacccactcccaaacccatgggctccaccgccagccacacaatctagcgccacgacttcaacaactacttctactgggagcggatctggtaactcttcaagcaacgccacgggaaataccgttgccgctgccaactacgttgcatctattttttctaccccggggatgcagtctctgctgcagcagattaccgagaatccacagctcatccaaaacatgctttccgcaccttacatgaggagcatgatgcagagtctaagccagaatcctgatctagcggctcaaatgatgcttaacagcccactgttcacggctaacccacaactccaggagcagatgaggccacagcttcctgcgtttctacagcagatgcagaacccggacacattgtccgccatgagcaacccccgagctatgcaggccctgatgcagatccagcagggactgcagacgttggccaccgaagccccggggctgattccatctttcaccccaggcgttggtgttggagtgttgggaacagcgataggccccgtgggccctgtcactcccatagggccgatcggcccaattgttcctttcaccccaattggaccaattgggccaatcgggccaacgggccctgctgctccaccaggctcaacaggcagcgggggtcctacgggccctacagtgtctagcgccgctcccagcgagacaacctctcccacctctgagtcaggacctaaccagcagttcatccagcagatggtgcaagcgctggccggcgcgaacgccccccagcttccaaaccctgaagtgagatttcaacagcagttagaacagttgaatgccatgggtttcctcaatagggaggctaacctacaggcactcattgccacggggggggacatcaatgctgccatcgagcggttgctgggcagtcagccttcgtag

SEQ ID NO: 210446 - DNA, 1467 bp, synthetic construct
  misc_feature 1..1467: note = Description of Artificial Sequence: Synthetic coding sequence
  source 1..1467: mol_type = other DNA
atggccgagaacggcgagagcagcggccccccccggcccagccggggacccgccgccgctcaaggttcggctgctgcccctgccgaacccaagataataaaagtcaccgtgaaaacaccaaaggaaaaggaggaatttgccgtcccagagaacagctccgtgcagcagttcaaggaagcaatttctaagcggttcaaaagccagacagatcagctcgtcttgatttttgcaggcaaaatattgaaagatcaggacacactcattcagcacggcattcatgacggcctcactgtacatctcgtcattaaatcccagaacaggccccagggacaatcaactcagcctagtaacgcagcggggacaaacactaccagtgcgagcactccaagaagcaattcaacacctatatcaactaacagcaaccctttcgggcttggcagtttagggggtcttgccggcttgtccagtctgggtctgtctagtactaacttcagcgaactgcagtcacagatgcagcaacagctgatggcctcccccgaaatgatgatccagatcatggagaacccttttgtgcaaagcatgctctctaaccctgacctcatgcgccagttgattatggctaacccccagatgcaacaactgatccagaggaatcctgagatcagccatcttcttaacaatcctgacatcatgcgtcagactctcgagattgctcgaaaccccgcaatgatgcaggagatgatgcgaaaccaggaccttgccctcagcaacctcgagtcgattcccggcgggtacaatgccctcagacgaatgtataccgacattcaggagcccatgcttaacgccgctcaggagcagtttggcggaaatccttttgcttccgtggggtcctcatcttccagcggggagggtacgcagccgtctcgaacagaaaaccgtgaccccctgccgaacccttgggctcccccacctgcgacgcaatcttcggccaccacgagcaccactaccagcacaggatccggctctggcaatagtagctccaatgctactggcaacaccgtagcggctgccaattatgtcgcaagcatcttcagcacccctggcatgcagtctctgctccagcagatcacagaaaatccacaattgattcagaatatgctgagcgcaccatatatgaggagcatgatgcagagcttgtcccaaaatccagacttggccgctcagatgatgctcaattctcccctatttacagcgaatccgcagttgcaggagcagatgcgccctcagctgccggcatttcttcaacagatgcagaacccggatacattaagtgcgatgtccaatccaacttcaagttctttttcaaagtggtgtcgcccttggcttgagcagatgcttcattcctgccggattcagaagtccgacttttctaacaactggaatagctccactcagtggggtagctag

SEQ ID NO: 210447 - DNA, 1968 bp, synthetic construct
  misc_feature 1..1968: note = Description of Artificial Sequence: Synthetic coding sequence
  source 1..1968: mol_type = other DNA
atggccaagggcggcgaggccctgccccagggcagccccgcccccgtccaggatccacacctgatcaaggtcaccgtgaagacacccaaggacaaggaggacttttctgtgaccgatacatgcacaatccagcaactcaaggaagagatcagccagcgtttcaaggcccaccctgaccagctcgtgctcatcttcgccgggaaaatcttgaaagatccagattcgctcgctcaatgcggcgtgcgggatggcctgacagttcatctggtgattaaacgacagcacagggccatgggaaatgaatgtccagcagcctcggttcctacccaaggaccctcacccgggtccttaccccaaccctcctccatttacccggccgacggcccccctgccttctccctcggactcctaaccggcctgagtcgcctgggcctcgcctacagaggctttccagaccagcctagctcccttatgagacaacacgtgtcagtgcccgaattcgttacgcagctgatcgacgatcccttcatacctgggttgctgtctaatacgggattagtacgacaactcgtgctggataatccacacatgcagcagcttatccagcataaccctgagattgggcacattttgaacaaccctgaaataatgagacagactctggagttcctaaggaacccagcaatgatgcaagaaatgatcaggtcacaagaccgggtactgtctaacctggaaagcattccaggtggctataacgtgttgtgcactatgtatacggatattatggatccaatgctcaatgccgtacaggagcagttcgggggaaatccgtttgctaccgccacaaccgataacgccacaaccacgacctcccagccctctaggatggagaactgtgacccgctccctaatccctggacctcaacacacgggggatcaggttccaggcagggcaggcaggacggagatcaggatgcgcctgatattagaaatcgctttccaaattttctgggtatcatcaggctctacgattacctgcaacagttacacgagaatccacagtcgttgggaacctaccttcagggaacagcttctgcattgagccagagccaggagcctcctccgtccgtgaatcgagtgccaccctcatccccctcgagtcaggaaccaggctcaggtcaacctctgcctgaagaaagcgtggctattaaagggcgctctagctgcccggcgtttttgaggtatcctacggagaattctaccggccaaggcggtgaccaggacggtgccggcaagagctcaacaggtcactccactaacctgcctgaccttgttagtggcttgggggattcagcaaatagggtgccatttgccccattgagctttagcccaacagctgccatcccaggtattcccgagcctccctggctgccttcccctgcttatccaagaagtttgcgacctgatggaatgaaccctgctcctcagctacaggatgagatccaacctcaactgccattacttatgcacctgcaagctgctatggccaacccacgggcactgcaggctctgaggcagatcgaacaggggctccaggtgttggcaaccgaggccccccgtttgctgctgtggttcatgccatgtctggcaggcacaggctccgtggctggaggaatcgagtctcgggaagaccccctgatgtcagaagaccccctaccaaaccctccaccggaggtgtttcccgccctcgactctgctgagttgggattcctgtctcctccctttttgcacatgttacaggatctggttagtacaaacccccagcagcttcaaccagaggctcacttccaggtccagctcgagcagcttcggagcatgggattcttgaatagggaggctaaccttcaagctttgattgcaacaggcggcgacgtcgatgcggctgtagagaaactgaggcagtcttag

SEQ ID NO: 210448 - DNA, 666 bp, synthetic construct
  misc_feature 1..666: note = Description of Artificial Sequence: Synthetic coding sequence
  source 1..666: mol_type = other DNA
atggccaagggcggcgaggccctgccccagggcagccccgcccccgttcaagatccacacctgattaaggtgaccgtgaagactccaaaggataaggaagacttttcggttacagacacatgtaccatccagcagttgaaagaagagatcagccagaggtttaaggcccatccggaccagctggtgcttatctttgccgggaagatactcaaagaccctgactccttggctcagtgcggcgtacgggacggcctgacagtgcacttagtgataaagcgccagcacagggctatgggcaatgagtgtcccgccgccagtgttcccacacaaggtcccagtccaggctctctacctcaaccctcatccatctatccagccgatggccctcctgccttctccctgggccttctcacaggactgagtcgtttgggcctggcctaccgcgggtttccagaccaaccctcatctttgatgagacagcatgtgagcgtccctgaatttgtgacgcagttaattgatgacccttttatccccggattactcagcaacacaggacttgtgcgccagcttgtcctggacaatccacacatgcaacagctcattcaacacaacccggaaattggacacatccttaacaaccccgaaatcatgagacaaaccctttag

SEQ ID NO: 210449 - DNA, 681 bp, synthetic construct
  misc_feature 1..681: note = Description of Artificial Sequence: Synthetic coding sequence
  source 1..681: mol_type = other DNA
atggccgagcccagcggcgccgagacccggccccccatccgggtgacggtgaagactccaaaagataaggaagagatcgtaatctgtgaccgagccagcgtaaaagaattcaaggaagagatctcgagaaggtttaaggcccaacaagaccagctggtgctcatcttcgccggtaaaattctcaaggatggagataccttgaaccagcatggcattaaggacggccttactgtacacctggtgatcaagactccccagaaagcccaggaccctgccccccccgctgccccctctttaccagctgctgacgcagaacctagagtcacattgcacccttaccagagcccatcacatgctggaattgctgcggacccagctggaactacggacctggcagatcgtggcccttgggcggggacccagccatggcttctttgggacatacccgacccctcaacactctctcgacaacagcggcgggtgtacgctcgcggcccgcacttcctgacttcccacgccagccatattttcagtaacagggggttccaaagaccggcggcaacccacgctgccgatgatcctgcctttggatggaagtggaagctaaccggcgccgatgctcgctcggagatctcagctgccgccggcgccgcgcagctgcacggtctgcatcagagctag

SEQ ID NO: 210450 - DNA, 1806 bp, synthetic construct
  misc_feature 1..1806: note = Description of Artificial Sequence: Synthetic coding sequence
  source 1..1806: mol_type = other DNA
atggccgagcccagcggcgccgagacccggccccccatccgggtgaccgttaaaactcccaaggataaggaagagatcgttatctgtgacagggccagcgtgaaggagtttaaagaggaaattagccgccgtttcaaggcacagcaggatcagctcgtgttgatttttgctggaaaaattctgaaagatggagacaccttaaaccagcatggaatcaaggatggtctcacagttcatctggtgatcaaaactccacagaaggctcaagatccggccgctgctacggccagtagcccatctaccccagatcctgcatccgcacctagcacaacgcctgcctcacctgctacaccggctcagcccagcacaagtggtagcgcatcctccgatgctggaagcggctccaggcggagcagtgggggcggaccaagccctggtgccggcgagggttctccatccgcaacagcttctattcttagcggttttgggggtatactgggtctgggttcgcttgggctgggtagcgccaacttcatggagctgcagcagcagatgcagagacagctgatgagcaatccagaaatgctgtcgcaaatcatggaaaacccactggttcaggacatgatgagcaaccctgatctgatgaggcacatgattatggccaacccccagatgcaacagctcatggaaaggaacccggagatttcccatatgttaaataacccagagctcatgaggcagacgatggagcttgcgaggaatcccgccatgatgcaggagatgatgcggaatcaggaccgggcgctgtctaacctggagtcaatacctgggggatataatgctctaaggcgcatgtacacagacatacaggagccaatgtttagtgctgctcgggaacagtttggaaacaacccattctcctccctcgccggcaattccgattcttccagttctcagcccctccgcacggagaatagagaaccactccctaatccttggagcccctctccacctacctcacaggcccctggctccggaggcgaaggaaccggcggatctgggaccagccaggtccatcctacagtgtccaatcctttcggtattaatgctgcctccctcggtagcggcatgtttaatagtccagagatgcaggctctgctgcagcagatttcggagaatccacagcttatgcagaacgtgatctccgcaccttatatgcgcagtatgatgcagactctcgcccagaatcccgactttgctgcccagatgatggtcaacgtgccgctgttcgctggcaaccctcagctccaggagcagctgcgcctgcagcttcctgtcttcctccagcagatgcagaacccagaaagcctctctatattaactaacccaagggcgatgcaagcacttttacaaatccagcaaggtttgcagacccttcaaacagaggcgcccggcctggtaccctctttgggatctttcggcatctcaaggacacctgccccgtctgctggctccaacgccggatcgaccccagaggcacccactagttccccagccactcctgcaacgtccagtcctaccggcgcgtcttctgcccagcagcagttgatgcaacagatgatccagcttcttgctgggtccggcaatagccaggtgcaaacccctgaagtgagatttcagcagcaattggaacagctcaatagcatgggcttcatcaaccgcgaggccaatttacaggctttgatcgccacagggggcgatattaacgctgccattgaacggctgctcggtagccaacttagttag

SEQ ID NO: 210451 - DNA, 336 bp, synthetic construct
  misc_feature 1..336: note = Description of Artificial Sequence: Synthetic coding sequence
  source 1..336: mol_type = other DNA
atggccggcaagcaggccgtgagcgccagcggcaagtggctggacgggataaggaaatggtattacaacgctgctggctttaataagctcggacttatgcgtgatgacacgatctatgaggatgaagacgttaaagaggccattcgcagactgccagagaatctttacaacgataggatgtttaggatcaaacgcgccctcgacctgaacctgaagcaccagatccttcccaaggaacaatggaccaagtacgaagaagaaaatttttacctggaaccttatctgaaagaggtcataagggagagaaaagagagagaggagtgggcaaaaaagtag

SEQ ID NO: 210452 - DNA, 1443 bp, synthetic construct
  misc_feature 1..1443: note = Description of Artificial Sequence: Synthetic coding sequence
  source 1..1443: mol_type = other DNA
atggccgccagcgtggtgtgccgggccgccaccgccggcgcccaggtacttctgcgtgcgaggaggtcgccagccctccttcggaccccggcccttaggagtacagctaccttcgcacaggccttgcaattcgtgccagaaactcaggtaagcttgctcgacaatggcctacgagtggccagcgagcaatccagtcagcccacatgcacggttggagtatggatcgacgtaggcagtcgatttgagacagagaaaaataatggcgccggatattttctggaacacctggcatttaaagggaccaagaaccggcctggctcagccctggaaaaggaagtcgagagtatgggcgctcatctgaacgcttattcgacgcgcgagcacaccgcttactatattaaggccctgtccaaggatcttccgaaagccgtggagctgctgggggatattgtacagaattgctcattagaagacagtcagattgagaaggagcgggacgtcattctgagggaaatgcaggagaacgacgcctctatgcgtgatgttgtcttcaattatctccacgcaacggcttttcaagggaccccgctggctcaggccgtcgagggtccaagcgaaaatgtccggaaactctcacgtgcagacctcacggagtatctgagcacccattataaggctcccagaatggtgttagcagcggccgggggggtggaacatcagcagctgctggatcttgcacaaaaacaccttggcggcatcccttggacctacgcagaggatgccgttccaaccctgaccccttgccgattcactgggagtgaaatcagacaccgggacgacgcgttacccttcgctcatgttgccatcgcagtcgaagggcccggatgggccagccctgataacgtcgccttgcaggtggctaatgctatcataggtcactatgactgcacttacggcgggggggtgcacctgtcctccccattagcgtcaggggccgtcgccaacaagctgtgccagagctttcagactttttcgatctgctatgctgaaactggactcttgggtgcccactttgtgtgcgatagaatgaagatagatgatatgatgttcgtgcttcaggggcagtggatgagactgtgtactagcgccaccgagtctgaggtcgcgaggggcaaaaatatcctgcgtaatgctttggtctctcatctcgacggaacaactcctgtatgcgaagatatcggacgaagtctgctaacttatggccgacgcatcccacttgccgagtgggagagcagaatcgccgaggtcgatgccagcgtggttagggagatctgctccaagtatatatatgaccagtgccctgccgtggctggatacggaccaatcgagcagctgcctgactacaatagaatcagatcaggaatgttctggctccgcttctag

SEQ ID NO: 210453 - DNA, 1362 bp, synthetic construct
  misc_feature 1..1362: note = Description of Artificial Sequence: Synthetic coding sequence
  source 1..1362: mol_type = other DNA
atgaagctgctgacccgggccggcagcttcagccggttctacagccttaaagtcgccccgaaagtcaaggccactgcggcccctgctggagcgccaccccagccccaggacctggaattcacgaagctccccaacgggcttgttatcgcatctctagagaactactcacccgtgagccgcataggcctgtttataaaggctgggtctcggtatgaagatttcagtaatcttgggactacccatctcctgcgcttgacctccagcctgacaactaagggagcaagctcctttaaaataacccgcggaattgaggccgttggagggaagttaagtgtgactgccacaagggagaacatggcatatactgttgagtgtcttaggggcgatgtggatattctcatggagtttctactcaacgtgaccaccgcacccgaattccggcgctgggaggtggcagacctccagccgcaactgaagattgataaagcggtggctttccagaaccctcagacgcacgttatcgagaatctgcatgctgcagcctaccgaaacgctttggctaaccctctctactgtcctgattatcgcattggcaaggtgacctctgaggagctgcactacttcgtgcagaaccatttcacctcggccaggatggcactaattggccttggggtgtcccatcctgtgctgaagcaagtggcggagcagtttcttaacatgagaggcgggctgggactctcaggggccaaggccaattacagggggggagagatccgagaacagaacggcgattcactcgtccatgcagcgtttgtcgcggagtccgcggtcgccggcagcgccgaggctaacgcttttagtgtgctccaacatgtgctcggggccggacctcacgttaagcgcggaagtaatacaaccagccacctacatcaggcagtcgccaaagctacccaacaaccgtttgatgtgtctgcttttaacgccagttacagtgatagcgggctctttggaatttatactatctcacaagccaccgctgcgggtgacgtcattaaagctgcctacaatcaggtgaagaccatcgcacagggtaacctctcaaatacggacgtgcaggccgccaagaacaaattaaaagcaggatacctgatgtccgtagagtctagtgaatgttttcttgaggaggttggctcacaagctctggtggcaggaagctatatgcctccatcaacagtgttacaacagatagatagcgtcgctaacgctgacataattaacgcagccaaaaagttcgtttcaggacagaaatccatggccgcctccggcaatctggggcacacaccttttgtggacgagctatag

SEQ ID NO: 210454 - DNA, 276 bp, synthetic construct
  misc_feature 1..276: note = Description of Artificial Sequence: Synthetic coding sequence
  source 1..276: mol_type = other DNA
atgggcctggaggacgagcagaagatgctgaccgagagcggcgacccagaagaggaagaggaggaggaagaggagctcgtcgatccactcacaactgtaagagagcagtgtgagcaactcgaaaaatgtgtgaaggcccgggagcgcctggagctgtgcgatgaaagagtctcatcacggagccatacagaggaggattgcaccgaagaacttttcgacttcctgcatgcacgtgaccactgcgtggcccacaaactgtttaataatcttaagtag

SEQ ID NO: 210455 - DNA, 249 bp, synthetic construct
  misc_feature 1..249: note = Description of Artificial Sequence: Synthetic coding sequence
  source 1..249: mol_type = other DNA
atgggccgggagttcggcaacctgacccggatgcggcacgtgatcagctactccctttccccattcgagcaacgggcctacccgcacgtgttcaccaagggtatcccaaacgtcttacgcaggattagagagagcttcttcagagtggtgcctcagttcgtagtattttaccttatctacacttggggcaccgaggagttcgaacggtccaagcgcaagaaccctgctgcctatgaaaacgacaagtag

SEQ ID NO: 210456 - DNA, 249 bp, synthetic construct
  misc_feature 1..249: note = Description of Artificial Sequence: Synthetic coding sequence
  source 1..249: mol_type = other DNA
atgggccgggagttcggcaacctgacccggatgcggcacgtgatctcgtattctctctcacctttcgagcagagagcctaccctcacgtgttcaccaaaggaattcctaatgtgctaagacgtatccgggagagcttcttcagggtcgtgccccagtttgtggtcttttacctgatttacacctggggcactgaagagttcgaacgcagcaagcgaaaaaatccggcagcctacgaaaatgataagtag

SEQ ID NO: 210457 - DNA, 249 bp, synthetic construct
  misc_feature 1..249: note = Description of Artificial Sequence: Synthetic coding sequence
  source 1..249: mol_type = other DNA
atgggccgggagttcggcaacctgacccggatgcggcacgtgatctcatacagcctttccccttttgaacagagagcatacccacatgtgtttaccaaagggatacccaatgtgctaaggcgcattcgcgaaagtttttttcgcgttgttccacagttcgtggtcttctatctcatctatacttggggaactgaggagttcgagcggagcaaacggaaaaatcccgctgcctatgaaaacgacaagtag

SEQ ID NO: 210458 - DNA, 387 bp, synthetic construct
  misc_feature 1..387: note = Description of Artificial Sequence: Synthetic coding sequence
  source 1..387: mol_type = other DNA
atgcagatcttcgtgaagaccctgaccggcaagaccatcaccctggaggttgagccgtcagatacgatcgagaacgtgaaggcgaagatccaagacaaggaaggcataccgcctgatcagcagcgcctcatcttcgccggtaaacaactggaagacggcagaacactgtcagattacaacattcagaaggaatccactctccacctcgtcctgaggctgaggggaggaataatcgagcccagcctgagacagttggctcagaagtacaactgtgacaagatgatctgcagaaaatgctacgctcggctgcacccccgcgccgtcaactgtagaaagaagaaatgcggccacaccaacaatctgcggccaaaaaaaaaagtcaagtag

SEQ ID NO: 210459 - DNA, 387 bp, synthetic construct
  misc_feature 1..387: note = Description of Artificial Sequence: Synthetic coding sequence
  source 1..387: mol_type = other DNA
atgcagatcttcgtgaagaccctgaccggcaagaccatcaccctggaggtagaaccatcagacacaatcgagaacgttaaggctaagatccaggacaaagaagggattccgcctgatcagcagcgtctgatctttgctgggaaacagttggaggacgggaggaccttgagcgattacaatatccagaaggagagcactttacacctggtgttgagactgcgaggcggaataatcgagccatccctacggcagctcgcacagaagtacaattgcgacaagatgatttgtcggaagtgttacgctagactccacccaagggcagtcaattgccgaaaaaagaagtgcggtcacactaacaaccttcggccaaagaagaaggtgaagtag

SEQ ID NO: 210460 - DNA, 1872 bp, synthetic construct
  misc_feature 1..1872: note = Description of Artificial Sequence: Synthetic coding sequence
  source 1..1872: mol_type = other DNA
atggccgccggcgagacccagctgtacgccaaggtgagcaacaagctgaagtctagaagtagtcctagcttgctggagccacttttagcaatggggttccccgtgcataccgcgctgaaggcgcttgctgccactggacgcaagactgcagaagaagccctggcatggctacatgaccactgtaacgatccatctcttgacgacccaatcccacaggagtatgctttattcctttgccccaccggccctctgctggaaaaattacaggagttttggcgtgagagtaagaggcagtgtgccaaaaaccgagcacatgaggtctttccccacgtgactctttgcgattttttcacatgtgaagaccagaaagtggagtgtctgtacgaggcactaaagcgcgctggggataggcttctgggcagctttccgacagccgtacctctggccctgcattcctccattagctatctgggatttttcgtgtccggttctcctgccgatgtgatccgagagttcgctatgacctttgctactgaagcatcactgctcgctgattgctctgtaaagccgtgtaccaaacagctccatctcaccctggctcacaagttttatcctcatcatcaaaggactttggaacagctggctcgggcaataccattgggacattcttgtcaatggactgcagcattatactcgagggacatgcggtttgtacattatcagaccctgagagccctcttccagtacaagccccaaaatgtggatgagctgacgttgtcaccgggggattacattttcgtggatcctacacaacaagatgaagctagcgaagggtgggtcatcgggattagtcaaagaactggatgtagaggatttctaccggagaactacaccgatagggctagtgaatctgacacatgggtaaaacatagaatgtacactttttctttggcaactgatctaaacagtcggaaagatggcgaggctagctccaggtgtagcggggagtttctgccccagacagcccgttcactttcaagtctgcaggctctgcaggccactgtcgctcggaagtccgtcctggtggtgcgtcatggagagcgagtcgatcagattttcggcaaagcctggcttcagcaatgctcaacacccgatggtaaatattaccgaccagacctcaactttccctgtagtctaccgcggagatctagggggataaaggatttcgagaacgatccacccctgagctcctgcgggatttttcagagccgcattgcgggggacgcgctgctcgattcaggaatccgcatctctagcgtgttcgcctcacctgctttacggtgcgtgcagacagccaagctgattctggaggaactgaagctagagaaaaaaatcaagatcagagtggagccagggattttcgagtggacaaagtgggaggctggaaaaaccactccaaccttgatgagcctggaagagctcaaagaggctaattttaatattgataccgactacaggcctgcctttcccctgagcgccctaatgcccgccgagagctaccaggagtatatggaccgctgcaccgcatctatggtccagatagtgaatacatgtccccaagacacaggggtgatcctgatcgttagtcacggatccaccctcgattcctgcactagacccctgctcggcctccctcctcgcgaatgtggtgacttcgcacagcttgtaaggaagattcccagccttgggatgtgtttctgcgaagaaaacaaagaggaagggaagtgggagctcgtgaacccccccgtcaaaactctcacccatggcgcaaacgccgcctttaattggcggaactggatctcaggcaactag

SEQ ID NO: 210461 - DNA, 1986 bp, synthetic construct
  misc_feature 1..1986: note = Description of Artificial Sequence: Synthetic coding sequence
  source 1..1986: mol_type = other DNA
atggccgccggcgagacccagctgtacgccaaggtgagcaacaagctgaaatccaggtcaagcccatctttgcttgagcctctgctcgcaatgggatttcccgtgcatactgccctcaaggctctcgctgccaccggtagaaagaccgcagaagaggccctcgcctggcttcatgatcactgcaatgatccatctctggatgacccgatccctcaagagtacgcactgttcctctgtcctaccggtccattactcgaaaaacttcaggagttttggagagaatctaagcgccagtgtgccaagaatcgcgcacatgaagtgttcccacacgtgaccctgtgcgacttcttcacctgtgaggatcagaaggttgagtgcctttacgaagccttaaagcgggccggggatcgcttattaggcagctttcctaccgcggttcccttggctttgcacagcagcatcagctaccttgggttcttcgtcagtggctctcctgctgatgtgattcgagaatttgccatgacctttgcaaccgaggcttcactccttgccggaaccagtgtgtctcgcttttggatctttagccaagtcccgggtcacgggcctaacctaagattgagtaatctcacccgggccagctttgtgagccactacatcctccagaaatattgctctgtaaagccgtgtactaagcagctgcacctgaccttggcccataagttctatccccatcaccagcgcacactggagcagctggccagggcgatacctctcgggcacagttgtcagtggactgccgcactgtatagccgtgatatgcggtttgtccactatcagaccctgagagccctgtttcagtacaaacctcagaatgtagatgagctcactctgtctcccggcgactacattttcgtggatcctacccagcaggacgaggcatctgagggttgggtgattggaattagtcagagaaccgggtgcagaggctttctgcctgagaactacacagatagggctagcgaaagtgatacgtgggtgaagcaccggatgtatacgttttcattggctacagaccttaattcccgcaaagatggagaggctagctcccgctgcagcggagagttcctccctcaaaccgcccggagtctttcaagcctccaggctctgcaagccacagtcgcaaggaagtccgtgctcgtggtacgacacggagaacgggtggatcagatattcggaaaagcttggttgcagcaatgttctacaccagatggcaagtattatcggccagatctgaatttcccttgctcactcccaaggcgcagccgtggcatcaaagattttgagaacgacccaccactgagcagctgcggaatcttccagtctcgcattgcaggcgacgccctcctggacagcggcattagaatatccagcgtctttgctagccccgcactgcgctgcgtgcagaccgcaaagctgatcctagaagagttaaagctagagaaaaagatcaagatccgagtggagccgggaatcttcgagtggacgaagtgggaagccggcaagactacacctactttgatgtccctggaagaactaaaagaggcaaacttcaacatcgataccgattaccggcccgctttcccgttatctgcactgatgccagcagaatcgtatcaggaatacatggatagatgtacggcgagcatggtgcagatcgtgaacacatgccctcaagacacgggtgttatcctaatagtttcccacggctcaactctggacagttgtacccggccattgcttgggttgcccccgagggagtgcggcgacttcgcacagctcgtccgcaagatccccagcttgggtatgtgcttctgcgaggagaataaagaggaggggaagtgggaacttgtcaatcccccagtgaagacccttactcatggcgcgaacgccgcattcaactggagaaattggatcagtggtaattag

SEQ ID NO: 210462 - DNA, 369 bp, synthetic construct
  misc_feature 1..369: note = Description of Artificial Sequence: Synthetic coding sequence
  source 1..369: mol_type = other DNA
atggccgccggcgagacccagctgtacgccaaggtgagcaacaagctcaaatctaggagtagcccaagtctgctcgagccactcctggcaatgggatttcccgtacatacggcccttaaagctttggcggcaacaggacgcaagactgccgaggaggccctggcctggctacacgaccactgtaacgacccctccctagacgatcccatcccccaggaatacgcactgtttctgtgtcctaccggacctctcctcgaaaagctgcaggaattctggagggagtcaaagagacaatgcgcaaaaaacagggctcacgaagttttcccacacgtgactctctgcgattttttcaccggccctgctgtgtag

SEQ ID NO: 210463 - DNA, 1581 bp, synthetic construct
  misc_feature 1..1581: note = Description of Artificial Sequence: Synthetic coding sequence
  source 1..1581: mol_type = other DNA
atggccgccggcgagacccagctgtacgccaaggtgagcaacaagctgaaatctcgaagttccccttctctgctcgaacctctgttggctatgggttttccagtgcataccgccctcaaggcgttggcagcgacggggcgtaaaactgccgaggaggcactggcatggctccatgaccattgtaacgatccctccctggatgatccgatccctcaagaatatgcgctcttcctctgcccgacggggccgcttttggagaagttgcaggagttctggcgcgagagcaaacgccagtgtgccaaaaacagagcgcatgaagtctttccccacgtaacactctgtgacttttttacctgtgaagatcagaaggtcgaatgtctgtatgaggcactgaagcgggcaggggatcgactcctagggtcctttcccaccgccgttcctctcgctttgcattcctcaatttcctacttaggattctttgtgtcaggtagcccggccgatgttatcagagagttcgctatgacgttcgcaactgaagcctcactactggccgattgtagtgtcaaaccgtgtactaagcagttgcatctgacattggcccataagttttatccacaccatcagagaactcttgagcagctggcccgcgctatccctctaggccacagctgtcagtggaccgccgctctctacagcagagacatgcggtttgtccactaccagactctcagggccctgtttcagtataagccgcaaaatgttgacgaactgacactaagtcctggagactacatctttgtggatccgacacaacaagacgaagcgtccgaaggatgggtgatcgggatcagccagagaactggatgcagaggtttcctgcctgaaaactacacagatagagctagcgagagcgatacatgggtaaaacacagaatgtacaccttttcactggccactgatctgaactctcggaaggatggagaggccagcagtagatgcagcggggaattcctgccacagaccgccaggtcacttagcagccttcaggcgcttcaggcaacagtggcgcgaaagtccgtcctcgtcgtaaggcatggggagcgagtggatcagatctttgggaaggcttggctgcagcaatgtagtactccagacgggaagtactatagaccagatctgaacttcccatgctctctgccaagaaggtctcgcggcattaaggactttgagaacgacccgccactctcatcttgtggtatttttcagtcacggattgccggggacgccctgctggattcgggcattcgcatctcttcagtttttgcctctccagcactccgatgtgtgcaaacggctaagctcattctggaggaactgaaactggagaagaagataaagatacgcgtggagcccggtatttttgagtggacaaagtgggaggcgggaaagacaactccgacgctgatgtctttggaggagttgaaggaggctaattttaacatcgatacagattatcgcagtctgccttgggcctgtgcctctgtcaaaaaaattaagcggaaagagaacggatcctggtag

SEQ ID NO: 210464 - DNA, 1950 bp, synthetic construct
  misc_feature 1..1950: note = Description of Artificial Sequence: Synthetic coding sequence
  source 1..1950: mol_type = other DNA
atggcccagtacggccaccccagccccctgggcatggccgcccgggaagagctctattccaaagtcaccccaagaaggaatagacagcagcgccccggaactattaaacacgggtctgcactggacgtgctgctgagtatgggtttcccccgggccagagcccagaaagccctagcttcaacagggggacgcagtgtgcaagccgcatgtgattggctgttctcacacgttggagatcctttcctcgatgacccactgccaagggagtatgtcctgtacctcaggccaactggacctctcgctcagaagcttagcgatttttggcaacagagcaaacaaatctgcgggaagaataaagctcacaacatatttccccatattacactgtgccaattttttatgtgtgaagacagcaaggtggacgctctaggggaagctctgcagacgaccgtcagtcgctggaaatgcaagtttagtgccccgcttcccctggaactttatacctcttcaaactttatcgggttgttcgtcaaggaggattccgcggaagttttgaagaaatttgccgctgacttcgccgcagaagccgccagcaagaccgaagtccacgtagaacctcataagaagcagttgcacgttactttagcatatcattttcaagcctcacatctgcctactcttgaaaaactcgcgcaaaatattgacgtcaaactcgggtgtgactgggtggcaacaatcttttctagagatataaggttcgctaaccatgaaacactgcaggtaatctacccatacacgccacagaatgatgacgagcttgaactggtgcctggcgatttcatttttatgagtcccatggagcaaacaagcacaagtgaaggctggatttatggcacttctttgacgaccgggtgtagtggcctcctgccagagaattatataaccaaagcagacgagtgctccacctggatattccacgggtcttacagtatactcaatacctcgtcttcaaattcactgacattcggcgatggagtattggaacgtcgaccttacgaggaccagggccttggggaaaccacgcccctgacaatcatatgtcagcctatgcagccactcagggtcaatagtcagcccggcccccaaaagcgttgcctctttgtgtgtcggcatggagaaaggatggacgttgtttttgggaaatactggctcagccagtgtttcgatgcaaaaggacgttacatccgcacaaatctaaatatgccgcattctctaccacagcggagcggagggtttagagactacgaaaaagatgcccctatcactgtctttgggtgcatgcaggctagactggtgggtgaagctttgctggaatcaaataccatcatagaccatgtgtattgctccccatcactccgttgcgtgcagacagcgcataacattttgaagggccttcagcaggagaatcatctcaagatacgcgtggagcccggcctgttcgagtggacgaaatgggtcgccggctccactctacccgcctggattcccccaagcgaattggccgccgccaacctgagtgtggatacgacttacagaccgcacatacctatctcgaagttggtggtcagcgaatcctatgatacatatatttcccgttcatttcaggtcaccaaggaaataatctcagaatgtaaaagcaaagggaacaatattctgatcgtagcccatgcttcttcactggaggcctgcacttgccagctgcagggcctctcgcctcaaaattccaaagactttgtccagatggtgcgaaagattccctatctgggcttctgttcttgcgaagagttgggggaaactggcatatggcaattgacggaccctcctatactaccactcacacacggcccaacaggaggatttaattggcgcgagaccctgctgcaggagtag

SEQ ID NO: 210465 - DNA, 1509 bp, synthetic construct
  misc_feature 1..1509: note = Description of Artificial Sequence: Synthetic coding sequence
  source 1..1509: mol_type = other DNA
atggccagcaagaagctgggcgccgacttccacggcaccttcagctacctcgacgatgtccccttcaagaccggagacaaattcaagaccccagccaaggtcggcctgcccataggattcagtctccccgattgcttgcaggtggtccgcgaggtgcagtatgatttttctcttgaaaaaaagactattgaatgggcagaggaaattaaaaaaattgaggaagccgaaagggaggctgagtgtaaaatcgcagaagccgaagccaaagtaaactcgaagtccggccctgaaggagatagcaaaatgagcttttctaagacccacagcaccgccacaatgccacccccgattaaccctatcctagcctcactccagcataatagtattcttacacccactcgagtttccagcagcgccaccaagcaaaaggtactaagccccccccacataaaagctgactttaatttggcagactttgaatgtgaggaggaccctttcgataaccttgagctgaagactattgatgaaaaggaggagttacgtaatatcttagtcggaaccacaggacctatcatggcccagctcctggacaacaacttgcctcggggaggctccggatccgtcctccaagatgaggaagtcctggccagccttgaaagggccacactggatttcaagcccctgcacaagcccaacggttttatcacactgccccaactcggcaattgcgagaaaatgtctctctcctctaaggtgtccctcccacccatcccggcggtgtctaatatcaaatccctgtccttcccaaagttggatagcgacgacagcaaccagaaaactgccaaactggccagtacattccattcaacaagctgtctgagaaacggcactttccagaatagtctaaaacccagcacccagagttcagccagcgagctaaatgggcaccacacgttgggactgagcgccctgaatcttgactccggaacggagatgccagcgctcacatcttcgcagatgccttccctctctgttctcagcgtttgcactgaggagtcctcccctccaaataccggccccacagtcacacccccaaactttagtgtttctcaagttcccaacatgccgagctgcccacaggcctattctgagctccaaatgctgagcccgtccgagcggcaatgtgtggagacagtggttaatatgggctattcctatgaatgcgtcctgcgtgctatgaaaaaaaaaggagaaaacatcgaacagatattagattatttatttgcgcatggccagctgtgcgaaaaaggttttgacccactgttagtggaggaggcactggagatgcatcagtgttcagaggagaaaatgatggagttcttgcagctgatgagcaaatttaaagagatgggtttcgaattaaaagacattaaggaagtgttgctgcttcataataatgaccaagacaacgcgcttgaggatcttatggcccgcgccggagcatcttag

SEQ ID NO: 210466 - DNA, 1509 bp, synthetic construct
  misc_feature 1..1509: note = Description of Artificial Sequence: Synthetic coding sequence
  source 1..1509: mol_type = other DNA
atggccagcaagaagctgggcgccgacttccacggcaccttcagctacctcgacgatgtcccgtttaaaactggcgataagtttaaaacgcctgcgaaggtgggcttgcctatcggtttttctcttcctgattgtttgcaggtggtcagagaggtgcagtacgacttctcgctggagaaaaaaacgattgaatgggccgaggagatcaagaaaatcgaggaggcggagagggaagccgaatgcaagattgccgaagctgaggctaaagtgaacagcaaatcaggtcccgaaggggactcgaagatgagtttcagtaaaacccatagtacggcaacaatgcccccccccataaatccgatcttagccagtctgcagcacaactcaatcctgacaccaacgagagtgagttcctccgccactaaacagaaggtgctgagccctccacacattaaggcagacttcaacctagcagatttcgagtgtgaagaggacccgtttgataatttggagctgaagacaatcgatgaaaaggaggaacttaggaacatcctcgttggaactaccggtccaattatggcgcaattactggacaacaacctcccaagaggggggagcggaagtgttctgcaagatgaagaggtgttagcatcactcgagagagccaccctggactttaagcctctgcataaacctaatgggtttataaccctgccacaactaggaaattgcgagaaaatgtccctgagctccaaggtctcgctgcctcccatacccgctgtgtccaacatcaagtccttgtccttcccgaagctggattctgatgactccaaccagaagacagctaaactggcctccacctttcacagcacaagctgcttgaggaacggcaccttccagaactcactgaagccctctacccaatcctcagcttccgagctgaacggtcatcacacactggggcttagcgccctcaatctcgatagcggcaccgagatgcctgccctgaccagcagccagatgccgtcactatcagtacttagtgtctgcaccgaagagagtagtcctcctaacacagggccaacggtaacacccccgaatttctcagtaagccaagtacctaatatgcccagctgtccgcaggcatatagcgaactccagatgttgtccccgtcggaaaggcagtgcgtggagaccgtcgtgaacatgggatacagctacgagtgtgtattacgagccatgaaaaagaaaggcgaaaacattgaacaaattttggattacctatttgcacacgggcagctctgcgagaagggattcgacccattattagtcgaagaggctctggaaatgcaccagtgcagcgaggagaagatgatggaatttttgcagctcatgtcaaaattcaaggaaatgggcttcgaactcaaagatattaaagaagtcctcctgttgcacaataatgaccaagacaatgccttggaggaccttatggctcgagctggagcctcgtag

SEQ ID NO: 210467 - DNA, 1326 bp, synthetic construct
  misc_feature 1..1326: note = Description of Artificial Sequence: Synthetic coding sequence
  source 1..1326: mol_type = other DNA
atggccagcaagaagctgggcgccgacttccacggcaccttcagctacctagacgacgtgccatttaagaccggagacaaatttaaaacaccagccaaggtgggcttgcctattggcttttctctgcccgactgtctgcaggtggtacgggaagtacagtacgatttttccctcgaaaagaaaactattgaatgggcagaggagattaaaaagattgaggaagcagagcgcgaggccgagtgcaaaatcgctgaagccgaagccaaggtcaactcgaagtccggacccgagggcgattcaaagatgagcttcagcaaaacacattctaccgccaccatgccaccacctatcaatcccattcttgcctcactccagcacaattcaatactgactccaaccagagtaagcagttcagccactaagcaaaaggtcctgagcccgccccatatcaaggcagattttaacctcgccgattttgaatgtgaggaggatccatttgataatctggagttgaagactattgatgagaaggaagaactccggaacattctcgtcggcaccacgggcccaatcatggctcagctgctggacaacaaccttcctcgcggcggcagcgggagtgtactgcaggatgaggaagtgctagcttccttagagagagccactctcgacttcaagccgttgcataaacccaacggcttcatcaccctccctcagctaggtaactgtgaaaagatgtcattgtcaagcaaggttagcctgccaccaatcccagccgtttccaatattaaaagcttgtccttccccaagttagactcagacgacagcaatcaaaagactgccaagctggcgagtacattccactccactagttgcctccgcaacggcacgtttcagaatagtctcaagccatcaacccagagctcggcttccgagctcaacggtcaccatactcttgggctctctgcccttaatctcgattcagggaccgagatgcctgcgctaaccagctcacagatgccaagcttgagcgtgctgtccgtatgcactgaggaaagttcccccccaaatacggggcctactatactggactatctatttgcacacggccaactgtgtgagaagggctttgacccccttctcgttgaagaggccctcgaaatgcaccagtgtagtgaggaaaagatgatggagtttctgcagctgatgtcaaagttcaaggaaatggggtttgagctgaaagatatcaaggaggtcctgctgctccataataatgaccaggacaatgctttggaagatcttatggcaagagccggagcttcctag

SEQ ID NO: 210468 - DNA, 1509 bp, synthetic construct
  misc_feature 1..1509: note = Description of Artificial Sequence: Synthetic coding sequence
  source 1..1509: mol_type = other DNA
atggccagcaagaagctgggcgccgacttccacggcaccttcagctacctggacgatgtacccttcaaaactggagataagttcaagaccccagccaaggtgggccttcctatcggattcagcctcccggactgcctgcaggtggtgagggaagttcaatacgatttctccctggagaaaaagaccatcgaatgggccgaggaaatcaagaagattgaggaagcggagcgcgaggctgagtgtaagattgccgaagcggaagcgaaggtgaatagcaaaagtggtcctgagggtgacagcaaaatgagtttcagcaaaacacactctacggccacaatgccgccccctatcaatccgattttagcttcgctgcagcataactcaatcctaactccaacacgtgtgtcttcgtccgcaaccaagcaaaaggttttatcacctcctcatattaaagcggactttaatctcgctgatttcgagtgcgaggaagacccttttgataacttggaactgaagaccatcgatgagaaggaagagctcagaaacattctagtaggaacaactggacctattatggctcaacttttggacaacaatctgccaaggggtgggtctggttcagtgctgcaggatgaagaagtacttgcaagtctcgaacgcgccacacttgattttaagccactgcacaaacccaatggattcatcaccctgccccagttagggaactgcgagaaaatgtctttaagctccaaggtctcgttacccccaatcccagctgtgtcgaacatcaagtccttatcctttccgaaactcgactcagacgacagtaaccagaagactgcaaagttagcatccacttttcattccacctcctgtctccgcaatggaacctttcaaaactctcttaagccctctacgcaaagctccgccagtgagctcaatggccaccacactctgggcttatcggctttgaacctggattctggaacggagatgcctgcactaacgtcaagccagatgccaagcttgagtgtgctttctgtgtgcactgaagagagctccccacctaacacggggccgacagtgacaccgcccaatttcagcgtcagccaggtccccaacatgccttcctgtccgcaggcttactccgagttacagatgctgagccctagcgagcgtcagtgcgtggagaccgtggtaaatatgggatatagttacgaatgcgtacttcgggccatgaagaagaaaggcgagaacatcgagcagatcttggattacctgtttgctcatggccagttgtgtgagaaaggattcgaccccctgcttgtagaggaagctctggagatgcatcagtgtagtgaagaaaagatgatggagttcctgcagctgatgtcaaagtttaaggaaatggggtttgaattgaaagatattaaagaagtgctgttgctacataacaacgaccaggataatgcactcgaagatctaatggctagagccggggcctcttag

SEQ ID NO: 210469 - DNA, 1509 bp, synthetic construct
  misc_feature 1..1509: note = Description of Artificial Sequence: Synthetic coding sequence
  source 1..1509: mol_type = other DNA
atggccagcaagaagctgggcgccgacttccacggcaccttcagctacctcgacgacgtgcctttcaagaccggggacaaatttaagactccggccaaagttgggctccccattggattttctttgcctgactgcttgcaggtagtgcgtgaagtccagtatgattttagtctggagaaaaaaactatcgagtgggccgaagagattaagaagattgaggaagcagaacgcgaggcggagtgtaagattgctgaggctgaggccaaagtcaactctaagtccggcccggaaggggatagtaagatgagcttctctaagacacacagcacagctactatgcctcctcctattaatccaatcctcgcatcactgcagcataactctattcttactcctaccagagtcagctccagcgccactaagcagaaggtcctgtctccacctcacatcaaagcggatttcaacctcgctgacttcgagtgtgaggaggatcctttcgataatctggaacttaagactattgatgagaaggaggaactgagaaacatactggtggggacaaccggcccaatcatggcgcaactgctcgataataatctgcctaggggcggctccgggtctgtgcttcaagatgaagaagtcctggcctctctcgagcgggctaccctagatttcaagccactccataaacccaatgggtttattacacttcctcagctcggtaactgcgagaaaatgtcgctgtccagtaaggtgagccttcctcctattcctgcagtctcaaacattaaaagcctgtcatttcctaaactcgattccgacgatagcaatcagaagaccgctaaactcgctagcacttttcactctacaagttgccttcgtaacggtacgttccagaactccctcaagccctcgacacagtcctccgcttccgagttgaacgggcaccacacactcggccttagcgcactaaatctagactcaggcactgagatgcccgcgctgacgtcgtcccagatgcccagcctgtctgtgctctccgtttgcactgaagagtcatctccaccaaacactggacctaccgtaacacctcctaatttcagcgtgagccaagtgccaaatatgccatcctgccctcaggcctacagtgagctccagatgctgtcgcctagcgaacggcaatgtgttgagacagtcgtgaacatggggtattcctacgagtgcgttctgcgagcaatgaagaagaaaggagagaacatcgagcagattttggattacctgtttgctcacggacagctttgtgagaaaggattcgatccattgctcgtagaagaagctttggagatgcatcagtgtagcgaagaaaagatgatggagttcttgcaactgatgtccaaatttaaagagatgggctttgaactcaaggatattaaggaagttcttctgctgcataacaacgaccaggacaacgccctcgaggacctgatggctagagccggagcctcttag

SEQ ID NO: 210470 - DNA, 1617 bp, synthetic construct
  misc_feature 1..1617: note = Description of Artificial Sequence: Synthetic coding sequence
  source 1..1617: mol_type = other DNA
atgagcggcgccgtgcggggccggcggcgggaggtgggcctgcagcacggtggatgtggcactggtggaggttatggcgacggcctagccaggtccggccaaagttggcggtggtggcgatccctttccctgggcgcggtgggaagtagcgccggtaccgagcctggtaggccagctggagctagtaccttccgtctcctgaggcgcagacagcagaggcactcaggcagtaaatggttgttgcggtcctgggtccagatttttatgtatgattttagtctagagaaaaagactatcgagtgggcagaagaaattaaaaaaatcgaggaggccgagcgcgaggcggagtgcaagatcgcagaggcagaagctaaggtgaatagtaaaagcggccccgaaggcgattcaaagatgagtttcagcaaaacccactctaccgccaccatgcccccacccataaaccccatactcgcatcgctgcagcacaatagcatactcactcccacacgcgtgagcagctcagccacaaaacagaaagtcttgtcccccccccacataaaagcagatttcaatctcgccgattttgagtgtgaggaggatccttttgataacttggagttaaaaactattgacgagaaagaggagctgagaaacatcctagtggggaccaccggtccaatcatggcacaactactggacaataatctgccacgcggaggctccggcagcgtgctccaggatgaagaagtgttggccagcctggagagggccactctggattttaaaccgctgcataagccaaatggttttataacactcccgcagctcggtaactgcgagaaaatgtcgcttagctcgaaggtttccttgccccctataccggcggtgtcgaacattaaatcactctcattcccaaagctggattcagacgactcaaatcagaagacagcgaaactggcctctacatttcactctacttcttgccttagaaatggtacctttcaaaactcactcaaaccatccacccagtcaagcgccagtgagctcaatggtcatcatactttgggtctttcagcactcaatctggactctggcactgagatgcccgccttgacttcatctcagatgcctagcttaagtgtgctgtctgtgtgcaccgaggaaagttcacctcctaacacaggtcctacggtgacgcctccaaatttcagcgtgtctcaggtaccaaacatgccttcttgtccccaggcctactcagaattgcaaatgctttcaccgagtgagcgacaatgtgtggagacggtggtgaacatggggtactcctatgaatgcgtcctgagagctatgaaaaagaagggcgagaatatcgaacagatactggattacctcttcgcgcacggccaactgtgtgagaagggattcgacccgttgctcgtagaggaagctttggagatgcaccagtgcagcgaggagaagatgatggaattcttacaactcatgtcaaagtttaaggaaatgggtttcgagctgaaggacattaaggaggttctgctcttgcacaataacgatcaggacaatgcactagaggacctgatggctcgcgccggcgcgtcttag

SEQ ID NO: 210471 - DNA, 1701 bp, synthetic construct
  misc_feature 1..1701: note = Description of Artificial Sequence: Synthetic coding sequence
  source 1..1701: mol_type = other DNA
atgagcggcgccgtgcggggccggcggcgggaggtgggcctgcagcacggcggctgtggcactggcggagggtacggagatggactcgctagatccggacaaagttggcggtggtggaggtctctgtccctcggcgcagtaggatctagcgctggaactgaaccagggagaccagcaggtgccagcaccttccgtctgctgaggcggaggcagcagcgacacagcggcactttttcttacctcgatgatgtgccatttaagactggggacaagttcaaaaccccagcaaaggtcgggttacccatcggtttcagtctgcctgattgcttacaggtagtgagagaagtccaatacgatttttctctcgaaaagaaaacaattgaatgggccgaagagatcaaaaaaatcgaggaagctgaacgtgaagccgaatgtaagattgcagaggcagaggccaaagtgaattcaaaatctggccccgaaggagatagcaaaatgagtttttcgaagacacactccaccgccacgatgcccccacccataaatcccatcctcgcatctcttcagcacaacagcattctgaccccaacgagggtgtctagctcggccaccaaacagaaggtgcttagccccccccacattaaggccgatttcaacctggctgattttgagtgtgaggaggaccctttcgataacttggaactgaaaaccattgatgaaaaggaagaattgaggaatatcctcgttgggactaccgggccaattatggcacagctcctggataacaacctccctagggggggatcaggttccgtgctgcaggacgaggaggttctcgcaagcttggaacgggccactctagactttaagcctctccacaagcccaacgggttcatcactttacctcagttaggcaactgtgaaaagatgagtctttcctccaaagtgagcttgccccccatcccagccgtgagcaatatcaagagtctgagcttcccaaagctcgattccgacgatagcaatcagaagaccgccaaacttgcttctacattccattcaacctcctgcctgcgaaatggcacattccagaatagtctgaaaccctcaacgcagagctctgcctcggagttaaatggccaccatacattgggactcagcgccctgaacttagacagtggtaccgaaatgcccgctctgacaagctcccaaatgccaagcctatccgtattaagcgtgtgtaccgaagaaagctcgccaccaaatactgggccaacagtcaccccccctaattttagcgtttctcaggtcccaaatatgccttcatgcccacaggcctacagtgagttgcaaatgttgagtccgtcagagcgccaatgtgtggagactgttgtgaacatgggctattcatacgaatgcgttttgcgggccatgaagaagaagggcgaaaacatagaacagatccttgactatcttttcgcacatgggcaactatgcgagaagggttttgaccccctgctcgttgaagaagcgttggagatgcaccagtgttcagaagaaaaaatgatggagtttctccagctcatgtccaaatttaaggagatgggcttcgaactaaaggatatcaaggaggtcctgttacttcataataacgatcaggataacgctttggaagacctgatggcccgtgctggggctagttag

SEQ ID NO: 210472 - DNA, 690 bp, synthetic construct
  misc_feature 1..690: note = Description of Artificial Sequence: Synthetic coding sequence
  source 1..690: mol_type = other DNA
atgcagatcttcgtgaagaccctgaccggcaagaccatcaccctggaggtagaaccatcggatacgattgaaaacgtaaaggcaaagattcaggacaaagaagggattcctcctgatcagcaacgcctgatatttgcgggcaagcagctcgaggatggccggactctcagcgactacaacatccagaaggagagcactctgcacctcgtgttaaggctcagagggggaatgcagattttcgtgaaaactttaactggcaaaactatcaccctggaggtggaaccttcagatacaattgaaaacgtgaaagcaaaaatccaggacaaggagggcatacctcccgaccagcagcgacttatttttgcgggcaaacagctcgaggacggcagaactctgagtgattacaatattcaaaaggagtctacccttcacctggtcttgaggctacgagggggaatgcagatctttgtgaagaccctgactgggaagacaatcacactggaggttgagccttccgacaccattgaaaatgtgaaagcaaaaatccaagacaaggagggaattccccctgatcagcagaggctgatttttgccggcaaacaactcgaggatgggaggacactcagcgattacaatattcagaaggagagtactctccatctagtgcttcgactccggggtggatgctag

SEQ ID NO: 210473 - DNA, 690 bp, synthetic construct
  misc_feature 1..690: note = Description of Artificial Sequence: Synthetic coding sequence
  source 1..690: mol_type = other DNA
atgcagatcttcgtgaagaccctgaccggcaagaccatcaccctggaggtagaaccatccgatacaatcgaaaacgtgaaggctaaaatacaagataaggaggggattcctccagaccagcagagattaatcttcgccggcaagcagctggaagacggacgcactctgagtgattataatattcaaaaagagagtaccctgcacctcgtcctgagactgaggggaggaatgcagatcttcgtaaaaaccctgacaggcaagacgattacacttgaggtagaaccttcagacaccattgaaaacgtcaaagccaaaattcaggataaagagggcattcccccagaccagcaaaggctgatctttgctgggaaacagctagaagacggccgaactctttcagactataatatccagaaagagagcaccttacacctcgtactccggctaaggggtggtatgcagatctttgtgaaaaccctgacggggaagacaatcactctggaggtggaacctagcgacaccatcgagaacgttaaggcgaagatacaggacaaagagggaatcccacctgatcagcagcgcctgatctttgccggtaaacagttggaagatggccgtaccctgtccgattacaacattcagaaagaatctacacttcatttggtgctgcgtctccgaggaggatgttag

SEQ ID NO: 210474 - DNA, 690 bp, synthetic construct
  misc_feature 1..690: note = Description of Artificial Sequence: Synthetic coding sequence
  source 1..690: mol_type = other DNA
atgcagatcttcgtgaagaccctgaccggcaagaccatcaccctggaggtggaaccctccgatactatcgaaaacgtaaaagcaaagatccaagacaaggaggggatcccgcccgaccagcagcggttaatctttgcaggcaagcagctggaggatggtcgaactctttccgactataacattcaaaaggaatcaaccctgcatcttgtcctaagattgagaggcggcatgcagatcttcgtgaagacccttaccggcaagaccattaccttggaggttgagccctctgacacgatagagaacgtaaaggcaaagattcaggacaaggagggcattcctccagaccaacaacggctgatcttcgcaggcaaacagctggaagatggcagaacattgagcgactacaacatccagaaggagtctacgttacacctggtgctacgattgaggggcggaatgcagatctttgttaagacattgactggcaagactattacccttgaggtcgagcctagtgatacaatcgagaacgtcaaggccaaaatccaggataaggaaggaatcccgcccgaccaacagaggctcattttcgcaggcaagcagcttgaagatggccgtactttgtccgactataacattcagaaagagtccaccctccatctcgtgttacggttgcgggggggttgttag

SEQ ID NO: 210475 - DNA, 462 bp, synthetic construct
  misc_feature 1..462: note = Description of Artificial Sequence: Synthetic coding sequence
  source 1..462: mol_type = other DNA
atgcagatcttcgtgaagaccctgaccggcaagaccatcaccctggaagtcgaaccatctgacacgattgagaacgtgaaagccaagattcaggacaaggagggtattcccccggatcagcagagattgatatttgcaggaaagcagctggaagacgggaggacactgagcgactacaacattcagaaggagagtacgctgcacctcgtcctacgccttcggggtggcatgcagatatttgtgaagactttgaccggaaagactattactctggaagtggaacccagtgacaccatcgagaatgtaaaagcaaaaattcaagataaagaaggaatcccccccgaccagcagcggcttatcttcgccggcaagcagttggaggatggccgcactcttagcgattataatatccagaaggagtccacactgcacctggtgcttaggctacgagggggctgctag

SEQ ID NO: 210476 - DNA, 2058 bp, synthetic construct
  misc_feature 1..2058: note = Description of Artificial Sequence: Synthetic coding sequence
  source 1..2058: mol_type = other DNA
atgcagatcttcgtgaagaccctgaccggcaagaccatcaccctggaggtcgaacctagcgacactatcgagaatgtcaaggcaaaaatacaggataaggagggcataccacccgatcagcagagacttatattcgcgggaaagcagttagaagatgggagaacactgagcgactacaatatccagaaagagtctacgcttcatctggtgttgagattgcgtggtggcatgcagatcttcgtgaagaccttgaccgggaaaacgatcacgttagaagtggaaccctctgataccattgagaacgtgaaggcgaaaatccaagacaaggaaggtattccccccgatcagcaaagactgatttttgcgggaaagcagctggaagacggcaggacactgtccgactacaatatccaaaaagaatcaactctgcacctggtgctacgattaagggggggcatgcagattttcgttaagacattaactggcaaaacaattactttggaagtggaaccttccgacaccatcgaaaacgtgaaggctaagatccaggataaggaggggatcccttcggaccaacagcgactgatcttcgcaggcaagcagctagaagatggcagaactctgtcagactataatatccagaaagagagtacattgcatttggtactccgcctgagaggcggcatgcaaattttcgtcaaaaccctgacagggaagaccattactttggaggtggagcccagcgatactattgaaaatgtgaaggccaagatccaggacaaagagggtataccgcccgaccagcagagactgatcttcgcagggaagcaactcgaggatggacgtactctgtctgattataatatacagaaggaatcaacgctgcacctggttctgagattacggggaggaatgcagatctttgtgaagaccctcaccggtaagactatcactttggaggtggagcccagcgataccatagagaacgtcaaagctaaaatccaggacaaggaaggaatacctcccgaccaacagcgcctcatatttgcaggaaaacagctggaagatgggagaacactgagcgactacaacattcagaaggagtctactctccatctggtgcttcgcttaaggggagggatgcaaatcttcgtgaagactctgacagggaagactatcacattagaagttgagcctagcgacacaatagagaatgtaaaagccaagatccaggacaaggaggggatccctcccgatcagcagcggcttatatttgcaggaaaacagcttgaggacgggcgtactctctcagactacaacattcagaaggaatctacattgcaccttgtgctacgccttcgcggagggatgcagatcttcgtcaagactctgacgggtaaaacaattacactggaagtcgaaccttctgacactattgaaaacgttaaggccaagatccaagacaaggagggtatccctccagatcagcagaggctgattttcgcaggaaagcagctggaggatggaagaactctgtcggactataatatccaaaaggaatcaacactccatcttgtgctacgcctgcgaggcggcatgcagatttttgtgaagacactgacaggtaagacgatcaccctcgaggttgagccctcagacactatcgagaatgtgaaagccaaaattcaggacaaggaaggcatcccacccgaccagcagcgtcttatcttcgcaggcaagcagctcgaggatgggagaactctctctgattataacatccagaaggagtccaccctgcaccttgtgttgcgcctgaggggggggatgcaaatattcgtaaagacattgaccggcaagaccattaccctggaagtggagccctcagacactatcgagaacgtcaaagccaaaatccaggataaggagggaattcctcctgaccagcaaagactgatcttcgcaggtaagcagctggaggatgggcgcacactctctgactataatattcagaaggaatctacccttcacttagtactgagacttcgcgggggggtctag

SEQ ID NO: 210477 - DNA, 450 bp, synthetic construct
  misc_feature 1..450: note = Description of Artificial Sequence: Synthetic coding sequence
  source 1..450: mol_type = other DNA
atgcagatcttcgtgaagaccctgaccggcaagaccatcaccctggaggtggagcccagtgacacaattgagaacgttaaggcgaagatccaagataaggaaggcatcccaccagatcaacagagattgatatttgccggtaagcagctcgaagacgggcgcaccctgtctgactataatatccaaaaggaaagcaccttacacctggtgttaagactccgtggcggcatgcagatttttgtgaagacgttgaccggcaaaacaataactctagaggtggagccatccgatactatagaaaacgttaaggcgaagatccaagacaaagaaggcattcccccggaccaacagcgcctcatttttgccgggaagcagctggaggatgggagaacattgagtgactataacatacagaaggaatctaccctccacctggtgctgagattatag

SEQ ID NO: 210478 - DNA, 372 bp, synthetic construct
  misc_feature 1..372: note = Description of Artificial Sequence: Synthetic coding sequence
  source 1..372: mol_type = other DNA
atgcagatcttcgtgaagaccctgaccggcaagaccatcaccctggaagtagagccttccgacactattgaaaatgtgaaggcaaaaattcaggacaaagaggggatcccgcccgatcagcagaggctgatttttgctggcaaacagctggaggatgggagaaccctatccgattataacatacagaaggaatcaaccctgcatttggtgctcagattgaggggtggaatgcagatctttgtgaagactttaaccggcaaaactattacactggaggtggagcccagcgacaccattgagaacgtcaaggcgaaaatccaggacaaggaaggcataccacccgatcaacagcgattgatatttgccggctag

SEQ ID NO: 210479 - DNA, 2058 bp, synthetic construct
  misc_feature 1..2058: note = Description of Artificial Sequence: Synthetic coding sequence
  source 1..2058: mol_type = other DNA
atgcagatcttcgtgaagaccctgaccggcaagaccatcaccctggaagtggagcccagcgacacaatcgaaaatgtgaaagcgaaaatccaggacaaagaaggaatcccccccgatcagcaaaggcttatattcgcaggtaagcagctcgaggacggacggaccctgtcggattacaacattcaaaaggagagcaccctgcatctcgtgctacgcctcagaggcggcatgcagatctttgtcaagactcttacaggcaagacaatcaccttggaagtcgagccctccgacaccattgaaaacgttaaggccaagattcaggacaaggagggaattccgcccgatcagcagcgcttaatctttgccgggaaacaactggaggatgggcgtacactgagcgactacaacatccagaaggagagcacattgcatctcgtcctgcggcttaggggcggcatgcagattttcgtcaagacgctgacaggcaaaacaataacactggaggttgaacccagtgacacgatagagaatgttaaggcaaaaattcaggacaaagagggaattccttctgatcagcagcggttgatcttcgcgggcaaacagctcgaggatggcaggacactttctgactacaatatacagaaagagagcactctgcatctggtgttacgtcttcggggcggtatgcagatcttcgtgaaaacgctcaccggaaagacaatcacgctggaggtggaaccgtcagacaccattgaaaacgtcaaggcaaagatacaggataaagaaggcatcccaccagaccagcaacgcttaatcttcgccggcaagcagctggaggacgggagaacactgagtgactacaacattcagaaggagagtaccctgcatctggttctccggttgcgcggtggtatgcagattttcgtgaagacactgactgggaagacaattaccctggaagtggagccctctgatacgattgaaaacgtaaaagccaagatacaagacaaagaggggatccctcctgatcagcaacgcctcatctttgccgggaaacaactggaagatgggcgcaccctttctgattataatattcagaaggagagcaccctgcacctcgtgctgaggcttcgtgggggcatgcaaatattcgtgaaaacactgacgggcaaaactatcactttggaagtagagccttccgacactattgaaaatgtgaaagcaaagatacaggacaaagaaggtatccctccggatcagcagcgcctgatttttgccggcaagcagctagaagatggacggacgctaagcgattacaacattcagaaagaaagtacacttcatttagtgctgaggctcagggggggcatgcagatattcgttaagactctcaccggcaaaactatcaccttggaagtggagccatccgatactatagagaacgtgaaagccaaaatccaggacaaagaggggattcctcctgaccagcaaagacttatttttgctggaaaacagctggaggacggccgaaccctgagtgactataacatccagaaagaaagcactctgcatctcgtgctaaggttacgaggcggcatgcagatctttgtaaagaccctgacaggaaagactatcaccctcgaagttgagcccagcgatacgatcgaaaatgtgaaagccaagatacaggataaagaaggaatccctcctgatcagcagcggttgatatttgctgggaagcagttagaggatggaagaaccctgtcagattacaacattcagaaggagtccactttacatttggtcctgagactgagaggcggcatgcagatcttcgtgaagactctgactggcaagacaattacgctggaagtggaacccagcgataccatcgagaatgtgaaagccaaaatccaggacaaggaggggatcccaccggaccagcagcggttaatcttcgctggaaagcagcttgaagacggccgtactctgtccgattacaatatccaaaaagagagcaccttgcacttggtcctgcgccttcgcggtggagtctag

SEQ ID NO: 210480 - DNA, 486 bp, synthetic construct
  misc_feature 1..486: note = Description of Artificial Sequence: Synthetic coding sequence
  source 1..486: mol_type = other DNA
atgcagatcttcgtgaagaccctgaccggcaagaccatcaccctggaagtggaaccgtccgacaccattgaaaacgtgaaggccaaaatccaagacaaggaagggattccccccgatcagcagaggctcattttcgccggtaagcagctggaagatgggcggacattgtccgattacaacattcaaaaggaatccactctacaccttgtcctccgcctgcgaggcgggatgcaaatcttcgtgaagacgttaaccggaaagacaatcactcttgaggtggagccttcggacacaattgagaatgtgaaagctaaaatccaggacaaggaaggcatcccccctgaccaacaaagactgatatttgctggaaaacaattggaagatgggcggactctgtcagattataatattcagaaggaatcaacactacatcttgtcctccggctgcgcggaggtatgcagattttcgttaagaccctgacctag

SEQ ID NO: 210481 - DNA, 405 bp, synthetic construct
  misc_feature 1..405: note = Description of Artificial Sequence: Synthetic coding sequence
  source 1..405: mol_type = other DNA
atgcagatcttcgtgaagaccctgaccggcaagaccatcaccctggaggtggagccgtcagatactatcgagaatgtgaaggcaaagattcaggataaggagggaatccctcccgaccagcaaagactaattttcgccggcaagcagctggaggacgggagaaccttaagcgattacaatatccaaaaggagtccacactgcacctcgtgcttcggctgcgtgggggtatgcagattttcgtcaagacactcactggcaaaaccatcactctggaggtggaaccatctgataccattgaaaatgtgaaggctaaaatacaagataaagaagggatcccgccagatcagcaacgcttgatttttgccggaaagcaacttgaggatggccggacgctgtcagactag

SEQ ID NO: 210482 - DNA, 510 bp, synthetic construct
  misc_feature 1..510: note = Description of Artificial Sequence: Synthetic coding sequence
  source 1..510: mol_type = other DNA
atgcagatcttcgtgaagaccctgaccggcaagaccatcaccctggaagtcgaaccaagcgacaccattgaaaatgtgaaggctaaaattcaggacaaggagggtatcccacccgatcagcaacggttgatatttgcagggaaacagctcgaagacggacgaactctgagtgactacaacattcagaaagagagtactctgcatctagtgcttaggttgcgcggtggcatgcagattttcgttaagactctcaccggaaaaacaataactctcgaggtggagcctagcgataccattgagaatgtcaaagcaaaaattcaggacaaagagggcattccctccgaccaacagagactgatttttgcgggaaagcagctcgaagatggacgaacactgtctgactacaatatccagaaggaatctacactacatctggtcctaaggctccggggggggatgcagattttcgttaaaactttgaccggaaaaacaatcaccctggaagtctag

SEQ ID NO: 210483 - DNA, 468 bp, synthetic construct
  misc_feature 1..468: note = Description of Artificial Sequence: Synthetic coding sequence
  source 1..468: mol_type = other DNA
atgcagatcttcgtgaagaccctgaccggcaagaccatcaccctggaagtggagccttctgatacaatcgagaacgtgaaagctaaaatacaggacaaggagggtatcccacctgatcagcagcggctgattttcgctggaaagcagcttgaggacggccgaaccctgtcagactacaacattcagaaagagagcaccctacacctggtgcttcggttgcgtggggggatgcagatcttcgtgaaaaccctgactggcaagactatcaccctcgaagttgaaccctccgatactatcgagaatgtgaaagcaaagatccaggataaagaaggcattcctcccgaccagcaaagactgatatttgccgggaagcagctcgaagatggacgaacgctttccgattacaacatccaaaaggaatctaccttgcatttagttcttagactcagaggtggaatgcaaatatag

SEQ ID NO: 210484 - DNA, 186 bp, synthetic construct
  misc_feature 1..186: note = Description of Artificial Sequence: Synthetic coding sequence
  source 1..186: mol_type = other DNA
atgcagatcttcgtgaagaccctgaccggcaagaccatcaccctggaggtggagccctcagatacgatcgagaatgtcaaggcaaagatccaagataaagagggcattccacccgaccagcaacgccttatatttgccggcaagcagctcgaggacgggaggactctctccgactataatatctag

SEQ ID NO: 210485 - DNA, 1830 bp, synthetic construct
  misc_feature 1..1830: note = Description of Artificial Sequence: Synthetic coding sequence
  source 1..1830: mol_type = other DNA
atgcagatcttcgtgaagaccctgaccggcaagaccatcaccctggaggtggagccatcagataccattgaaaatgttaaggccaagatccaggataaggaaggcataccccctgaccagcagcggttaatattcgccggaaagcagcttgaggacggacggactcttagtgactacaatattcagaaagagagcaccttgcaccttgtcctcaggctgcggggcggcatgcagatattcgtaaaaactttgaccgggaagacaattactctggaagttgaaccaagcgataccattgaaaacgtaaaggccaagatccaggacaaggaaggaataccaagcgatcagcagcgcctgatctttgcgggcaagcagctggaggacgggcgaacactctcagactataatattcagaaagaatctaccctccacctggtgcttagacttcgggggggaatgcagatcttcgtgaaaactttgacgggcaaaaccatcacgctggaggtggagccatctgacacaattgaaaatgtgaaggcaaagatccaggacaaagaaggaataccacctgatcaacagcggctcatcttcgcaggaaagcagctggaagatggtcggactctctcagactacaatatccagaaggagtctacgctccacttagtgctgaggctaaggggtggtatgcagattttcgtaaaaactctgacgggcaagacaattacactggaagttgagccaagcgacaccattgagaacgtgaaggcaaaaattcaggataaagaagggataccccccgaccagcagagacttatttttgcgggtaagcagcttgaggatggccgcaccctgagcgactacaatatccagaaagagtctaccctgcacttggtcctgagactgcgcggcggtatgcagattttcgtgaagacactgaccggcaagaccattaccctggaggttgaaccatccgatacaattgagaatgtcaaagcgaagattcaggacaaggaaggtatacctcctgatcaacaaaggttgatcttcgctggaaaacagttagaagacgggcgtacccttagtgattacaatatccagaaggagagtactctccacctggtactgaggctgagaggtgggatgcagatattcgtgaaaacactaacagggaagaccattactctagaagttgagccatccgatactatcgagaatgttaaggccaaaattcaagacaaagaaggcattccgcctgaccagcagcgactcatttttgcaggcaagcagctcgaggatgggcggaccctgagcgattataatatccagaaagagtctaccttacatctcgtccttcggctaaggggaggcatgcagatctttgtcaagacccttaccgggaagacaataaccttggaggtggaacccagtgacacgatcgagaatgtaaaagcaaaaatccaggataaggagggcatcccacccgaccagcaacggctcattttcgcagggaaacagctggaagacggtcggacactgtccgattataatatacagaaggagtcaaccctgcacctagtgctgcggctgcggggcgggatgcagatctttgtcaagacactgactggcaaaaccatcacgctggaagttgagcccagtgacacaattgaaaacgtcaaggcgaagatccaagataaagaaggtatcccccctgatcagcagcgcctaattttcgccgggaagcaacttgaagacggaagaactctcagtgattataacatacagaaagaatctactttgcacctggtgctccgcttgaggggcggcgtgtag

SEQ ID NO: 210486 - DNA, 411 bp, synthetic construct
  misc_feature 1..411: note = Description of Artificial Sequence: Synthetic coding sequence
  source 1..411: mol_type = other DNA
atgcagatcttcgtgaagaccctgaccggcaagaccatcaccctggaagtggaaccctccgacaccatagaaaatgtgaaagccaagatccaagataaggaaggaattccgccggatcaacaacggctgattttcgccgggaaacagttagaggacggacgaaccttgagtgactacaacatccaaaaggaatccaccctgcatctcgttctgagactaaggggaggaatgcagatatttgtcaaaaccttaacaggtaagaccattacactggaggtggagccttcagataccatcgagaacgtcaaggccaaaatccaggataaggaaggtatcccaccagatcagcagcgtctgattttcgctgggaagcagctggaggacggccggacgctgagtgactacaattag

SEQ ID NO: 210487 - DNA, 672 bp, synthetic construct
  misc_feature 1..672: note = Description of Artificial Sequence: Synthetic coding sequence
  source 1..672: mol_type = other DNA
atgcagctgaagcccatggagatcaaccccgagatgctgaacaaggtgctctcccggttaggtgttgcaggccagtggcggttcgtggacgtgctcggcttggaagaagagtccctaggaagtgtccccgcccctgcttgcgcactgctcctgctgtttccactgaccgctcagcatgaaaatttccgtaagaagcaaatcgaggagctcaaggggcaggaagtaagcccgaaggtatacttcatgaagcagaccatcggaaattcctgtggcaccattggactcatccacgcagtagcaaataaccaggacaagctgggctttgaggatggctccgtgctcaaacagttcctgagtgagaccgagaagatgagtcccgaagacagagccaagtgtttcgagaagaatgaggccatccaggccgcacatgacgcagtagcacaggaaggccagtgtcgggtcgacgacaaagtgaattttcattttattctgtttaataatgtggatggacacctgtatgagctggatggtcgcatgccttttcccgtcaatcatggtgcctcctcggaggataccctgctgaaggacgccgcaaaggtgtgtagggagtttaccgagagagagcagggagaagtaagattctctgccgtggcactatgtaaagccgcatag

SEQ ID NO: 210488 - DNA, 642 bp, synthetic construct
  misc_feature 1..642: note = Description of Artificial Sequence: Synthetic coding sequence
  source 1..642: mol_type = other DNA
atgcagctgaagcccatggagatcaaccccgagatgctgaacaaggtgctgtcacggctgggcgtggcaggccaatggagattcgtcgacgtgttggggctggaagaagagtccctcggatctgtacctgcccctgcatgtgcactgctgttgttgtttccattaacagcccagcacgaaaactttaggaagaaacaaatagaggaactgaaaggccaggaagtgtcccccaaggtgtattttatgaagcagacaatcggcaacagctgcggtactattgggctcatccacgccgtggctaacaatcaagacaagctgggtttcgaggatggctccgtcctcaaacagttcctctccgagaccgagaagatgtctccagaggaccgggccaaatgctttgagaagaacgaggctatacaggccgcacacgacgctgtggcccaagaggggcagtgtcgcgtggatgataaggtgaattttcactttatactgttcaacaacgtggatggtcacctctatgagctcgacgggcggatgccgtttcctgtgaaccatggggcgagttcagaggacacgctgctcaaggacgcagcaaaggtgtgcagagagttcactgagagggagcaaggcgaagttcgctag

SEQ ID NO: 210489 - DNA, 177 bp, synthetic construct
  misc_feature 1..177: note = Description of Artificial Sequence: Synthetic coding sequence
  source 1..177: mol_type = other DNA
atgcagctgaagcccatggagatcaaccccgagatgctgaacaaggtgttatcccgccttggagtagccggtcagtggaggtttgtggacgtgctgggccttgaagaagagagcctgggatctgtgcccgctcctgcatgcgctcttttgctgctcttccctcttaccgcccagtag

SEQ ID NO: 210490 - DNA, 756 bp, synthetic construct
  misc_feature 1..756: note = Description of Artificial Sequence: Synthetic coding sequence
  source 1..756: mol_type = other DNA
atggtgccccggcccgtgtgcgccgtgctgctgctgttccccatcaccgaaaaatatgaggtgtttagaactgaagaagaggagaaaataaagtcacagggacaggatgttacatcctcagtatacttcatgaaacagacgatttcaaatgcttgcggaacgataggcctcatccacgcaattgccaataataaagacaaaatgcactttgaatccggctcgaccctgaagaagtttttggaagaatctgtgtccatgagccccgaggaaagagccagatatttggagaattacgatgctattcgtgtcacccatgagacatccgcgcatgaaggccagactgagtccagttcccctagctcttcccagccccactcatcccactgcagaacaaaagcgagttctctatgccaccacgcctccttgccgtgggtcaagcggaatcatgtcgggcccgctaaagcaacttcgccatctctcaggttgagacggtggcgacccttcctgcgcttaccaagcctaggcctgcacagtgtcgcacctagcatcgatgaaaaggtcgacctccatttcattgccctggtgcacgttgacggtcatctatacgaactcgacggacgaaagcccttccccattaaccacggtgagacttctgacgaaaccctgcttgaggacgctattgaggtgtgcaaaaaatttatggaaagagatccggatgaactgaggttcaacgctattgccctttcagccgcgtag

SEQ ID NO: 210491 - DNA, 693 bp, synthetic construct
  misc_feature 1..693: note = Description of Artificial Sequence: Synthetic coding sequence
  source 1..693: mol_type = other DNA
atggagggccagcggtggctgcccctggaggccaaccccgaggtgacgaatcaatttctgaagcagctcggactgcacccaaattggcaattcgtcgatgtgtatggcatggaccccgagcttctgtctatggtccctcgacctgtatgtgccgtccttcttctgtttccaatcacagagaagtatgaggtgttcaggaccgaggaagaagagaaaatcaagtcccagggccaggacgtaactagctccgtttatttcatgaaacagaccatttctaacgcatgcggtacaattggcctgatccatgcaattgcgaacaacaaagacaagatgcactttgagtccggtagtaccctcaagaaatttctggaagagtcagtgtcaatgagccctgaggaacgcgcgcgatatttggaaaactacgatgcaattcgagttacccatgagacatccgctcacgaaggccagactgaagctcctagtatcgacgaaaaagttgacctgcatttcattgcccttgtgcatgtagatggtcacctttacgagcttgacggacgcaaacccttccctataaaccacggggaaacatcagacgagaccctgctggaggacgcaatcgaggtgtgcaagaagttcatggagagggatcccgatgagctcagattcaatgctatcgcactgagtgctgcttag

SEQ ID NO: 210492 - DNA, 687 bp, synthetic construct
  misc_feature 1..687: note = Description of Artificial Sequence: Synthetic coding sequence
  source 1..687: mol_type = other DNA
accgaggaggaggagaagatcaagagccagggccaggacgtgaccagctctgtgtatttcatgaagcagacgatatcaaacgcgtgtgggaccatagggcttatccacgcgattgcgaataacaaagacaagatgcatttcgaatccgggtcaacactgaaaaagttcctcgaggaatcagtgtccatgagtcctgaggaacgcgctaggtatctcgaaaattatgatgccatccgcgtcactcatgagaccagcgcacacgagggacagaccgagtcctcatctccttctagtagccaacctcactctagtcactgtcgaacaaaagcttctagcctctgtcatcacgcctcactaccatgggtcaagcgcaaccacgtggggccggcgaaagctacaagtccctctcttagactgaggcgctggagaccattcctccggctccccagcctcggcctgcactcagttgctccttccatcgatgaaaaggtcgatctgcactttattgccttagtgcatgtggacggccatctctacgagttggacggcaggaaaccttttcccatcaatcacggcgagaccagcgatgaaaccctgctggaggatgcaatcgaggtttgcaaaaagttcatggagcgtgaccccgacgagctcagattcaacgccatcgccctaagcgctgcatag

SEQ ID NO: 210493 - DNA, 981 bp, synthetic construct
  misc_feature 1..981: note = Description of Artificial Sequence: Synthetic coding sequence
  source 1..981: mol_type = other DNA
atgaccggcaacgccggcgagtggtgcctgatggagagcgaccccggcgtgttcaccgaactgattaaaggttttggctgccggggggcgcaagtggaggagatctggagcctagagccagagaattttgaaaaactcaaacccgtacatgggttgatttttctctttaagtggcagcctggcgaggagcctgccggctccgtcgttcaggatagtcgccttgacacgatcttcttcgccaagcaggtaattaacaacgcctgtgctacccaggcaatcgtgagcgtcctgttgaattgtacccaccaggacgttcatttgggcgagacactctcagaatttaaggaattttcccagagttttgatgccgcgatgaaaggactggctctgtcaaatagcgacgtgatcaggcaggttcacaattcattcgcccggcaacagatgttcgaattcgacaccaagacttccgccaaagaggaagacgcattccacttcgtgagttatgtaccagtgaacggccggctctacgaattggatggactccgcgaagggcctattgacctcggcgcttgcaatcaagatgattggatctccgccgtccgccctgtgattgagaaacgcatacaaaagtacagcgagggcgagattcggttcaaccttatggcaatagtgtcagaccggaaaatgatatatgaacaaaagatcgcagaacttcagcggcagcttgctgaggagcctatggacactgaccagggtaattcaatgctttcagccatccagtctgaggtcgccaagaatcaaatgttaattgaagaagaggtccaaaaactcaaaagatataaaattgaaaacattcgtcgcaaacataattacctgccctttataatggagctcctcaagacattagcagagcatcagcagctaatcccactggtggaaaagtttgaaaagcatttcgaaaagaccctcctgggaaaatag

SEQ ID NO: 210494 - DNA, 951 bp, synthetic construct
  misc_feature 1..951: note = Description of Artificial Sequence: Synthetic coding sequence
  source 1..951: mol_type = other DNA
atgaccggcaacgccggcgagtggtgcctgatggagagcgaccccggcgtgtttaccgagctgatcaagggatttggatgcagaggggctcaggtcgaagaaatttggtccctggaaccggaaaactttgaaaagttgaagccggtacacggtttaatctttctctttaaatggcagccgggagaggagccagccgggagcgtggttcaggatagccgtttagacacaatctttttcgccaagcaagtgatcaataatgcctgtgccacgcaggctatcgtcagcgtgttgctcaactgtactcaccaggatgtccacctaggagagacactctcagaattcaaagaattttcccagagcttcgacgccgccatgaagggtctggccctatctaattccgatgttatccggcaggtccataactcttttgctagacagcagatgtttgagttcgacaccaagactagcgccaaggaagaggacgcctttcactttgtcagctacgtgccagtcaatgggcgcttgtacgagctggatggtttgcgggagggacccattgatttgggagcctgtaatcaggacgactggatctcggccgtccgacctgtgattgagaaacgaatccagaaatattccgagggcgagatacggtttaatctcatggccattgtcagtgaccggaagatgatctacgaacagaagatcgcggagctacagaggcaattagcagaagaacctatggatacggaccaaggaaattcaatgctaagcgccatacagtccgaggtggctaagaaccagatgctaatagaggaggaggtccaaaagttgaaaagatataaaattgagaatatacggaggaagcataattacttgccgttcattatggaactgctgaaaaccctcgccgaacaccagcaactgattcctctcgtcgagaagggaaagtag

SEQ ID NO: 210495 - DNA, 1107 bp, synthetic construct
  misc_feature 1..1107: note = Description of Artificial Sequence: Synthetic coding sequence
  source 1..1107: mol_type = other DNA
gcccggggcggcagcggccggtgcgtggcccgggccatgaccggcaatgccggcgaatggtgccttatggagagcgatcctggcgtttttacagagctgatcaagggttttggctgtcgtggcgcccaggtggaagagatctggtctctcgagccggaaaatttcgagaagcttaaacccgtgcacgggctcatcttcttgtttaagtggcagcccggggaggagcccgccggtagcgtagtgcaagattccaggttggacaccatcttctttgccaagcaggtcatcaataatgcctgcgccacccaggctatcgtgtctgtgctcctgaattgtacccaccaggatgtgcatcttggcgaaacactctctgagtttaaggagttcagccagtctttcgatgctgctatgaaagggttggccctttccaatagtgatgtaattagacaggtgcataatagctttgctaggcaacagatgttcgagtttgataccaagaccagcgccaaggaggaagatgccttccacttcgtgtcatacgttcccgtgaacggacgcttgtatgaactcgacggcctgagggaaggacccatcgatctgggtgcttgcaatcaagatgattggatctcggcagtaaggcccgtgatcgagaagcgcatccaaaaagatggcttttccccctgttgtcctggctggagtcagacccctgagctcaagccttcagcttgtttagatttacccaaatggtactcagaaggagaaatccggtttaatctcatggccatcgtgagcgaccgcaagatgatttacgaacaaaaaatcgccgagcttcagcgccagctcgcggaggaagagccgatggacaccgatcaaggcaacagtatgctctccgcgatacaaagtgaggtcgcaaaaaatcagatgctcattgaagaagaagttcagaagctaaagcgctacaaaatcgaaaacattcgaagaaagcataattaccttcccttcatcatggaactcctgaagactcttgccgaacaccagcaactgatccccctggttgagaaagcgaaggaaaagcaaaacgctaagaaagcacaggaaacaaagtag

SEQ ID NO: 210496 - DNA, 1068 bp, synthetic construct
  misc_feature 1..1068: note = Description of Artificial Sequence: Synthetic coding sequence
  source 1..1068: mol_type = other DNA
atgaccggcaacgccggcgagtggtgcctgatggagagcgaccccggggtatttactgagcttatcaaaggctttggttgtcgtggtgcacaggtagaggaaatttggtcactggaaccagagaacttcgagaaactgaagcccgtccacggcctgatctttctgttcaagtggcaacctggtgaagaacctgccggctcagttgttcaggatagtcgattggatacaattttcttcgcaaagcaggtcatcaacaacgcttgcgccactcaggccattgtgtcagtgctgctcaactgcacgcatcaagatgtccatcttggggagacccttagtgagtttaaggaatttagccaatcatttgacgctgctatgaaggggctggcccttagcaattctgatgtgatcaggcaagtccataattcattcgcccgtcagcagatgtttgaatttgatacaaagaccagcgccaaggaagaagacgcatttcacttcgtatcttacgttcctgttaatggccgtctctatgagcttgacggtctgcgcgagggcccaatcgatctcggtgcctgcaaccaagatgactggattagcgcagtgcgtcctgttatcgaaaaaaggatccaaaaagacggcttctcaccatgttgtccaggttggagccagaccccggagctgaaaccttcggcgtgtctagatctgccaaagtggtactcagagggcgaaatccgcttcaacctgatggccattgtgtcggaccgcaagatgatttacgagcaaaagatcgccgaactgcagcggcagcttgccgaggagcccatggacaccgaccaaggaaacagtatgctgagcgcgattcagtccgaggtggcaaaaaatcagatgttgatagaggaagaagttcagaagctgaagaggtacaaaatcgaaaatatccgacgcaaacacaactacttaccctttattatggagctgctgaaaacactcgcggaacaccagcagctcatccctctggtggagaaagcgaaagaaaagcagaacgccaagaaggcccaggagaccaagtag

SEQ ID NO: 210497 - DNA, 579 bp, synthetic construct
  misc_feature 1..579: note = Description of Artificial Sequence: Synthetic coding sequence
  source 1..579: mol_type = other DNA
atgaagggcctggccctgagcaacagcgacgtgatccggcaggtgcacaattccttcgcgcgacaacagatgttcgaattcgacaccaagacaagcgccaaagaagaggatgctttccacttcgtgtcttacgtgccagtgaatggccgcctctatgagctggacggccttcgggagggacccatagaccttggcgcctgtaatcaggatgactggatctcagctgttcggcctgtgatcgaaaagcggattcagaagtattcggagggggaaataagattcaacctgatggctatcgtgagtgaccgcaaaatgatctacgagcagaagatcgcagagctgcagcggcaactggctgaggaacccatggatactgaccagggaaattcgatgctgtccgccatacagagcgaggtcgccaaaaatcagatgctcattgaggaagaggtacagaaactgaagaggtataaaattgagaacattaggagaaaacacaactatctgccttttatcatggagcttctgaaaaccctcgcagagcaccagcagcttatcccccttgtggagaagattttttag

SEQ ID NO: 210498 - DNA, 987 bp, synthetic construct
  misc_feature 1..987: note = Description of Artificial Sequence: Synthetic coding sequence
  source 1..987: mol_type = other DNA
atgaccggcaacgccggcgagtggtgcctgatggagagcgaccccggagtctttactgaactaattaaagggtttgggtgtcgcggcgcccaggtcgaagagatttggagtttggaacctgagaacttcgaaaagctgaagcccgtacatggattaatcttcctgttcaagtggcagcctggggaggaacctgccggtagtgtggtacaggatagtcgtttggatactatcttttttgccaagcaggtaatcaataacgcttgtgcaacccaggcgattgtctctgtgttgctgaactgcacccatcaagatgttcatctaggggagactctctcagagtttaaggagttttcacaatctttcgatgccgctatgaagggcctggctctctctaattccgacgtgatccgacaggttcacaactcttttgcacgtcaacagatgttcgaattcgatactaaaacctcggctaaggaagaggatgcttttcatttcgtatcatatgtcccagtgaatgggcgactgtacgagttggacgggctgcgcgaaggaccaattgatcttggtgcgtgcaaccaggacgattggattagcgcagtcagacctgtaatcgaaaaacggatacagaaatacagtgaaggcgaaattcgctttaatctcatggcaattgtgtcagatcgcaagatgatttacgagcagaaaatagcggaattacaaaggcagctcgctgaggagccaatggacacggatcaaggtaattcgatgctgtctgcaatacagagcgaagtagcaaagaaccagatgctgattgaagaggaggtccaaaaactcaagcgctataaaattgagaatatacgtcggaaacacaactatttaccgtttatcatggagttgttgaagacactcgccgagcaccaacagctgattcctctggtggaaaaggccaaagagaagcagaacgcgaagaaagcccaagagacgaaatag

SEQ ID NO: 210499 - DNA, 990 bp, synthetic construct
  misc_feature 1..990: note = Description of Artificial Sequence: Synthetic coding sequence
  source 1..990: mol_type = other DNA
atgaccggcaacgccggcgagtggtgcctgatggagagcgaccccggcgttttcacggaactcatcaagggcttcggttgtcgtggcgctcaggtagaagaaatttggagcctggagcccgagaacttcgaaaaactgaaacctgtgcacgggttgatctttctgttcaagtggcagcccggcgaggaacccgctggatctgtggtccaggacagcagattggacaccatcttcttcgccaaacaagtaataaacaatgcatgtgcgactcaggctatcgtgtcagtcctacttaactgtactcatcaggacgtgcacctgggagagacactgtcagagttcaaggagttttcccagtcttttgatgcagccatgaaggggctggctctctccaactcggatgtaatcagacaggtgcataactccttcgcacgccagcaaatgtttgagttcgataccaagaccagtgcaaaagaagaggacgcttttcatttcgtgtcttatgtcccagtcaacggccgtctgtacgagctggatgggctgcgtgagggcccaattgaccttggagcttgcaaccaagatgactggattagtgccgtacgaccggtgatcgagaaacgcatacagaagtatagcgagggggaaatacgctttaacctgatggccatcgtgagtgaccgaaaaatgatctacgagcagaagattgctgagctccaacgccaacttgccgaggaagaacctatggataccgatcagggtaactccatgttgtcagcaatccagtctgaggtggcaaaaaatcaaatgctgatcgaagaggaagtgcagaaattaaaacggtataagatcgagaacattaggcgaaagcacaactatctgcccttcattatggagctgctcaagaccttggccgagcatcagcaactcattccgctggtcgaaaaggcgaaggagaagcagaacgccaagaaggcccaggagacaaagtag

SEQ ID NO: 210500 - DNA, 954 bp, synthetic construct
  misc_feature 1..954: note = Description of Artificial Sequence: Synthetic coding sequence
  source 1..954: mol_type = other DNA
atggagagcgaccccggcgtgttcaccgagctgatcaagggcttcggctgccgcggcgctcaggtagaagaaatttggtcactggaaccagaaaactttgagaagctgaagccggttcacggccttatctttctgtttaaatggcagcctggggaggagccagcggggtctgtcgtgcaggattccagactcgacactattttcttcgcaaagcaggtgataaacaatgcatgcgccacccaagccattgtgtcagtacttctgaattgcacacatcaggacgtccacctgggggaaacgctgagcgaattcaaggaattttcccagtccttcgacgcggctatgaagggcctggcccttagcaactccgatgtcatccgacaggtgcacaacagttttgcccgccagcagatgttcgaattcgacacgaaaacatctgccaaagaggaggacgctttccacttcgtctcctacgtgcctgtgaatgggagattgtacgaattagatggtctgagagagggccccatcgatttaggagcgtgtaaccaggacgactggattagcgccgtgcggcctgtgattgagaagcggatacagaagtatagtgaaggagagatcagattcaacctgatggctatcgtctccgacaggaagatgatctacgaacagaagatagcggagttacagaggcagcttgccgaagaagagccgatggatacggaccaagggaacagcatgctgtctgcaatccagtcagaagtagccaagaaccagatgctgatcgaggaggaggtccagaaacttaagcggtacaagattgagaacatccgcagaaagcataactacctgcctttcataatggaattgctgaagaccttagcggagcatcaacagctcatcccgttggtagagaaattcgagaagcactttgagaagacacttctggggaaatag

SEQ ID NO: 210501 - DNA, 300 bp, synthetic construct
  misc_feature 1..300: note = Description of Artificial Sequence: Synthetic coding sequence
  source 1..300: mol_type = other DNA
tgaaacctgatggccatcgtgagcgaccggaagatgatctacgagcagaagatcgcagagcttcaacgacaactcgctgaggagccaatggacacagatcagggcaactcaatgttgtcagccatccaatccgaggtggccaaaaatcagatgctgattgaggaggaggtacagaagctgaagcggtataaaattgagaacatccgcagaaagcacaattacctgccgttcattatggagcttctgaagaccctggctgagcaccagcagctgattcctctggttgaaaaaattttctag

SEQ ID NO: 210502 - DNA, 498 bp, synthetic construct
  misc_feature 1..498: note = Description of Artificial Sequence: Synthetic coding sequence
  source 1..498: mol_type = other DNA
atggtgcggcccggcctggcccggatgagcctgccccggtgctggtttcgttaccccgggtggacaggcgctgaagcgggcagagggagggcgatcgtcagtcgacgccttccctccctgaatccttgggacgccggggagcgccacggaggcctggtgaggatctgcgcgtcactcggccctcacaaacgccttcccgccggcctgccccagtgtccccacctctatctggctgccgatcctcttgaccctcagcgtcgccaagagaagtcatgtgctgccctcggaaacgataagcgccgacagccagatggacagaggcagccccagcagcaacagcaacctcactgtcggcggggtttccaggctcccgccctccccaatcctctgagagttttacagggccttggtcgcgtgagcatgagcctggggtggctagaacgaccacctgcgctgagccgcgctgcaggctgtagaggagcccaggtcgaggagtag

SEQ ID NO: 210503 - DNA, 657 bp, synthetic construct
  misc_feature 1..657: note = Description of Artificial Sequence: Synthetic coding sequence
  source 1..657: mol_type = other DNA
tgactgagcgagttcaaggagttcagccagagcttcgacgccgccatgaaggggctggctctatccaattcggacgtgatccgccaggttcataattcttttgcgaggcaacagatgttcgaatttgatacgaagacctcagctaaagaggaagacgccttccatttcgtcagctatgtacccgttaatggcagactgtacgaactggacggtttgcgagaggggcccatcgatctcggagcttgcaatcaggacgactggatctctgccgtcagacctgtaatagagaagaggattcagaagtactctgagggtgaaatccgcttcaatcttatggccatagtctccgataggaaaatgatttacgaacagaagattgccgagctgcagaggcaactggcagaggaagaacccatggacacagatcagggaaacagtatgctttctgcaatccagtcagaggttgctaaaaatcagatgttgattgaggaggaggttcagaagctgaagaggtacaaaatcgaaaatattcgccgaaaacacaactatctgccgttcatcatggagttgctgaaaacactggcggagcaccaacagctgattccactggttgagaagttcgaaaaacacttcgaaaaaacattgcttggcaaatag

SEQ ID NO: 210504 - DNA, 777 bp, synthetic construct
  misc_feature 1..777: note = Description of Artificial Sequence: Synthetic coding sequence
  source 1..777: mol_type = other DNA
atgagcctgggctggctggagcggccccccgccctgagccgggccgctggctgtcgaggagcgcaggtggaagaaatatggtccctggaacctgagaatttcgaaaaactgaaaccagtgcatggtttgatcttcctcttcaaatggcagcctggtgaagagcccgccggtagtgttgttcaagatagcaggctggacaccattttcttcgcgaagcaagtcattaataatgcctgcgctacacaggccatcgtcagcgtgttgttgaactgcacccaccaggacgtccacctgggagagaccttgtcagaatttaaagagtttagtcaaagctttgacgctgcgatgaagggcctcgccctgtccaactcggatgtcatcagacaagtacataatagttttgcgagacagcagatgtttgaattcgatacaaaaacctccgccaaagaggaggatgcgtttcatttcgttagttatgtacctgtaaatggcagactgtatgagctggacggactgagagaaggacctatagacctgggggcatgcaaccaggatgactggatctccgccgtcaggcccgttatcgagaagagaattcaaaaatactccgaaggtgaaattcggtttaatctgatggcaatcgtgtcggaccggaagatgatatacgaacagaagatcgcggagctccagcgccagctggccgaagaacctatggacaccgaccagggcaactcaatgttgtccgccatacagagtgaggttgcaaaaaaccagtag

SEQ ID NO: 210505 - DNA, 552 bp, synthetic construct
  misc_feature 1..552: note = Description of Artificial Sequence: Synthetic coding sequence
  source 1..552: mol_type = other DNA
tgacagcagatgttcgagttcgacaccaagaccagcgccaaggaggaggacgccttccactttgtgagctatgtcccagtcaacggccgcctgtatgaactcgacggtttacgcgagggtcctatcgatctgggagcctgcaaccaagacgactggatctcagctgtgcgccctgttattgagaagcgcattcagaagtacagtgaaggagagatcaggttcaatctgatggccatcgtatcggatcgcaagatgatttacgaacagaaaatcgctgaactacagaggcaactggcagaggaggaacccatggacacagaccagggtaatagcatgcttagcgcgattcagagcgaggtagcaaagaaccagatgctgattgaagaggaagtacagaaactgaaacgttacaagatcgagaatatcaggagaaagcacaattacctgccattcatcatggagctcctgaaaacattagctgagcatcagcagctgataccccttgtggaaaaattcgagaaacattttgagaaaactttattggggaagtag

SEQ ID NO: 210506 - DNA, 348 bp, synthetic construct
  misc_feature 1..348: note = Description of Artificial Sequence: Synthetic coding sequence
  source 1..348: mol_type = other DNA
tgagagggcgagatccggttcaacctgatggccatcgtgagcgacagaaaaatgatctacgagcagaaaattgcagaacttcagagacagttggccgaggaacccatggatacggaccaaggaaacagtatgttgtctgccatacaatcagaggtggccaaaaatcagatgctaattgaagaagaagtgcagaagctcaagagatataaaattgagaacatcagaagaaagcacaactatttgccctttataatggaactgttaaaaaccctggccgagcatcagcaattgatcccactggtggagaaattcgaaaaacactttgagaaaacgttactaggaaagtag

SEQ ID NO: 210507 - DNA, 582 bp, synthetic construct
  misc_feature 1..582: note = Description of Artificial Sequence: Synthetic coding sequence
  source 1..582: mol_type = other DNA
atgaagggcctggccctgagcaacagcgacgtgatccggcaggtgcacaacagctttgcgagacagcagatgtttgaatttgacacaaagacttctgcaaaagaagaagatgcctttcactttgtgagttatgtgccagttaatggcagactgtatgagctcgacggcctgcgggagggacctattgatctgggcgcttgtaaccaagatgattggattagcgcagtaagacccgtgattgaaaagcgcatacagaaatacagtgaaggtgagattagatttaatttgatggccatcgtgagcgatcggaagatgatttacgaacaaaagatcgcagagttgcagcggcagctagctgaggaggagcccatggacaccgatcaggggaacagcatgctttccgctatacaatccgaagtggcgaagaatcagatgcttattgaagaagaggtacaaaagctgaagcggtacaagattgaaaacatccgccggaagcacaattatcttccatttatcatggagctactcaaaacacttgctgagcatcaacaactgatcccacttgtagagaaaatcttttag

SEQ ID NO: 210508 - DNA, 498 bp, synthetic construct
  misc_feature 1..498: note = Description of Artificial Sequence: Synthetic coding sequence
  source 1..498: mol_type = other DNA
atggcccccaacgccagctgcctgtgcgtgcacgtgcggagcgaggagtgggacctgatgactttcgacgcaaacccatatgatagcgtgaagaaaataaaggagcatgtacgttcaaagactaaagtaccagtgcaagatcaggtgctcttgctgggttccaagatccttaagcctcgtcgctccttgtcctcctacggaatcgacaaggaaaagacaattcatctgactttgaaagtcgtaaaaccatccgatgaagagctccctttgtttctagtcgagagcggcgatgaggccaagcgccacctcctgcaagttaggcggtcctctagcgtcgcccaggtgaaggctatgatcgaaacaaaaacaggcattatccctgagacccagatagtgacatgtaatggcaaaagactagaggatgggaaaatgatggccgactacgggattcgtaagggcaaccttctgttcctcgcatgttactgcattggcgggtag

SEQ ID NO: 210509 - DNA, 498 bp, synthetic construct
  misc_feature 1..498: note = Description of Artificial Sequence: Synthetic coding sequence
  source 1..498: mol_type = other DNA
atggcccccaacgccagctgcctgtgcgtgcacgtgcggagcgaggagtgggacctgatgaccttcgatgcaaatccgtacgattcagttaagaagattaaagagcatgtgagaagcaaaacgaaagtgcccgtccaggatcaggtgttgctgctgggcagtaaaatcttgaagccacgccgctctctaagctcatacggaatcgacaaggagaagactatacaccttactttaaaagtcgtaaagcctagtgatgaagagctacccctgtttctagtggagtcaggagacgaggccaagcggcatttgctgcaggttagaagaagctcatctgtggcccaggtaaaggcaatgattgagactaaaacaggaattattccagagacccagatagtgacatgtaacgggaaaaggctagaagacggcaagatgatggccgactacggcatccggaagggtaacctgctctttctggcatcatactgcatcggcggctag

SEQ ID NO: 210510 - DNA, 498 bp, synthetic construct
  misc_feature 1..498: note = Description of Artificial Sequence: Synthetic coding sequence
  source 1..498: mol_type = other DNA
atggcccccaacgccagctgcctgtgcgtgcacgtgcggagcgaggagtgggatttaatgacttttgatgctaatccttatgattctgtgaaaaaaatcaaagaacatgtacgttccaaaaccaaggtccctgtgcaggatcaggtactgctgctgggttcaaaaattctgaaacctcgaagaagtttaagctcatacggaaccgataaagagaagactatccatctaaccctcaaagtggtgaagcctagtgacgaggaactgccgctgttcctcgtggagtctggagatgaggccaaaaggcatctgttgcaggtccgccggtcctcctctgtggcgcaggtgaaagcgatgatcgaaacgaaaacaggaattatccccgagacgcaaattgtcacctgtaacggcaagcggttggaagacggcaagatgatggcagactacggcattcgcaaaggcaatctgctcttccttgcctcctattgtatcgggggttag

SEQ ID NO: 210511 - DNA, 498 bp, synthetic construct
  misc_feature 1..498: note = Description of Artificial Sequence: Synthetic coding sequence
  source 1..498: mol_type = other DNA
atggcccccaacgccagctgcctgtgcgtgcacgtgcggagcgaggagtgggacctgatgaccttcgacgcaaacccatacgattctgtgaaaaagattaaagaacacgtgcgctcaaagactaaggtgccagtccaggaccaagtgttgctcttgggcagtaaaatcttaaagcctagacgctcattaagcagctacgggacagataaggaaaaaacaatccatctaacactaaaggtggtgaagccttcagatgaagagttgccactgttcctggtcgaaagtggcgatgaggctaagcggcatctgctacaggtgcggagatcatcttccgtggcccaggtgaaggcaatgattgagactaagactgggatcataccagagacccagattgttacctgtaatggcaaaaggctcgaggacgggaaaatgatggccgattatggaatcaggaagggaaacctgctgttccttgcctcctactgtattggagggtag

SEQ ID NO: 210512 - DNA, 498 bp, synthetic construct
  misc_feature 1..498: note = Description of Artificial Sequence: Synthetic coding sequence
  source 1..498: mol_type = other DNA
atggcccccaacgccagctgcctgtgcgtgcacgtgcggagcgaggaatgggacttgatgacattcgacgcaaatccctacgattcagtgaagaagattaaagagcacgtccgctcaaaaactaaagtacccgtccaggatcaggttttgctgctcggctcaaaaatcttgaaaccccgaaggtcgttatcatcttacgggattgataaggagaagactatccatctgacactgaaggtagtaaagcccagtgatgaggagctgccccttttcctggttgaaagtggtgacgaagctaagagacaccttctccaggttaggagatcgtcaagcgtcgcgcaggtcaaggccatgatagagacaaagacaggtatcatccccgagacccagattgttacctgtaacggtaagcggctagaagatggcaaaatgatggcggattacggcataagaaagggcaatcttttattcctagcttgttactgcatcgggggctag

SEQ ID NO: 210513 - DNA, 498 bp, synthetic construct
  misc_feature 1..498: note = Description of Artificial Sequence: Synthetic coding sequence
  source 1..498: mol_type = other DNA
atggcccccaacgccagctgcctgtgcgtgcacgtgcggagcgaggagtgggatcttatgacattcgatgccaacccatacgacagcgttaaaaagatcaaagaacacgtccgcagcaaaactaaggtccccgtccaggaccaagttttactgctaggttccaaaattcttaagccacggagaagcctgtcatcttacggaaccgataaggagaagactatccatttgaccctgaaggtggtcaaaccttccgatgaagagctgcccctgttcttggtggagtcgggggacgaagcgaagcggcacctgctccaggtgagacgatcatctagtgtggcccaggtgaaggcaatgatcgagaccaaaaccgggattatacctgaaactcagatcgtgacatgtaacggcaagagactcgaggacggcaaaatgatggcagactatggaatccgcaagggcaatctgctgtttctggcatcatactgcatcggtggctag

SEQ ID NO: 210514 - DNA, 498 bp, synthetic construct
  misc_feature 1..498: note = Description of Artificial Sequence: Synthetic coding sequence
  source 1..498: mol_type = other DNA
atggcccccaacgccagctgcctgtgcgtgcacgtgcggagcgaggagtgggacctgatgaccttcgatgccaatccatacgactccgtgaagaaaattaaagaacacgtgcggagcaagacaaaggtaccggtccaggaccaagttctgctgctcgggagcaagatcctgaaaccacgccgaagtttgtcctcttatggcatcgataaggagaagaccatccacctgacacttaaggttgttaagcctagcgacgaagagctccccctctttctcgtggagtccggagacgaggctaaaaggcacttactccaggtgagaaggtcatccagtgtcgcgcaagttaaagcaatgattgagacgaaaactgggattatccccgagacacagatagtcacgtgcaacggtaagaggctggaagacggaaagatgatggccgactatggcataagaaagggcaacctgctcttccttgcatcatattgcatcggcggctag

SEQ ID NO: 210515 - DNA, 705 bp, synthetic construct
  misc_feature 1..705: note = Description of Artificial Sequence: Synthetic coding sequence
  source 1..705: mol_type = other DNA
atgggcggctgcgtgggcgcccagcacgacagcagcggcagcctgaatgaaaactctgagggcaccggggtggcacttggcaggaatcagcccctgaaaaaggaaaaaccaaagtggaagtccgactaccccatgacagatggacaactgcgaagcaagagagacgagttttgggatactgcccctgcattcgagggaagaaaggagatctgggatgccctcaaggccgcagcccacgcatttgagtccaacgatcatgaactggcccaggccataatagatggcgcaaatatcaccctcccccatggcgccttgacagaatgttacgacgagttaggtaacaggtaccagcttcccgtgtactgtctcgcacctcccatcaacatgatcgaagaaaaaagcgatattgagaccctcgacattcccgagcctccccctaattccgggtacgagtgccagctgcggctacgattgtccactggtaaggacttgaaactcgtcgtcagaagcacggatacagtgttccatatgaagagaaggctgcacgctgccgaaggagtagaacccgggtcccagcgatggttcttcagcggcagaccccttacagacaagatgaagtttgaggagctcaaaatcccgaaagattacgtggtgcaggtcattgttagtcagcctgtgcagaatccaacacctgtggagaattag

SEQ ID NO: 210516 - DNA, 924 bp, synthetic construct
  misc_feature 1..924: note = Description of Artificial Sequence: Synthetic coding sequence
  source 1..924: mol_type = other DNA
atgttcagcttcaacatgttcgaccaccccatcccccgggtgttccagaatcggttttccactcaatatagatgtttttctgtctctatgctggccggcccaaatgataggtctgatgttgagaaaggaggaaagattataatgccgccctctgcccttgatcaattatcacggctgaatattacataccctatgctttttaagcttacgaacaaaaactcagaccggatgactcactgtggagtcctcgagttcgttgccgacgagggaatctgttacttaccgcactggatgatgcagaaccttctgttggaagagggcgggctcgtccaggtggaaagcgtcaacttacaggtggccacctactctaagttccagccccaaagccctgacttcctggacatcactaaccccaaggctgtgttggagaatgcgttaagaaattttgcttgcctgacaaccggcgatgtcattgccatcaattacaacgaaaagatatatgaactacgggtcatggagactaaaccagacaaagcagtgtccattattgaatgtgatatgaacgtcgatttcgatgcccccctggggtacaaggagcctgaacggcaggtccaacacgaggagtcgacagaaggtgaggctgatcactctgggtacgcgggagagctggggtttcgtgcgttctctggatcgggcaatagactggacggcaagaagaagggtgttgagccctcccccagccccataaaaccgggagacatcaaacgcggaatcccaaattatgagtttaaacttggaaaaattacgttcatcaggaactcgaggccactggttaagaaggtggaggaagatgaagccggcgggcggttcgtcgcatttagcggcgaaggtcagtccctgaggaaaaaggggcgcaagccgtag

SEQ ID NO: 210517 - DNA, 891 bp, synthetic construct
  misc_feature 1..891: note = Description of Artificial Sequence: Synthetic coding sequence
  source 1..891: mol_type = other DNA
atgttcagcttcaacatgttcgaccaccccatcccccgggtgttccagaaccgattctctacccagtacaggtgttttagcgtgagtatgctcgctggcccaaatgatcgaagcgacgttgaaaagggagggaaaagcagactgaatataacatatcctatgttgtttaagctgactaataaaaattctgacaggatgacacactgtggtgtgttagagttcgttgccgatgaggggatttgctatctcccccactggatgatgcagaatctgctcctggaagaggggggcctggttcaggtcgagagcgtcaacttgcaggtcgccacatacagtaagtttcaaccccaaagccccgacttcttggatattacaaacccaaaggctgtcctcgaaaatgctctacgaaatttcgcctgcctcaccacgggcgacgtgatcgcgattaactataatgaaaaaatttacgagttacgggttatggagacaaaaccagacaaggcagtgtcaattatcgagtgtgatatgaacgtggactttgatgcgcccctgggatacaaggagcctgagcggcaggtccagcacgaagagtcaacggagggcgaggccgaccactcaggctatgccggggagctcggatttcgggccttcagcggttccggaaaccgactggacgggaaaaagaaaggcgtcgagccgtcccctagcccaatcaagccaggagatatcaagagggggataccgaattatgagttcaagcttgggaaaattacctttatccggaacagccgccctctcgtgaagaaggtggaggaggatgaggcagggggaaggttcgtggcgttcagcggcgaaggtcagagccttagaaagaaagggcggaagccttag

SEQ ID NO: 210518 - DNA, 1032 bp, synthetic construct
  misc_feature 1..1032: note = Description of Artificial Sequence: Synthetic coding sequence
  source 1..1032: mol_type = other DNA
atgttcagcttcaacatgttcgaccaccccatcccccgggtgttccagaataggttctcaactcagtatagatgtttttccgtgtccatgctggccggacctaatgaccgctccgatgtggaaaaaggagggaagattattatgccacccagtgcattagaccagctgtctcgattgaacatcacatacccaatgctattcaagcttactaacaagaattctgatcgaatgacgcattgcggtgtactggagttcgtcgctgatgagggcatttgttacctacctcattgggtggtttatagactcagtctggagcgagatggtctgaagtctctagaagtggccgaggtgagcggatccgattacttccctagccccttctgcggactggaagtctggatgatgcagaatctcctgctggaagaaggcggcctggtacaggtcgaaagcgtgaatcttcaggtcgctacgtacagtaaatttcagccccagtctccagatttcctggatatcaccaacccgaaggctgtgctagagaatgctttgagaaattttgcgtgccttacgaccggtgacgtcatagcaatcaactataacgagaagatttatgaactcagagttatggaaacaaagcctgataaagctgttagtattattgagtgcgatatgaatgtggacttcgatgcccccctgggatataaagagcctgaacgacaggtccagcacgaggaatcaactgaaggagaggcagatcactcagggtatgcaggggagttgggatttagagcattttctggatctgggaataggctcgatggcaagaagaaaggcgtcgaaccgtcccccagtcctattaaaccaggcgatatcaagcggggcattcctaactacgagtttaagttaggaaagattaccttcatccgcaactcacggccactagtgaagaaggtagaagaggacgaagccggtgggcgcttcgtggccttcagcggagaaggtcagagtctgagaaaaaaaggacggaaaccttag

SEQ ID NO: 210519 - DNA, 801 bp, synthetic construct
  misc_feature 1..801: note = Description of Artificial Sequence: Synthetic coding sequence
  source 1..801: mol_type = other DNA
atgttcagcttcaacatgttcgaccaccccatcccccgggtgttccagaacagattcagtactcaatacaggtgcttcagtgtaagcatgctcgcgggaccgaatgacaggtctgacgtcgaaaagggcggcaagatcatcatgcctcccagcgccctcgatcagttgtccaggctgaacatcacctacccaatgcttttcaagttgaccaataagaattcagaccgtatgacccactgcggggtcctggagttcgtcgctgacgaaggaatctgctacttaccacactggatgatgcagaatctcttgttggaggaagggggcctcgtccaggtagagagtgtgaacctgcaggtcgctacatacagtaagtttcagccccagagccctgattttctggatatcactaatccaaaggcagttcttgaaaatgcactccggaacttcgcctgcctgaccaccggcgatgtcatcgccatcaactataatgaaaagatctatgaattgcgcgtcatggagactaaacctgataaggccgtctccataattgaatgtgatatgaacgtggacttcgatgcgccactgggctataaggaacccgagcgccaggtccagcatgaagaatccacagaaggggaggccgatcactccggctacgcaggagagctgggcttccgcgcattcagtgggtcaggaaaccgtctggatgggaaaaagaagggtgtggaaccaagtccatcgcctattaaacctggcgatatcaagcgcggcatacccaactacgaattcaaattgggttag

SEQ ID NO: 210520 - DNA, 1053 bp, synthetic construct
  misc_feature 1..1053: note = Description of Artificial Sequence: Synthetic coding sequence
  source 1..1053: mol_type = other DNA
atgctgcccctgcccgacctggacctgtggcccctggaccggctgccgtctcctattaaaagaaagccacagacactgggctccctcaaatccagtcaaggtatcgtagaagagacctccgaggagggaaacagcgtgccggcctcccagtctgtcgcagcactgacatccaaaagatctttggtcttgatgccggagagttccgcagaagaaatcacagtttgtccggaaacccaattaagctcaagcgagaccttcgatctcgagcgggaagtctcacccggaagtcgagacattttagacggcgttaggattataatggccgacaaggaagtgggcaacaaggaagacgccgagaaagaagtcgccatctcaacctttagcagttcaaatcaagtctcttgtcctctttgcgaccagtgtttcccgcccacaaaaatcgagcggcacgcaatgtattgtaacggcctgatggaggaggataccgaagttctgactagacgccagaaagaagccaagacaaagtcagatagcggaacagccgcacagacctcgctggatattgataaaaatgagaagtgctatttgtgcaagtctcttgtccctttcagggagtatcagtgccatgtggatagctgtctgcagctggcaaaggccgaccaaggggacggaccagaaggatccgggcgagcctgttccacagtcgagggtaagtggcagcagaggctcaagaaccctaaggaaaaagggcacagcgaagggcgtttactcagtttccttgaacagagcgaacataagacgagtgacgctgacatcaaaagctctgaaacaggagcattcagggtgccatctccgggtatggaagaggccgggtgttctagggaaatgcagagctcctttacccgccgagatttaaacgagtcgccagtcaaatcttttgtgagcatctctgaggcaaccgattgtcttgtggatttcaagaagcaggtgactgttcagccaggctctaggaccagaacaaaagccggacgagggagacgccggaagttctag

SEQ ID NO: 210521 - DNA, 2163 bp, synthetic construct
  misc_feature 1..2163: note = Description of Artificial Sequence: Synthetic coding sequence
  source 1..2163: mol_type = other DNA
atgccccggcggaagaagaaggtgaaggaggtgagcgagagccggaacttggaaaagaaagatgtggagaccacatccagcgtgtcagtaaaaagaaaaaggcgcttggaggatgcatttatcgtgatctcagacagcgacggagaagagccaaaggaagaaaatggcctgcagaagaccaagactaagcagtccaaccgcgcgaaatgcctagctaagcgaaagatagctcagatgacagaggaggaacagtttgctctggcacttaaaatgtctgagcaggaagcccgcgaggtgaactcccaggaagaagaggaagaggagttgcttcgtaaggccatcgcagagagcttgaattcatgccgcccatccgacgcctccgctacaaggtctcggcccctcgctactggtccatcttcgcagtcccaccaggaaaaaacaacagattccggcttaacagaagggatctggcagctcgttccaccttccttgtttaaggggagccacataagccagggtaatgaagcagaggagagggaggagccctgggatcatacggaaaagactgaagaggagccagtctcagggagttctgggagctgggaccagagttctcagcccgtttttgaaaatgtaaatgtgaaatcttttgaccggtgcaccggacattctgcagaacacacacagtgcggcaagccacaggagtctacaggtaggggatctgcctttcttaaggcagtacagggcagcggggacacatctcgacactgcctacctactctggcagatgctaaaggactgcaggataccgggggaacagtcaactatttttggggtatacccttctgtcccgatggcgttgatcccaaccagtatactaaagtcattctgtgtcagctggaggtgtaccagaaatcactgaaaatggcccagcgtcaacttttaaacaaaaagggtttcggtgaaccagtgttgcctcgccccccttccctgatacagaatgaatgcggtcagggggaacaggcatccgaaaagaatgagtgcattagcgaggacatgggggatgaggacaaggaagagcggcaggaatcccgcgctagtgattggcactccaaaacgaaagacttccaggaatcgtcaatcaagtctctgaaagagaaacttctgctcgaggaagaaccaacaacatcacacggtcaatcaagccaaggcatcgtggaggagactagcgaggaaggcaattccgttcccgcatcacagtcggtggcagctcttacctcaaaaaggtccttggttctgatgcccgaaagctccgccgaagaaatcaccgtgtgtcctgaaactcagctctccagctccgaaacatttgacttggaacgggaggtctcgcctggcagcagggacatacttgacggagtcagaatcatcatggcagacaaggaagttgggaataaagaggacgccgaaaaggaggtggctatttctacttttagcagctcaaaccaggtttcgtgtccgctttgcgaccaatgttttccccctaccaaaattgaaaggcatgccatgtattgcaatggtctgatggaggaagacaccgaggtgcttactagaagacaaaaagaggccaagacgaaatcagattccgggaccgccgcgcagacctccttggacatagacaagaacgagaagtgctacctttgcaaaagccttgtgcccttccgagagtaccagtgccacgtggacagttgtctgcagctcgcaaaagcggatcaaggagacggccctgagggttcaggaagagcgtgttcaaccgtcgaggggaagtggcagcagcgcctgaaaaacccaaaggaaaagggtcactctgaaggacgattgcttagctttctggaacagtccgaacacaagacctcggatgccgacatcaagtccagtgagaccggtgcgtttcgggtccccagccccggtatggaggaagccggatgctccagggagatgcagtccagcttcacccgccgcgatctgaatgaaagccctgtcaaaagttttgtcagcatcagtgaagctacagattgcctggtggattttaagaaacaagtgactgtgcagcctggcagtagaaccaggactaaagcaggaagaggccgacgaaggaaattctag

SEQ ID NO: 210522 - DNA, 1929 bp, synthetic construct
  misc_feature 1..1929: note = Description of Artificial Sequence: Synthetic coding sequence
  source 1..1929: mol_type = other DNA
atgaccgaggaggagcagttcgccctggccctgaagatgagcgagcaggaggcacgagaggttaactctcaggaggaggaagaagaggagctgctgagaaaagcaatcgccgagagccttaatagctgcaggccttctgatgcctcggccactaggtcgcgccctcttgctacaggcccttcctcccagtcacaccaggaaaagactacagacagtgggcttactgaagggatttggcagctggtacctccaagtctgttcaagggctcgcatatttcacagggcaatgaggctgaggagcgcgaagagccgtgggaccatacagaaaagacagaggaggagcctgttagcggctcttccggcagttgggaccagtcctcccagcccgtatttgaaaacgtcaatgttaaaagcttcgacagatgtactggccattccgcggaacatactcagtgcggaaaaccacaggaatcgaccggacgtgggtccgccttccttaaagccgtgcagggatctggggatacctccaggcactgcctgcctactcttgccgatgcaaaaggtttgcaggatacaggcggaaccgttaactacttctgggggatcccgttctgtcccgacggcgtggaccctaatcagtatacaaaagtcatcctgtgtcagctggaggtgtaccagaaatctctgaaaatggcccagcgccagcttttgaacaagaaagggttcggagaacctgtgttgcctcgacccccatctctaatccagaatgaatgcgggcaaggtgagcaagccagtgagaagaacgagtgcatctcagaggacatgggcgatgaagacaaagaggaacggcaagagagtcgtgcttccgattggcatagcaaaacaaaggatttccaggagtcttccataaaaagcctcaaagagaagcttctattggaagaagaacctactaccagccacggccagtcttctcagggcatagtggaagagacatccgaggagggaaattcagtgcccgcttctcagagtgttgcggcactgacaagcaagcggtcattggttctgatgcctgaatcgtctgctgaagagattaccgtgtgccccgaaacacaattgtccagttcagaaactttcgacctagaaagggaggtctcaccaggaagtagggacatcttggatggcgttaggatcattatggccgacaaggaggtcgggaacaaagaggacgccgaaaaagaagtggccatttcaactttctctagttccaaccaagtatcatgcccactttgtgaccagtgttttccccccacaaaaatcgaaagacatgctatgtactgcaacggcctgatggaggaagacactgaggtcttgactcggcggcagaaggaggcaaagacaaagtcagattcggggacggccgcacaaacatccctggacatcgacaagaatgagaaatgctatctctgcaagagtctcgtccctttccgggaatatcagtgccacgtcgactcctgcctgcagctggcaaaagctgatcagggtgacgggcctgaaggctcagggagagcgtgttctaccgtggaaggaaagtggcagcagcgtctgaagaacccgaaggagaagggccattcagaggggcgtttgctgtcattcctcgaacaaagcgaacacaagacctcagatgcagatattaagagctcagagacaggcgcctttcgggtcccttctccaggcatggaagaagccggatgttcaagggaaatgcaatctagtttcacaagacgcgaccttaatgaatcccccgtcaagtccttcgtctcaatcagcgaagcgactgactgtctcgtggattttaaaaaacaggtgaccgtccagcctgggagtagaactagaacaaaagccgggaggggtaggcggcgtaagttctag

SEQ ID NO: 210523 - DNA, 2160 bp, synthetic construct
  misc_feature 1..2160: note = Description of Artificial Sequence: Synthetic coding sequence
  source 1..2160: mol_type = other DNA
atgccccggcggaagaagaaggtgaaggaggtgagcgagagccggaatttggagaagaaggacgtagaaacaaccagtagtgtgagcgtgaaaaggaagagacgcctggaagacgcctttattgtgatctctgacagtgacggtgaggagccgaaagaagaaaacggactccaaaaaacaaaaacaaaacagagcaatagggccaaatgcctggccaagcggaaaatagctcaaatgacagaggaggaacagtttgctctggctctgaagatgagcgagcaggaagctagggaagtcaatagccaggaagaggaagaggaggaattgctccgaaaggccatagccgaatcacttaatagctgcaggcccagcgatgcttctgccactcggtctaggccgttggctactgggccatcatcccagagtcaccaggaaaaaactactgattcaggacttaccgagggaatttggcaactagtaccccctagcctgtttaaaggcagccacatctcccaggggaacgaagcggaagaacgggaagagccctgggatcacactgagaaaacggaggaggaacccgtaagcggcagcagcgggagttgggaccagagcagtcagccagtcttcgagaatgtgaatgtaaagagctttgatcggtgcacaggccacagcgcagaacatacgcaatgtggcaagccacaggagagtaccggaaggggctcagcattcctgaaagcagtgcagggtagtggcgatacctcccgacactgcctccctacactggcagatgcaaaaggacttcaggacactggcggtacggtcaactacttttgggggattcctttctgtcctgatggagtggacccaaaccaatacacaaaggttatcctgtgccagctagaagtgtatcagaagtcgctgaaaatggcccagaggcaacttctgaataaaaagggattcggagagccagtactgcctagacccccatcgctcatccagaatgaatgtggccaaggcgaacaggccagtgaaaagaacgaatgtatttcagaggatatgggggacgaggacaaggaggaacgacaggaatcacgcgcctccgattggcatagtaagaccaaggattttcaggaatcatccatcaaaagcttgaaagaaaaattgttgctggaagaggaacctacaacatctcacgggcagtcctcacagggtatcgttgaagagacgagtgaggaagggaattctgtccctgcttcgcaatctgttgcggcattgacctcaaaacgttctctcgtgctgatgcccgagtccagcgcggaggagatcactgtctgtcctgagactcagcttagctcttccgagaccttcgatcttgagcgagaggtttcacccggatctagggacatcctggatggcgtgcgtatcattatggctgataaggaagtgggcaataaggaggatgccgagaaagaggtagcaatcagcacctttagcagtagcaaccaggtaagttgtccattgtgtgatcagtgctttccacccacgaaaatcgaacgccacgccatgtactgcaatggactgatggaagaagatactgtattgacccgcagacagaaggaggcgaaaactaagtcagacagtggcacagctgcccagacttctctggacatcgacaagaatgagaagtgctacctgtgtaaatcccttgtccccttccgggagtaccaatgccacgtagactcatgtcttcagcttgcgaaagctgaccagggcgacggcccagaaggatccggacgggcttgcagtactgtagaaggcaagtggcagcagcgactaaaaaatcccaaagagaagggccatagtgaaggaagattgctctctttcttggagcaatcagagcacaaaactagtgatgcggatatcaaatcatcagagacaggagcctttcgtgttccatcaccaggaatggaggaggcgggatgctctcgggaaatgcagtcctcttttacccgcagagacctgaacgaatcccccgtgaagagctttgtgagcatcagtgaggccactgattgcttggtcgactttaaaaagcaggttaccgtacagcccgggagccgcacacggaccaaggctggtagaggacgaagacgaaaattttag

SEQ ID NO: 210524 - DNA, 96 bp, synthetic construct
  misc_feature 1..96: note = Description of Artificial Sequence: Synthetic coding sequence
  source 1..96: mol_type = other DNA
atgccccggcggaagaagaaggtgaaggaggtgagcgagagccggaacttggagaagaaagacgtcgaaactacgtcttcagtgagtgtcaaatag

SEQ ID NO: 210525 - DNA, 270 bp, synthetic construct
  misc_feature 1..270: note = Description of Artificial Sequence: Synthetic coding sequence
  source 1..270: mol_type = other DNA
atgccccggcggaagaagaaggtgaaggaggtgagcgagagccggaacctcgagaagaaagatgtcgaaactacttcaagcgtgagtgtgaagaggaagcggcggctggaagatgcctttatcgtgatatcagactcagatggcgaggaacctaaggaggagaatggcctacaaaaaaccaagacaaagcagagcaatagagccaaatgcctggcgaaaagaaagatcgcccaaatgacagaagaagagcagttcgcgctggccttgtag

SEQ ID NO: 210526 - DNA, 474 bp, synthetic construct
  misc_feature 1..474: note = Description of Artificial Sequence: Synthetic coding sequence
  source 1..474: mol_type = other DNA
atgccccggcggaagaagaaggtgaaggaggtgagcgagagccggaatctggaaaagaaggacgtcgaaaccacatccagcgtgtccgtcaagcgaaagcggcgcctcgaagatgcctttatcgtcattagcgattccgacggggaagaacccaaggaggaaaacgggcttcaaaaaactaagacaaagcagtcaaaccgcgcaaagtgtctcgccaagcgcaaaatcgcccagatgactgaagaggagcagttcgctttggctttgaagatgtcagagcaggaagccagagaagttaattctcaagaggaggaagaagaagagttactgcgaaaagctatcgcggagagcctcaactcttgtaggcctagcgacgcctcagccacacgaagtaggcctctcgcgactgggccgagctctcagagccaccaagaaaagaccaccgactctggactcaccgagggcatctggtag

SEQ ID NO: 210527 - DNA, 2160 bp, synthetic construct
  misc_feature 1..2160: note = Description of Artificial Sequence: Synthetic coding sequence
  source 1..2160: mol_type = other DNA
atgccccggcggaagaagaaggtgaaggaggtgagcgagagccggaacttggagaagaaggacgtagaaacaacctcttccgtcagcgtgaaacggaagaggcgcctggaggacgccttcattgtgatctccgactcggacggcgaggaacccaaagaggagaatggattgcagaagacaaaaaccaaacagtccaacagggctaagtgtttggccaaacgaaaaattgcacagatgactgaggaggagcagttcgctctcgccctgaaaatgtctgagcaggaagcccgcgaagtgaattcccaggaggaggaagaggaagaactgctccgtaaagctatcgcagaatcactcaattcatgcagacctagcgacgcttctgccaccaggtctcggcctctagccactggtccaagcagccagtctcatcaggaaaaaacaacggatagcgggttaacggagggcatctggcaactggtgccgccttcactctttaaggggtcccatatcagtcagggcaacgaggccgaagagcgtgaagagccctgggatcataccgagaagacggaagaggagccagttagcggatctagtggatcctgggatcagtctagtcaacctgttttcgagaacgtgaatgtgaagtcatttgatcggtgcacgggacattccgccgagcatacccaatgtggcaagcctcaggaaagtaccggccgtggcagcgccttcctgaaggctgtgcagggctctggcgacacctctagacactgcttaccaaccctggctgatgctaaaggtctgcaagataccggcggaaccgtgaattatttctggggaatcccattttgccctgacggtgtggacccaaatcaatatactaaggtcatcttgtgtcagctcgaggtgtatcaaaaatctctgaaaatggcacaaaggcagctgctcaataagaaaggttttggagagcccgttctcccccgtccgccatcgctgatccaaaacgagtgcggccaaggtgagcaagcatctgaaaagaatgagtgcatttccgaagacatgggggatgaggataaggaagagcgccaggagagcagagcatcagattggcactccaagacgaaggattttcaggaaagtagtatcaaatccctgaaagagaaactgctcctcgaggaggagccaacaacttcccacggccagtcctcccagggaattgtggaggaaacctccgaggagggcaactccgttccagcctcacagtccgtcgccgcgttgacctccaaacgctcactggtgcttatgcccgagtcctcagccgaggagatcaccgtctgtcccgaaactcaactgtcttcaagcgagacttttgatctcgagcgcgaagtctccccaggcagtcgtgacatcttggacggcgtgcgaattattatggctgataaggaagttgggaacaaagaggacgccgagaaggaggtggccatttcgactttctcatcgagcaatcaggtttcttgcccgctatgtgaccagtgttttccccccacaaagatcgagcggcacgccatgtattgcaacgggttgatggaagaagatactgttctgacgagacggcaaaaagaagccaagacaaaatccgatagcggaacagcagctcagactagcctagacattgataaaaacgaaaaatgctacctgtgtaaaagcctggtcccatttcgagaataccagtgccacgttgacagttgcctccagctggccaaagcagatcaaggcgatggcccggagggcagcgggagagcttgttctacagtcgagggcaagtggcagcaacggctgaagaatccaaaagagaagggccatagtgagggcaggctgctcagtttcttggagcagagcgaacataaaacgagcgacgcggacatcaagtcttcggagaccggggcatttagggttcctagccccgggatggaagaggccgggtgtagccgagagatgcagtcatctttcacaaggcgcgatctgaatgagtccccggttaagtcatttgtgagcatctctgaggctaccgactgtcttgtcgacttcaaaaagcaagtaactgtgcagccaggaagcaggactaggactaaagcggggcgggggaggagacggaaattctag

SEQ ID NO: 210528 - DNA, 5250 bp, synthetic construct
  misc_feature 1..5250: note = Description of Artificial Sequence: Synthetic coding sequence
  source 1..5250: mol_type = other DNA
atggccgacgaggaggccggcggcaccgagcggatggagatcagcgctgaactgccgcagaccccacagagacttgcctcctggtgggaccaacaggttgacttttacacagccttcctgcaccatctggcccaactcgtcccggagatatattttgccgagatggacccagatctggaaaagcaagaggagtcagtacaaatgagcatcttcacccccttagagtggtatctatttggggaagacccagacatctgtcttgagaaactgaaacactctggagccttccagctctgcggccgggtgttcaaatcaggcgagacaacgtattcctgccgtgattgtgccatcgacccgacatgtgtcctgtgtatggattgcttccaagatagtgtccacaagaatcatcgctacaaaatgcacactagcacggggggggggttttgcgactgtggggatacagaagcctggaagaccggccccttttgcgtcaatcacgagccaggccgggctggaacgatcaaggaaaacagcagatgccccctgaacgaagaagtgatcgtgcaggcccggaagatcttcccctctgtcattaagtacgttgtggagatgacaatctgggaagaggagaaggaactgccaccagaacttcagatccgagagaagaacgaaaggtactactgcgtgctctttaatgatgagcaccacagttacgaccacgttatttacagcctgcaaagagctctggactgtgagcttgcagaggcgcagctgcacaccacggcaattgacaaggagggtcgtcgcgcagtcaaggcgggcgcctacgcagcatgccaagaggccaaagaggacatcaaaagccactcagaaaacgtcagtcagcacccacttcatgtagaggtactgcacagtgagatcatggcacatcaaaagtttgctctacgactgggcagttggatgaacaagataatgagttacagcagcgatttccgtcagatcttttgtcaggcctgtcttagagaggagcccgactcggagaacccctgcctcatatcgcgcctgatgctctgggatgcaaaactgtacaagggcgcaaggaagatcctacacgagttaatcttttcttctttcttcatggagatggagtacaagaagctgtttgccatggaattcgtgaaatactacaagcagctccaaaaagagtacatctctgatgatcacgatcgctccatctcaatcacagccctgagcgttcagatgttcaccgtcccgactctcgcaagacacctaattgaagagcagaacgtcatcagcgtaataaccgaaacattacttgaagtgctccctgagtatctggatcgcaacaacaagttcaattttcagggatattcccaagataagctgggcagagtgtatgccgtaatttgtgacttgaagtatatcctgatttcgaagccaaccatttggacagagagactacggatgcagttcctcgagggattccggagttttctgaaaatcttgacatgcatgcagggcatggaggagataaggaggcaggtcggtcaacatattgaggtcgacccagactgggaagcggccatcgcaatccagatgcagctgaaaaacattttacttatgttccaggaatggtgtgcttgcgatgaagaactgcttttagttgcctacaaggagtgccataaggctgtgatgcgatgctcaacatcttttattagtagtagtaaaaccgtcgtacaatcttgcggacattcacttgaaaccaaaagctatcgagtctctgaagatctggtttccattcatctgccactgtcacggactctcgcaggattgcacgttcgtttatccaggctgggtgcagtttcacgcctgcacgaattcgtgagctttgaagactttcaagttgaggtactggtcgagtaccctttgagatgcctggtgttagttgcacaggtggtcgctgagatgtggcgacggaatggcctgtcactaatatcccaggtgttctactaccaagatgtgaaatgcagggaagaaatgtacgataaggacattataatgctccagatcggcgcttcccttatggaccccaacaaatttctactgctggtccttcagcggtatgagctcgcagaggcatttaacaagaccataagcacaaaggatcaggatctcataaaacagtacaacaccctgatcgaagagatgctgcaggtgctcatttatatcgtcggagaaaggtacgtgcctggcgtgggcaatgtaacgaaggaggaggtcaccatgcgagaaatcatccatcttttgtgtatcgagcctatgcctcacagcgccattgctaaaaacctaccagaaaacgagaataacgagactggcctggaaaatgtgataaacaaagtggccacgttcaagaagccgggggttagtggccatggtgtctatgaattgaaggatgaatccctgaaggacttcaatatgtatttttatcattactccaagacccagcattctaaagccgagcatatgcaaaagaaacgaaggaagcaggaaaataaggacgaagcattgccacctccaccacctcccgagttttgccctgcctttagcaaggtgatcaacctgctgaactgcgatattatgatgtatatcctgagaacagtattcgaacgtgcaatcgacacagactccaatctgtggaccgagggaatgctgcaaatggccttccatatcttagcgctggggctgctcgaggaaaaacagcagctacagaaggcccccgaggaggaagtgacctttgatttctatcacaaggcctctcgacttggatcctcagctatgaatattcagatgctcctagaaaaactaaagggcatccctcagctggaaggccagaaagatatgattacttggattctgcagatgttcgatacagtgaagcgtctacgggaaaaaagctgcttgatcgtcgcaaccaccagcggctcggagagcatcaaaaacgatgaaattactcacgataaagagaaggctgagagaaagcgtaaagcggaggccgcccggttgcaccgccagaaaattatggcccaaatgagcgccctacagaagaatttcattgagacccacaaactcatgtatgataatacatcagagatgcctggaaaggaggattcaatcatggaggaggaatccacccctgccgtttccgattactctcgtattgcacttggtccaaagcgcgggccgtcagttaccgaaaaggaagttctgacatgtattctttgccaagaggagcaggaggttaagatcgagaacaacgccatggtcttgtcggcttgcgtccaaaaatctacagccctgactcagcacaggggcaagccaatcgagctcagcggtgaggcattggatcccctctttatggaccccgacctggcctatggaacctatacaggatcctgcggacatgtaatgcacgctgtgtgctggcagaaatactttgaggccgtgcagctgtcatcccagcaacgaattcacgtggacctgttcgacttagagagcggcgaatatctgtgcccactgtgtaagagtctctgtaacactgtgatccccataattccactccagccccagaaaattaactcagagaatgccgacgcactggcacagctgctaactttagctcgatggatccagaccgttttagccagaatctctggctataacattcgtcacgctaaaggagagaatcctatccccattttctttaaccagggaatgggtgattcgactctggagttccactctatcctgagcttcggcgtggaatcaagcattaaatattcgaattctatcaaagaaatggtgatcctcttcgctacgaccatctaccggatcggcttgaaagtgccccccgatgagagagatccgagagtgcccatgttaacctggagtacatgcgctttcaccattcaagccattgagaatctgcttggagatgagggtaagcctctgttcggagcccttcagaatcgccagcataacggcctgaaggcactcatgcagttcgccgtggcacagagaatcacttgcccccaagtgcttattcaaaagcatctcgtgagacttctgtctgtcgtactgccaaacatcaaatctgaggacacgccatgcctgctgagtatcgacctttttcacgtgctcgtgggcgccgtattagcattcccttccctgtactgggatgacccggtggacctgcagccatcctcagtgagtagcagctacaaccacctctacctttttcatctgattacaatggcccatatgctacagattctgttgacagtggacactggactgcccttagctcaggtgcaggaagactcagaggaagcacacagcgcctccagcttttttgcagagatctctcagtatactagtggatccattgggtgcgatatccctggctggtacctgtgggtgagtctcaaaaacggcatcactccttatctaagatgtgccgctctcttctttcactacctcttgggtgtgactcctcctgaggaattgcatacaaatagcgccgagggtgaatactctgccctgtgctcatacttaagcctccccaccaatctgttcctcctattccaagaatactgggatacagtacgtccgctactgcaaagatggtgtgccgaccccgccctgctgaattgcctcaagcaaaagaacaccgtggtccgctacccccgtaaaaggaactcattaattgagctgccagacgattattcctgcctgttaaatcaagcaagtcacttccggtgccctcgctccgccgacgatgagcgcaagcaccccgtactctgcctgttctgcggagctattctctgtagtcagaacatctgttgccaggagatagtgaacggagaagaggttggggcgtgtattttccacgcgctgcattgtggagctggagtttgtatcttcctgaagatcagggagtgtagagtggtgcttgtggagggtaaagcgcgcggatgtgcttacccagccccctatctggacgagtatggtgagacagacccaggactgaagcgggggaaccccctgcacttatcacgggaaaggtaccgcaagcttcatctcgtgtggcagcagcactgcatcatcgaagaaattgcaagaagtcaggagaccaaccagatgctgtttggattcaattggcagctgctgtag

SEQ ID NO: 210529 - DNA, 2412 bp, synthetic construct
  misc_feature 1..2412: note = Description of Artificial Sequence: Synthetic coding sequence
  source 1..2412: mol_type = other DNA
atggccgacgaggaggccggcggcaccgagcggatggagatcagcgctgagttgcctcagacgccgcagagacttgcgtcttggtgggaccagcaggtggatttttatacagctttccttcatcatctcgcccagcttgtgccagagatatacttcgccgagatggacccagacctggagaagcaggaggagagcgttcagatgagtatatttactccgctcgaatggtatttgtttggcgaggaccctgacatttgcctggagaagcttaagcattctggagcgttccaactgtgcggccgggtattcaagagtggcgaaacgacttacagctgtcgcgactgtgcaatcgacccaacctgcgtgctatgtatggactgtttccaggacagtgtgcacaaaaatcaccgatacaaaatgcatacgagtacagggggtggtttttgcgactgcggagatacagaagcatggaaaacaggacctttttgtgtgaatcacgagccaggtcgcgcgggaaccattaaagagaacagccgctgccctctgaacgaagaggtgatagtacaggctaggaaaattttcccttcagtgatcaagtatgtagtggaaatgaccatttgggaggaggaaaaggaacttccccctgagcttcagattcgcgagaaaaacgagagatactactgcgtattgtttaacgatgagcatcattcctatgaccatgttatctattccctgcagcgcgccttagactgcgaactggccgaggcccagctgcacacgacagcaatagacaaagaaggcaggagggctgttaaggcaggggcctatgcggcatgccaagaagctaaggaagatatcaagtcccatagcgaaaacgtctcccagcacccactacacgtagaggtcctgcactcagagatcatggctcaccagaaattcgcattacgtctaggctcctggatgaacaagattatgtcatattccagcgattttagacagatcttttgccaggcctgtctccgtgaggagcctgactcagagaacccctgcctgatctctcggttgatgctgtgggatgccaagctgtacaaaggtgcgcggaagattctgcacgaactaatcttcagcagctttttcatggagatggagtataaaaagctgtttgcgatggaattcgtgaagtactataaacagcttcaaaaagagtatatatcagacgaccatgatcgctccatatcaattacagcactgtccgtgcagatgttcactgtgccaacacttgcgcggcacttaatcgaagaacagaacgtgatcagtgtcatcacagaaacgctgctggaggtgctgcccgagtatttggataggaataataagttcaattttcaggggtattcccaagacaaactgggccgggtgtatgcagttatatgtgacctcaagtacattctaattagcaaaccaactatttggactgagaggctcaggatgcagttcctagaggggtttagatcattcctcaaaatcctaacgtgtatgcagggaatggaagagataaggcgacaagttgggcagcacattgaggttgaccctgattgggaggcagccattgctattcagatgcaactgaagaatattttgttaatgttccaggagtggtgcgcgtgtgacgaggagcttctcctggtcgcctacaaagagtgtcataaggccgtgatgcgctgcagcacctcattcatatcctctagcaagactgtggtccaaagctgcgggcactctctagagaccaaaagttatcgggtcagcgaggatcttgttagtattcatctgcccctgtcccgtactttggccggcctccacgtgaggttgagtagactaggggcagtatcacggctgcatgagttcgtctcctttgaagactttcaggtagaagtcttggtggagtatcctctccgctgcttggtgttagtggcccaagtcgtagctgagatgtggcggcgcaatggcctatcgttaatcagccaggtgttttattatcaggatgtgaagtgcagggaagaaatgtatgataaggacattattatgctgcagatcggagcttctctgatggaccctaataaattcctcctccttgtgttgcaaaggtatgagcttgcagaggccttcaataagacgataagcacaaaagaccaagaccttataaaacaatacaataccctgatcgaggaaatgcttcaggtgcttatctatatagtgggcgaacgctacgtccccggcgtgggtaatgtgacaaaggaagaagtgacaatgcgggagatcattcatctgctgtgcattgaacctatgccccattcagccattgcgaagaatctccccgagaatgagacacgctgtatcaggccctggtctctgtag

SEQ ID NO: 210530 - DNA, 3042 bp, synthetic construct
  misc_feature 1..3042: note = Description of Artificial Sequence: Synthetic coding sequence
  source 1..3042: mol_type = other DNA
atggccgacgaggaggccggcggcaccgagcggatggagatcagcgctgagctgccccagactccccagaggttagcttcctggtgggatcagcaggtagacttctatacagcgttccttcaccaccttgcccagctggtccccgagatctatttcgcagagatggatccagatctggagaagcaagaggaatcagtgcagatgtccatttttactcccctggaatggtacctcttcggggaagaccccgacatctgcctggagaagctgaaacattctggagccttccaactctgcgggagggtgtttaaatccggtgagacgacctattcatgcagggactgcgccatcgatccaacctgcgtcctatgtatggactgtttccaagatagtgtacacaaaaatcaccgatataagatgcacacatcgacaggtggcgggttctgtgattgcggcgataccgaggcgtggaagacgggacctttctgcgttaaccacgaacctgggcgagcaggtacaatcaaggagaacagtcgctgccctctaaacgaagaggtgattgttcaggctaggaagattttcccttctgtgatcaaatatgtggtggagatgaccatatgggaagaggagaaagaattacccccagagctgcagattcgggagaaaaacgaaaggtactattgcgttctgtttaatgatgagcatcattcttacgaccatgtgatctattcactccagcgcgcactggactgtgaattggccgaggcgcagctgcacacaacggctatcgacaaagagggtaggcgtgccgtcaaggcaggggcctatgcggcctgccaggaagccaaagaggatattaaatcacattctgaaaacgtcagccagcacccgttgcacgttgaggtgctgcatagcgaaattatggcccatcagaaattcgctctgcggctcggaagttggatgaataaaatcatgtcatattcttccgatttccgccagatattctgtcaggcctgcctccgggaggaacctgatagcgaaaacccctgcctcatcagcagactgatgctctgggatgccaagctgtacaaaggcgccaggaaaatcctgcatgagttaattttttcttccttcttcatggaaatggaatacaagaagctattcgctatggagtttgtgaagtactataagcagctgcagaaagagtatattagcgacgaccacgatcgatctattagcatcacagctctgtcggtacagatgtttaccgtacccacactggccagacacctcattgaggagcagaacgtcatctccgtgatcacagagacattgctggaagtcttgccagagtatctggataggaataataagttcaactttcagggttatagtcaggataaactgggaagagtttatgctgtcatatgcgatctgaagtacattctgatctctaaaccaactatatggaccgagaggctccgaatgcagttcctggagggttttcggagctttctgaagattctgacgtgtatgcagggtatggaagagattagacggcaggtcggacagcacatcgaagtggatccagactgggaggcggccatcgctatccagatgcagctgaagaacattctgctgatgttccaggaatggtgcgcctgtgacgaggaattgctgctcgttgcatataaggagtgtcacaaagctgtgatgcgctgtagtacctcttttatcagctcctcgaaaaccgtcgtacagtcttgtggacatagtttagagacgaaaagctatcgcgtgtccgaagatctcgtttccatccacctgccattgtccaggacactggcagggcttcacgtcagattgtctcgactcggtgcagtgtcaagactccatgagttcgtgagttttgaggactttcaggtagaagtgctggtggagtacccacttcgctgtctcgtgcttgtggcccaggtcgtcgccgaaatgtggcgccgtaacggactgtcgctgatctctcaggtgttctactaccaagatgttaagtgtcgagaagagatgtatgacaaagacattataatgctccagatcggcgcaagtctgatggaccccaacaaatttttacttcttgtgcttcagaggtatgaactcgctgaggctttcaacaaaaccatctccaccaaggatcaggaccttatcaaacagtataatacgcttattgaggaaatgctccaggtgttgatttacatcgtcggggagaggtatgtaccaggagttggcaatgtgaccaaggaagaggtaaccatgagagagattatacatctgctgtgtattgagccaatgccacattccgctattgccaagaatttgcccgagaatgagaataacgaaacaggtctcgagaacgtaatcaataaggtggccaccttcaagaagccaggcgtgagcggccacggtgtgtacgagctcaaagacgagagtctgaaggattttaacatgtacttctaccattatagcaagacccagcactcaaaggcggagcacatgcagaagaagaggcgaaaacaagagaataaggacgaggctctgccaccccccccacccccggaattttgcccagcttttagtaaggtgataaacttgctcaattgtgatattatgatgtatatactgcgcacagttttcgagcgcgcaatagataccgacagcaacctctggacagagggtatgctccagatggcatttcatattctcgctttagggttactcgaagagaaacaacagctgcagaaagctcccgaggaggaggttacctttgatttctaccataaagcgtcccgactgggcagctctgccatgaacattcaaatgctcctcgaaaagctgaaggggataccgcagctcgagggccagaaagatatgattacttggatcttgcagatgttcgatacggtgaagcggcttagagagaagtcatgtttgatagtcgcaacgacatccggctcggaatccattaaaaatgacgagattttacaccattag

SEQ ID NO: 210531 - DNA, 1728 bp, synthetic construct
  misc_feature 1..1728: note = Description of Artificial Sequence: Synthetic coding sequence
  source 1..1728: mol_type = other DNA
atgtacgccggcaacatccccatctacaagaccgagagccggagcagaaacgagcaaggaatggatcccatcaccaggcaggtcggccaacatattgagatggaacctgagtgggaagcggctttcactctgcagatgaaactgacccatgtgattagcatgatgcaggactggtgtgcgtcagacgagaaagtgcttattgaggcatataaaaagtgtctggcagttctgatgcagtgccatggtgggtatacggacggcgaacagcccattactctgtctatctgtggccattcggtagagacaatacgctactgcgttagtcaggagaaagtgagcattcacctgcccgtcagcagattgctggcaggcctgcacgtgcttctcagcaagagcgaagtggcctataaatttcctgaactgctgccactgtcagaattgtccccgccaatgctaatcgagcaccctttgcggtgccttgttctatgtgcccaggtgcatgctggcatgtggagacgcaatggattttctctggtgaaccagatctactactaccacaacgttaagtgcagacgggaaatgtttgacaaggatgtagtgatgctgcagactggagtgagcatgatggaccccaatcatttcctgatgataatgctatctagatttgaactataccagatcttttccacacccgattacggaaaacgcttttcttcggagatcacccacaaagatgtcgttcaacaaaacaatacacttatcgaagaaatgttgtacctgattatcatgttagtgggcgaacgattttcacccggcgtagggcaggtgaacgctactgatgaaattaagcgagaaatcattcaccaattgagcattaagccaatggcacatagcgaactcgtaaagtccctgccagaggatgagaacaaagaaactggcatggaaagtgtaattgaagccgtggcgcacttcaagaaacccgggcttaccggccggggcatgtatgaactcaaacccgagtgcgcaaaggaatttaacttgtacttttatcatttcagtagagctgagcaatcaaaagcggaagaggctcagcggaagctgaaacgccagaatagggaggacaccgcactgccaccccctgttcttccccctttctgccccctctttgcttcactggtgaatatcctccagtcagacgtgatgctttgcatcatgggcacaattctgcagtgggctgtggagcataacgggtatgcatggtctgagagcatgcttcagcgcgtgcttcatctcattggaatggccctgcaagaagagaaacagcatctggaaaacgtgacagaagagcacgtagtgacatttactttcacccagaaaatttccaagccaggagaggctcctaagaactccccctcaattctcgcaatgctggagaccctacagaacgctccataccttgaagtacacaaggatatgattcggtggatactcaaaactttcaatgccgtcaaaaaaatgcgtgaatcctcgcctacaagtcctgttgctgaaacagaagggactatcatggaagagcacaattttcgagtgcagggcactaaaaccaaactgcgaggaagggagaagcaaagactgcccgactgtgcagaaaaaaggtcctggttgcgctgcctgaaatgcagcggaatcctgctaatgaaaactaagaacagttttagccggcattag

SEQ ID NO: 210532 - DNA, 5268 bp, synthetic construct
  misc_feature 1..5268: note = Description of Artificial Sequence: Synthetic coding sequence
  source 1..5268: mol_type = other DNA
atggccagcgagctggagcccgaggtgcaggccatcgaccggagcctgctggagtgttccgcagaagaaatcgcaggaaaatggctccaggccactgatttaactagggaagtgtatcaacatctggcacattacgtacctaagatctactgccgagggccaaatccctttccgcagaaagaggacatgttggctcaacacgtgctgttaggcccaatggagtggtacctgtgtggagaggacccagcctttggcttcccaaaacttgagcaggccaacaagccttcccatctgtgcggtcgagtgttcaaggtgggcgagcccacatattcttgcagagactgcgccgtagaccccacatgtgtattgtgcatggaatgctttctcggatcgattcaccgagaccacagatatcgaatgacaacatccggtgggggcgggttctgcgactgtggtgacactgaggcctggaaagaaggtccttactgccagaaacacgagctcaacaccagtgagatcgaggaagaagaggaccctctcgtccacctttccgaggatgtgattgcaagaacatacaatatttttgccatcaccttcagatacgccgtcgagattctcacatgggagaaggagagtgagctccctgcagaccttgagatggttgagaaatcggacacctactactgcatgttattcaatgacgaagtgcacacttatgaacaagtgatatacactttgcagaaggcagtgaactgtacccaaaaagaggctataggtttcgcaaccaccgtcgatagagacgggcggagatccgtacggtatggcgatttccagtactgtgagcaggctaaatctgtgatagtcagaaatacaagtcggcaaactaaaccgctgaaggtgcaggttatgcactcttctattgtggcccatcagaattttggtctcaaattgctctcctggctcggctccataataggatactccgacggactgagaagaatcctatgccaggtcggcttacaggagggacctgatggagagaattcctcacttgtcgatcgcctcatgctctcggacagtaaactctggaagggggctcggtcagtgtatcaccagctgtttatgtcaagtcttctgatggacctgaagtataagaagctattcgcggtccgcttcgcaaagaattaccagcagttacagcgggacttcatggaggatgatcacgagagagccgtgagtgtgaccgcgctcagtgtgcagttctttacagcaccaacgttggcacgcatgctgatcaccgaggaaaatctaatgtccatcatcatcaagaccttcatggaccatctgcgccatcgtgacgcccaggggcggttccagttcgaaaggtatacagctctgcaggcctttaagttccggcgcgtacagtcactcatcctggacctgaagtatgttctaatcagcaaacccaccgaatggtcagacgagctgcggcagaaatttctggagggctttgatgcgttccttgaattactgaagtgcatgcagggtatggacccaattaccaggcaggttggccagcacatcgagatggagccagaatgggaggccgcttttaccctccagatgaagttgacgcatgtgatctccatgatgcaggattggtgtgcttctgacgagaaggtccttattgaggcatacaaaaagtgtcttgcggtgctgatgcagtgccacggtgggtacacggacggagaacagccaatcaccctgtccatttgcggacatagtgtggagacaatccgctactgtgtgagtcaggagaaagtgtctatacacctgcctgtcagtcgcctcctggcaggcctgcacgtgctgttaagcaagtcagaggtggcctacaaatttcctgagctactcccgctgtccgagctcagtccccccatgctcatcgaacatccgctcaggtgtctggtgctgtgcgcccaggtacacgctgggatgtggcgacgcaatggcttttcactggtcaatcaaatatactactaccataatgtcaaatgtagaagggagatgtttgacaaagacgtggtgatgctgcaaacaggtgtaagcatgatggaccctaaccatttcctgatgatcatgctgtctcgcttcgaattgtatcagatttttagcacaccggattacggaaagcgattcagcagtgaaattacccataaggatgtcgtgcagcagaataacacactcattgaggagatgctttatctaattataatgctcgttggcgagcgcttctcaccaggagtcggccaggtgaatgccacagatgaaatcaagagggagattatccaccaactgagtatcaagccaatggcccatagtgaacttgtcaaaagcttaccagaggatgagaataaggaaaccgggatggagagcgtcattgaggcagtggcgcacttcaagaagccaggcttaactggaagaggaatgtatgaacttaagccagagtgcgcaaaagagtttaacctttatttctaccacttttcccgggccgagcaaagcaaagccgaggaggcccagcggaaattgaaacggcagaacagggaggatactgccctgcccccacctgtgctgcctccattttgtccgctgttcgcgtctctggttaatattctccagagcgatgtgatgctctgtattatggggactatcctacaatgggccgtggaacataacgggtacgcctggtcggagtccatgcttcaaagggtgctgcacctcatcggaatggctctccaggaggagaagcaacatttggagaatgtgaccgaagagcacgtggtgacattcactttcacccagaagatttctaagcctggtgaagcaccaaaaaatagtccaagcattctggccatgctggagacactgcagaatgctccataccttgaagtgcataaggacatgatccggtggattctgaagacattcaacgctgttaaaaagatgagggagtcctcaccgacctctccggtcgcagaaaccgaaggcactatcatggaggaaagttcccgggataaagacaaggccgagcgaaagaggaaggctgagatcgcccggctgaggcgggagaagataatggcccagatgtcagaaatgcaacgccattttatcgacgaaaacaaggagctgttccagcagaccctcgagctggatgcatccaccagtgcagtgctggaccacagccctgtggcatcagacatgaccctgaccgccctaggccctgctcaaacccaagtacccgaacaacggcagttcgttacgtgcatcctgtgccaggaggagcaggaggtcaaggtggaatctcgtgccatggtcctcgccgcctttgtgcagagatctaccgtgttgtccaagaaccgcagcaaattcatacaggacccagagaagtacgatccattgtttatgcacccggacctctcgtgtggaacccacacatcatcctgtggacatattatgcacgcccactgttggcaacggtactttgactcagtccaggccaaggaacagagacgacagcagcgcctacgcttacacacaagctacgacgtcgaaaatggtgagtttctttgccccctgtgcgagtgtttgtcaaataccgtcattccactgttgctgccccctcgaaacatttttaataatcggctaaacttctctgatcagccaaacctgacacagtggattcgcaccatctcccagcagatcaaggcactgcagtttttacgaaaagaagaatcaactcccaacaacgcctccacaaagaattccgagaatgtggacgaacttcagctgccagaaggatttcgtcctgattttaggcccaagattccttacagtgagtctatcaaggaaatgctcaccaccttcggaacggctacatataaagttggccttaaagtccatccaaatgaggaggatccacgagtccctataatgtgttgggggtcctgtgcttacactatacagtcaattgagcggatactctccgacgaggataaaccgctctttggcccactcccttgccgactggacgattgtctcagaagtttaactagatttgccgccgcccactggactgtggccagtgtatccgtggtacagggccacttctgtaaactgtttgctagtctggtccctaacgacagccacgaggagctcccttgcatattagatattgacatgttccacctgctggtagggctggtgctggctttccctgcgctccagtgtcaggatttcagcggcatttctctgggcacaggagacctccatattttccatctggtcactatggcccacattattcagattctcttaacaagctgtactgaagagaatggcatggaccaggagaacccgccttgcgaagaagaaagcgccgtcttggccctgtacaaaactctacatcaatacactggttctgctcttaaagagatcccttctggatggcacctgtggcgaagtgttcgtgccgggataatgccatttctgaagtgttccgctctgttctttcactacctgaatggcgtccccagtcctcccgacatccaggtacccggaacctcccattttgagcatctgtgcagctacctgagcctccccaataacttgatctgcctgtttcaggagaactctgagataatgaattctctgatcgagtcatggtgccggaattctgaagttaagaggtatcttgagggcgagcgtgacgcgattaggtatcctcgtgagtcaaataaactgatcaacctccctgaggattactccagtctcatcaaccaagcatcaaatttcagttgtccaaagtccgggggcgacaaatctagagcaccaactctgtgcctggtatgtggcagtctcctttgctcccagtcttactgctgccaaacagaattggagggcgaggatgtcggagcctgtaccgcacatacatatagttgcggaagtggggtgggcatctttctgcgtgtgcgagagtgccaggtgcttttcctggcgggaaaaacaaaggggtgtttttacagccctccctacctggatgactacggggaaacagaccagggtcttcgacgaggaaacccgctgcatctatgcaaggagcggttcaagaaaattcaaaagctctggcatcaacactctgtgactgaggagatcggacacgcccaagaagctaatcagaccttggtgggtatagattggcagcacctgtag

SEQ ID NO: 210533 - DNA, 5268 bp, synthetic construct
  misc_feature 1..5268: note = Description of Artificial Sequence: Synthetic coding sequence
  source 1..5268: mol_type = other DNA
atggccagcgagctggagcccgaggtgcaggccatcgaccggagcctcctcgagtgtagcgccgaggagattgcagggaagtggcttcaggccactgatctcactagggaagtgtaccaacacctggcccattatgtgccaaagatctattgccgcggcccaaatccctttcctcagaaggaagatatgctggctcagcatgtgttactgggcccaatggagtggtacctctgcggggaggacccagcttttgggtttcccaagcttgagcaggccaacaagccgagtcatctgtgtggaagggtgttcaaggtgggcgaacccacgtattcttgccgtgactgcgctgtggatccgacctgtgttctatgcatggagtgtttcctcgggtctattcacagggaccatcggtatcgtatgaccacctccgggggtggcggcttttgcgactgtggcgacaccgaagcctggaaagagggcccatattgccaaaaacatgagctgaacactagcgaaatagaagaggaagaggacccattggtccacctgagcgaggatgtgatcgcccggacatacaacatcttcgcgattacatttaggtacgcagtagaaatcctcacatgggagaaagaaagtgagttacctgcggacttggaaatggttgagaagagtgatacctactattgcatgcttttcaatgatgaagtacacacttatgaacaggtgatttataccctgcaaaaagccgtcaattgcactcagaaagaagccatcgggttcgccaccactgtggacagagacggccgacggagtgtgaggtatggggattttcagtattgtgagcaggccaaaagcgtcattgtgcggaacacctccaggcaaaccaagcctctgaaggtccaagtcatgcattcctcaattgtggcccatcagaattttgggctgaagctcctgtcctggttggggtccattattgggtactccgacggtctgcggcgaatcctgtgtcaggtgggacttcaggagggcccggacggggagaatagcagcctggtcgaccgccttatgctcagtgattctaaactttggaaaggcgctagatccgtctaccaccagttgttcatgagttcactcctgatggacttgaaatataagaagttgtttgcagtgagatttgccaagaactacgaaaggttacaatccgactacgtaacagacgaccacgatagagaatttagcgttgctgatttgagcgttcagatatttaccgtgccatctcttgcaagaatgctgattacagaagagaatttgatgagtatcattataaagaccttcatggaccacctacgccaccgggacgctcaggggaggttccagtttgagcgctacacagcactgcaggccttcaaatttagacgggtgcaaagcctgatactggacttgaagtatgtcctgatctctaaaccaactgagtggtccgatgagctgaggcagaagttcttagagggcttcgacgcctttcttgaactgctgaagtgcatgcagggcatggacccgatcacgcgccaggtgggccagcacattgaaatggagcccgagtgggaagctgcatttaccctccaaatgaaacttactcatgtgatctccatgatgcaagattggtgtgctagtgacgaaaaagtattgatcgaggcctataaaaagtgtttggcagttttgatgcaatgtcatggtggctatactgacggggagcagccaattaccctgtctatttgcggtcactctgtggagaccattagatattgcgtatcccaggagaaagtgagcatacatctaccggtctcccggctcctagctgggctgcacgtgttactttcaaagagcgaagtggcctataaattccccgagctcttgcctttatcggaactgtctccacctatgctgatcgaacacccacttcgctgcctggtgctctgcgcccaagtgcacgctggaatgtggaggagaaacgggttctccctcgtgaatcagatctactactaccataatgttaaatgtcgtcgggagatgtttgacaaggacgttgttatgctccagacgggcgtgagcatgatggaccctaaccatttccttatgatcatgctctctagattcgagttgtatcagatatttagcacacctgattatggaaagcggttcagctccgagataacacataaagacgtggtccagcagaacaacaccttaattgaagagatgctgtatctgatcataatgttggtgggagaaaggtttagtcctggggtaggtcaggtgaacgccaccgacgagatcaaacgagaaattatccatcagttatcaataaaaccgatggcgcatagtgaattagttaagagcctgcccgaggatgaaaataaagagacaggcatggagagcgttattgaagctgttgctcactttaagaagcctgggctgaccggccgtggaatgtacgaattaaaacctgaatgcgctaaagagtttaacttatacttctaccacttcagtcgagctgagcaatctaaagcagaggaagcccagagaaagctcaaacgccagaatcgagaggacactgctctccccccccccgtgctgcctcccttttgtccgttattcgcctccctggtgaacatcctgcagtccgatgtgatgctgtgcattatgggaacaatcctccagtgggcagtggagcataacggctacgcatggagtgagagtatgctgcagcgggttctacacctgattgggatggctctccaggaggagaaacagcacctcgaaaatgttacggaagaacatgtcgtgacttttacattcacccagaagatctccaagccaggggaggctcctaagaactcacccagcatcctagctatgctggagaccctccagaacgctccgtacttggaggtgcacaaagatatgatcagatggatccttaaaacgtttaatgcagttaagaaaatgagggaatcctcccctaccagtcccgttgcagagaccgagggcacaatcatggaagaaagttctcgagataaagacaaggccgaacgcaagaggaaagccgaaatagcaagactcaggagggaaaaaatcatggcccagatgagcgaaatgcagagacacttcatcgacgagaataaagaactcttccaacagacactggaactggatgcttccacctccgccgtgctcgaccattcccctgtcgcttccgatatgacactcactgccctcggacccgcccaaacccaggtgcctgagcagcggcaattcgtcacctgtattttgtgccaggaggaacaagaggtaaaggttgagagcagggcaatggttcttgcagcattcgtacagagatcaacagtgctgagtaagaaccggtccaagttcattcaggatccagagaagtatgacccgctgttcatgcatccagacctcagctgtggcacgcacacaagctcttgtggccatattatgcatgctcattgttggcagagatacttcgactccgttcaggcgaaggagcagaggcgtcagcaacgcctacgcctgcatacttcttatgatgtggaaaatggggaatttctttgccctttatgcgagtgcctgtccaacacggtaatcccactcctgctgccgcctcgaaacatctttaacaatcgcctgaacttcagtgaccagcctaatctcacccagtggatcaggaccatcagccagcaaattaaagccttgcagttccttcggaaggaagagtcaacacccaacaacgcctctactaagaattctgagaacgtcgacgaactccagctccctgaaggcttccgcccagatttccgacctaagattccgtactccgaaagcattaaggaaatgcttaccaccttcggaaccgcaacatataaggtcggcctgaaggttcatcccaacgaggaggatccacgcgtccctattatgtgttggggttcttgcgcatacaccatccagagcatcgaacgcatccttagcgatgaagataagcccctcttcgggccgctaccttgccgactggacgactgtctgcggtccctaactagattcgcggctgcccactggaccgtggcgtccgtttccgtcgtgcagggacacttttgcaaactctttgcatcgctcgtgccaaacgactcccacgaagaattgccctgtatcctggacatcgacatgttccatttattagtggggctggtgctggcctttccagctctccagtgccaggacttttctggaatttccctgggaactggcgatcttcacatcttccacctcgtaaccatggctcatatcatacagatcctcctgaccagttgtaccgaagagaacggaatggatcaggagaatcccccatgcgaagaagagtccgcagtgttggccttatacaagactctgcatcaatataccggttccgcccttaaagaaatccccagcggatggcatttatggaggtcagtgagagccggcatcatgccctttctgaaatgtagcgcactcttctttcactacctgaatggtgtaccatcacctcctgatatccaagttccaggcacatcgcacttcgagcatctatgctcctatctgtctttgcccaataacctgatatgcttattccaggagaattccgaaattatgaactccctgattgaatcatggtgccggaattcggaggtgaaacgatatctagagggagaaagggacgctatccgctatcccagggagagcaacaagctgataaatctgccggaggactatagctcgttaatcaaccaagcatccaacttcagttgtcccaagtctggcggggacaagtctagagcacccaccctctgtctcgtgtgcggatctcttctttgcagtcagtcctactgttgccaaaccgaattggagggagaagatgtgggagcctgtactgcgcacacttattcctgcggtagtggggtcggaatctttctacgggtgcgagagtgccaagtcctttttttggctggaaaaacaaagggctgcttctactcgcccccctaccttgatgattatggcgaaacagaccagggcttaaggaggggcaatcccttgcacctgtgtaaagagcgcttcaagaaaatccagaaattatggcatcagcacagcgtaacagaagaaattggccacgcgcaagaggccaatcaaaccttggtcggcatcgactggcagcacctatag

SEQ ID NO: 210534 - DNA, 1320 bp, synthetic construct
  misc_feature 1..1320: note = Description of Artificial Sequence: Synthetic coding sequence
  source 1..1320: mol_type = other DNA
atggccagcgagctggagcccgaggtgcaggccatcgaccggagcctcctcgagtgtagtgctgaggagatcgccgggaaatggctccaagccaccgacctgacacgagaagtgtaccaacacctggcccattacgtcccaaagatctattgtaggggcccaaacccattcccccagaaagaagatatgctggcgcagcatgtgttgttaggaccaatggaatggtatctgtgtggggaggatcctgcgttcggcttccctaaactggagcaggctaacaagccttcccacttatgtgggagggtcttcaaggtgggggaacctacatacagctgtagggattgtgcggttgacccgacatgcgtcctatgcatggaatgttttctggggtcaattcaccgggaccatcggtatcgaatgacaacctccgggggcggtggcttttgtgactgcggcgatacagaggcatggaaagaggggccttattgccagaagcacgagctgaacacctcagagatcgaagaagaagaagatccactcgtgcatttgtctgaggatgttatcgcacgaacttataacatctttgcgataaccttcagatacgccgtagagatcctgacttgggaaaaggaatccgaattacctgctgatctcgagatggtggagaaatctgacacttactactgcatgctctttaacgatgaggtgcacacatacgagcaggtgatctatacactccaaaaggcagtgaattgcacccagaaggaggctattggcttcgcaacaaccgtagaccgggatggccgcaggagtgtcaggtacggagacttccaatactgtgaacaagcaaaatcagtaatagtgaggaatacgtctaggcagacaaaacccctgaaggtgcaggtgatgcactccagcatagtggcacaccagaacttcgggctgaagctgctctcttggctggggtccataatcggatatagcgatggcttgcggcgcattctgtgtcaagtcggattacaagagggtcctgacggcgagaattcctccttggttgaccgcctgatgctgagtgactctaagctgtggaaaggagctagatcagtttaccatcagttattcatgagctctctgctgatggaccttaagtataagaaactttttgccgtccgattcgccaaaaactacgaacgactccagtctgattacgtgaccgatgaccatgaccgcgagttcagtgttgctgacctgtcagtccagatattcacagtccccagtcttttttccatatccgcgggcagatccgggtcacctctgtag

SEQ ID NO: 210535 - DNA, 5667 bp, synthetic construct
  misc_feature 1..5667: note = Description of Artificial Sequence: Synthetic coding sequence
  source 1..5667: mol_type = other DNA
atggccgccgccgccgccgccgccgtgggcggccagcagcccagccaaccggagctcccagcgcccgggctggcacttgacaaagctgcgacggctgctcacctgaaggctgccctgagcaggccagataatcgtgcgggcgctgaagagctgcaggccctcctagagcgagttctcagcgcagagcgacctctggcggcagccgccggaggagaagacgctgcggcggccggcggcggtgggggcccaggggccgcggaggaggaggccctggaatggtgtaagtgtctgctcgctgggggcggaggctacgacgaattctgcgctgcggttcgcgcttacgatcctgcagctctctgtggcttggtctggaccgcaaattttgttgcgtaccgatgcagaacttgtggtatcagcccatgtatgtccctgtgtgcggaatgcttccatcagggcgatcatactggtcacgatttcaacatgttccgctcacaagctgggggggcctgcgactgtggggatagtaatgtgatgagggagagtggcttttgtaaaagacaccagattaagagttcctcgaacatcccatgcgtgccgaaggacctcctgatgatgtccgagttcgttctgcccaggtttattttttgcctgatccaatacttgagagagggctacaacgagccagcagccgatgggcccagcgaaaaggatctgaacaaagttttacagctgttggaaccccagatcagtttccttgaagacttgacgaagatggggggcgctatgcgctctgtcttgacacaagtgctgacaaaccaacagaattacaaagacctcacatctggcctgggggaaaatgcatgtgtcaagaaaagtcacgagaaatatcttatcgcccttaagtcctccggccttacctacccagaggataagttggtgtacggggtgcaagagccgtcagccgggacctcatccctggctgttcagggcttcatcggtgcaacagggacgctagggcaagttgattcttctgacgaggatgatcaagatggctcccagggtctgggaaagcggaagagggtcaagctgagtagcgggaccaaagatcagtccattatggacgtcctgaagcataaaagctttcttgaggagcttctgttctggacgatcaagtacgagttccctcaaaagatggtaacctttctcctcaatatgcttcccgaccaagagtataaggtggcatttaccaagactttcgtgcaacactacgcttttatcatgaaaactcttaaaaagtcccatgagtcagatacgatgtcgaacaggattgtgcacatcagcgtacaactgttctccaatgaggagctcgcacgccaggtcacagaggaatgccaacttctggatatcatggtgactgttctattgtacatgatggaatcctgtctcatcaagagcgaactgcaggacgaggagaacagcctccatgtggtggttaattgtggtgaggctctgctcaagaataatacctactggcctctcgtctcggacttcattaacattctctcacatcaaagtgttgccaagcgcttcctagaggatcacggcctgctagtcacttggatgaattttgtgtcatttttccagggtatgaacttgaacaagagagagctcaacgagcatgttgagtttgagtcacagacctattacgcggctttcgccgccgagttggaagcctgcgctcagccaatgtggggcctactgtcacactgcaaagtccgcgaaactcaggaatacactcgcaacgtggtgcggtactgtctggaagctctccaagattggttcgatgccatcaacttcgtggatgaaccagcccccaatcaggttacatttcacctgcccttgcaccgctattatgctatgtttctgagcaaggcagtaaaatgccaggagttagacctcgattccgtgctcccagatcaggagatgctgatgaaactcatgatccatccgttgcagatccaggccagcctggcagagatccactccaatatgtgggtaaggaatggactgcagattaaggggcaggcaatgacttatgtccagtcgcacttttgtaattctatgatcgaccctgacatttacctgctgcaggtgtgcgcgtcaaggctggatccggattactttatttctagcgtcttcgaacggtttaaggtggtggacctgctgactatggccagccagcaccaaaacacagtcctcgacgcagaacacgagagatccatgctggagggcgcactgacattcctggtcatcttgctgtcgctgaggttgcacctgggcatgtccgatgacgagattttgcgcgccgagatggtggcacagctttgcatgaatgataggacacacagttcgctcctggatcttatccccgaaaaccctaatcccaaatctggcatcatccctggcagttactctttcgaatcggtcctgagtgctgtggcagatttcaaggcccccgtgtttgagcctggggggagcatgcaacaaggaatgtatacaccaaaagccgaagtatgggatcaggagtttgacccagtgatggtgatcctacggacagtgtatcgtcgggatgtgcagagcgcaatggataggtacactgccttcctgaagcagtctggcaagttcccaggtaatccctggcccccttacaagaagcggactagcctgcaccctagctacaaaggactgatgagacttctgcactgcaagacccttcacatcgtcctgttcacactgctctataaaatactgatggatcatcagaacctctctgaacacgtactctgtatggttctgtatctgattgagctcggtttggagaactctgcagaggaggaatcagacgaagaagcttccgtgggaggccctgaacgatgccatgacagttggtttcccggatctaacttggtgtccaacatgcgacattttattaactacgtgagagtgcgggtccctgagaccgcccccgaagtaaagcgcgattccccagcaagtacaagcagcgataacctgggaagcttgcaaaatagtggcacagcccaagtcttcagcctcgtagcggagcgcagaaaaaaattccaagagattatcaaccgctcttcgagcgaggccaaccaagtggtgcgacccaaaacatcctctaagtggagcgccccaggcagcgccccacaattaacaacggcaattctggaaataaaagagtccattctgtcattactgatcaaactgcatcacaagctgtccggcaagcagaactcttattatccgccctggttggatgatattgagatcctgatacagccagagatacccaaatattctcatggagacggaattacggctgtcgagagaatcctgttaaaggccgcttcccagtctaggatgaacaaacgcatcattgaggaaatctgccggaaagttacacccccagtcccccccaagaaagtgacagccgctgaaaaaaaaaccctagataaggaagaacggaggcaaaaggccagggaaagacagcaaaagctcttggccgagtttgctagtcggcagaagtctttcatggagacagccatggatgttgactcccccgagaacgatatcccgatggagatcaccacggccgaacctcaggtgtccgaagccgtctacgactgcgtcatctgcggacagtcaggcccctcaagtgaagaccgacctacaggactggtcgtgctgctacaagcgtcctcagtgcttgggcagtgccgggacaatgtggagccaaaaaagctgccaatatctgaagaagagcagatctacccctgggatacatgcgctgccgttcacgatgtgcgcctttccctgctccagaggtatttcaaagatagtagttgtcttctggccgtatccattggatgggaggggggggtgtacgtccagacctgcggacatactctgcatatagactgtcacaagagctacatggaaagcttacggaatgaccaagtgctccagggattttccgtggataaaggcgagttcacgtgtcctctgtgtagacaatttgccaattctgtcctgccatgctacccaggctccaatgttgaaaataacccatggcaacgcccgagtaacaagagcatacaagaccttattaaggaagttgaggagcttcaaggacgcccaggcgccttccccagcgagaccaatctctcaaaggagatggagtcggtgatgaaggatatcaagaacactacccagaaaaagtaccgcgattattccaaaacaccgggcagtccagataatgattttttattcatgtatagcgtggcgcgtacaaatctcgagcttgaattaatccataggggagggaatctctgttctggcggcgcctcaactgcagggaagaggtcatgcctaaatcagctgttccatgtgctggctctccacatgaggctctatagcatcgatagtgaatataacccttggaggaagcttacccagcttgaggagatgaatccacagctgggatatgaggaacagcagcccgaggtgccaatactttaccatgacgtaacttctctgctactgatccaaattctaatgatgcctcagccactgcgaaaggaccatttcacctgtatcgtgaaggtgctgttcacactgttatacacacaggctctcgcagctctgagcgtcaagtgttccgaagaggataggtcagcttggaaacacgccggggcactgaagaagagcacttgcgacgctgaaaaatcatacgaggtgctgctgtcattcgttatcagcgagctgttcaagggcaaattgtatcacgaggaaggcacacaggaatgcgccatggttaacccaattgcttggagcccagaatccatggaaaagtgtctccaagacttttgcctcccctttctccgcatcacatcactgcttcagcaccatctgttcggcgaggatctcccatcttgtcaggaggaagaagaattctccgtgctggcctcatgtttgggcctcctgcccactttttatcagaccgagcatccttttataagtgcttcttgtctggattggcctgtccctgccttcgacatcatcacacaatggtgttttgagatcaagtccttcactgaaagacacgccgaacaaggcaaagcgttgctgatacaagagagcaagtggaagctgccacacctgctccagctgcccgagaattacaacacaatcttccagtactaccacaggaagacttgcagcgtgtgcaccaaggtgcccaaagacccggcagtatgcctcgtatgtggaacttttgtctgcctcaaagggttgtgttgcaagcaacagagctactgcgagtgcgtgctccactcccagaactgtggggcagggacagggatctttctgctcatcaatgcttctgtcattatcattatccgtggccacagattttgtttatgggggtccgtgtatcttgatgctcacggagaggaagacagggatctaaggcgcgggaagcccttgtatatctgcaaagagcggtacaaggtgctcgaacagcagtggatctctcacacttttgatcacatcaataaacgttggggcccccactacaatggcttgtag

SEQ ID NO: 210536 - DNA, 2130 bp, synthetic construct
  misc_feature 1..2130: note = Description of Artificial Sequence: Synthetic coding sequence
  source 1..2130: mol_type = other DNA
atgatcgccagcaagcagcggcagttcaccgaggtgttccggatcatgtcatcgaccttttcccagagccgcttcttgtacgcagctgttgtgactgactcacctgagaacgatatccccatggagatcaccactgccgaaccccaggtctcggaggcggtatacgactgtgtcatatgtggccagtccggtccttcttcagaggatcgccccaccgggctggtggtgctgctgcaggctagcagcgtattgggccaatgtcgcgataacgtggaacccaagaagttgccaatttcagaggaggagcaaatatatccttgggacacttgcgcagcagtacacgacgtccggcttagtctcctacagcggtatttcaaggactcctcttgtctgcttgccgtaagcatcggatgggaggggggcgtgtatgtgcagacttgcggccacactcttcatatcgattgccataaatcctatatggagagtctgcgaaatgatcaagttcttcagggcttctcagtcgataagggggagttcacttgtccactgtgccggcagttcgcaaactcagtgttaccttgttacccaggttcaaacgtggagaacaacccatggcaacgccctagcaacaagtcaattcaggacctcatcaaagaggtggaggagttgcaggggcgcccaggcgcttttccaagtgagacgaatctctctaaagagatggagtccgtgatgaaggacataaaaaacaccacccagaagaaatatcgtgactactccaaaactcccggttcaccagataatgactttcttttcatgtattcagtggcccgtaccaatctggaattggagctcatacaccgggggggcaacctctgctctggaggagcctcaaccgcagggaaacgatcatgtcttaaccagttatttcatgtgctggcgcttcacatgcgactttactctattgattcagagtacaatccgtggagaaaattgacccaactggaggagatgaacccgcagctgggatacgaggaacagcagccagaggtgccaattctgtaccatgacgtcactagcttattgctcatccaaatcctgatgatgccccagcccctccgaaaagatcacttcacctgcatcgttaaagtgctctttacattactctacacacaagcactggcggcgctttccgttaagtgttcggaagaagataggtccgcctggaaacacgctggcgctctgaaaaagagtacgtgcgatgctgaaaaatcatacgaggtactgctgtcctttgtcatatccgaactgtttaaggggaagttataccacgaggagggcacccaggagtgcgccatggtgaatccaatcgcatggagtccggaaagcatggagaagtgtctccaggatttctgtctgcctttcctacgcataacttccctccttcagcaccacctgttcggcgaggacttaccatcctgtcaggaggaggaggagtttagtgttctggctagctgcctgggcctgctgccaaccttttaccagacagagcaccccttcatctctgcaagttgtctggactggccagtacctgccttcgacattattacgcagtggtgcttcgagatcaagagtttcactgaaaggcacgccgaacaggggaaggccctactcatccaagaaagtaagtggaagctgccacacctgttgcagttaccagaaaactacaatactatcttccagtactatcacaggaagacatgctcagtttgtaccaaagtgccgaaggatccggctgtgtgcctcgtctgtggtacgttcgtgtgtctgaagggcttgtgttgtaagcagcaatcttactgcgaatgtgtactccactcccagaactgtggggctggaacggggatcttccttctgatcaacgcaagtgtcattatcataatccgcggacacaggttctgtctatggggaagcgtctatctggatgcccatggagaagaggacagggacctgcggagaggcaagcccctgtatatatgcaaagaacgttacaaagtcttggagcagcagtggataagccacaccttcgatcatatcaataagagatggggtccccattacaacggtctgtag

SEQ ID NO: 210537 - DNA, 5667 bp, synthetic construct
  misc_feature 1..5667: note = Description of Artificial Sequence: Synthetic coding sequence
  source 1..5667: mol_type = other DNA
atggccgccgccgccgccgccgccgtgggcggccagcagcccagccagccagagctcccagctcccggcctcgcgctcgacaaggcagcaacagcagcccacttgaaggctgctctttcacgccccgacaatagggcaggcgccgaggagttgcaggccctcctggaacgtgtgctgagtgcagagagaccactggccgccgctgccgggggtgaagatgccgcagccgcaggcggcgggggaggcccgggcgctgccgaagaagaggctctcgagtggtgcaagtgcctgctggcaggcggcggaggctacgacgagttctgtgcggccgtccgggcctatgatcctgcagctctgtgcgggctagtgtggacagcaaactttgtggcatatagatgcaggacctgcggcataagtccatgtatgtcactttgcgctgagtgttttcaccagggtgatcacactggacatgacttcaatatgtttcgcagccaggctggaggtgcctgtgattgcggtgactctaacgtgatgcgggagagcggattctgtaaacgccatcaaattaagtcgagtagcaacattccatgcgtgcctaaggacttgctgatgatgtccgagtttgtgcttccccgcttcattttttgtctcatccagtacttgagagaaggctataacgaacccgcagccgacggaccgtcagaaaaggatctcaataaggtgctccagctcctcgagcctcaaatttctttcctcgaagatctgacgaagatgggtggggccatgagatcagttctaacacaggttttgaccaatcagcagaactataaagatctgacaagtgggctcggagagaacgcctgcgtgaagaaatctcatgaaaagtatctgattgctctaaagtcctctgggctgacatacccagaagataaactggtgtatggagtccaagagccatccgcggggaccagcagccttgctgtgcagggtttcatcggtgctaccggaaccctgggccaagtggacagctcggacgaagacgatcaggatggatctcagggcctgggaaagaggaagagggtgaagctgtcctcaggcactaaggaccagagtatcatggacgttctgaagcacaagtcgttcttagaagagttactgttctggactattaagtatgagtttccccagaagatggtgacgtttctcctcaacatgctgcctgatcaggaatataaagttgcttttaccaagacttttgtgcaacattatgcatttataatgaagacactgaagaagagtcatgagagtgacactatgtctaataggatcgtccacataagcgtacaactcttctctaatgaagagctcgcacgtcaagtgaccgaggagtgtcagcttctggatattatggtgaccgtgctgctgtacatgatggagtcatgcttgattaagagcgagttgcaagatgaggaaaatagcctccacgttgtggtcaactgcggtgaagcccttctgaaaaataacacctattggccactggtgtccgacttcattaatattctgtcccaccagagcgtggctaaaaggttcttggaggaccatggcttgctcgtgacttggatgaatttcgtgtctttttttcaagggatgaatctaaataaaagggaactgaatgagcacgtagaatttgagtcccagacatactatgccgcctttgcagccgaacttgaagcctgcgcccaaccaatgtggggccttctatcccattgcaaagttcgcgagacccaagagtatacaaggaatgttgtgcgctattgcctggaagccctgcaagactggttcgacgcaatcaattttgtggatgagcccgcaccaaatcaggtgacatttcacctgcccctgcatagatactacgctatgttcctcagcaaggcagttaagtgtcaggaacttgacctggattcggtcttgcctgaccaggaaatgttaatgaagctgatgattcatcccctgcaaattcaggccagtttggcagaaatacatagcaatatgtgggtgcgcaatggactgcagatcaaggggcaagcaatgacatacgtgcagtctcacttctgcaatagtatgattgaccctgacatttacttactccaggtttgcgcctccaggctcgacccagactactttatctctagtgtattcgaacgatttaaggttgtggacctgttgaccatggcttcacagcaccagaacactgtactggatgctgagcacgagaggtctatgctagaaggagccctgaccttcttggtgattctgctctctctgagactccacctggggatgagcgatgatgaaatcctccgagccgagatggttgcacaactgtgtatgaatgacaggacccactcgtccctgcttgatttgatccctgagaatccgaatcccaagagtgggattattcccggtagctactcttttgaatcggtgttgtcggcagtggccgatttcaaagcacctgtattcgagcccggtggcagcatgcagcaggggatgtatacgccaaaggccgaggtgtgggaccaggagtttgacccagttatggtgattctgcggaccgtctaccggcgggatgtccaaagtgcgatggatagatacaccgcgtttctgaagcaaagcgggaaattccccggaaatccttggcctccatataaaaaacggactagcctacacccaagctacaagggacttatgcggctgcttcactgcaagaccctacatatcgtactgtttactctcctctataagatcttgatggaccaccagaatctgagcgaacatgtgctctgcatggtcctctacctgatagaattgggcctggagaactccgctgaggaagaatcagacgaggaggcaagcgttggaggtcccgagagatgccacgacagctggtttcctggaagcaacctggttagtaatatgagacactttatcaattacgttcgggtccgagtgcctgaaactgctccggaggtcaaacgagattctcccgccagtactagttcagataatttaggcagtctccaaaattctggcacagctcaggttttctcactggtcgccgagaggcgcaaaaaatttcaggaaattatcaataggagctccagcgaagccaaccaagtggtccgacctaagacttcctccaaatggtctgctcccggctccgctccccaactcaccactgccatactcgagatcaaagagagcattctgtctctgttgattaagctccaccacaagctgagtggaaagcagaatagttactatccaccttggctggacgatattgagattttgatacaacctgagattcctaaatattcgcatggcgacggcatcaccgccgtagaacgaattctgttgaaagctgcatcgcagtcaaggatgaacaaacgcatcatcgaagagatttgtcgcaaggtcacaccacccgtgccccctaaaaaggttactgccgcggagaagaaaactctggacaaggaggagcgccgtcaaaaggctagagagcgccaacaaaaattgctggcagaattcgcgtccagacagaagtccttcatggaaacagccatggatgtcgattctcctgagaatgatatacctatggaaatcaccacggcagaaccgcaggtgagcgaagctgtctacgactgcgtcatctgtgggcagagcggccccagctccgaggatcgccccacaggactagtggtcctactgcaagctagcagcgtactgggacagtgcagagataatgtggaacccaaaaagctgccaatttctgaagaggagcagatttacccatgggacacatgcgccgccgttcacgatgtgcgtctcagtctgctacaacggtacttcaaggattcctcctgcctgttggcagtatcaatcggatgggaggggggcgtttacgtgcaaacatgcggccacaccctgcacattgattgccataagagctacatggaatctctgcggaatgaccaggtgttgcaggggttctctgtggacaaaggagagtttacatgtcccctttgcagacagtttgcaaattctgtgcttccttgctaccccggttccaacgtggagaacaacccttggcagcggccttcaaacaaaagcatccaggacttgataaaggaagtggaggagctccaggggagacctggcgccttcccatcagaaacaaacctctccaaggagatggagtccgtgatgaaagatataaagaacaccacacaaaagaagtaccgagattattccaagacccccgggtcgcccgacaatgactttttgtttatgtatagcgtagcccgcacaaatctcgagctggagcttatccatcggggtggtaatctttgttctgggggagcgagcacagcagggaaaagatcctgcctgaaccaattattccacgtgctagccctgcatatgcgcctgtactccatcgattccgagtataacccatggagaaagcttacccagcttgaagagatgaacccacagctgggctacgaagagcagcagccagaggttccgatcctgtaccatgacgtgacctccttgctgctgatccagatactgatgatgccccagccgctccggaaggaccacttcacgtgcatcgttaaagtcctgtttactcttctgtatactcaagccctggcagccctgagcgtcaaatgtagtgaggaggacagatcagcctggaagcatgccggcgctctgaagaagagtacgtgtgacgcagaaaagagctacgaggtattgctgtcttttgttatttccgagctgtttaagggcaaactttaccacgaggaaggcactcaagaatgtgcaatggtgaatcccatcgcctggtcgccagagagcatggaaaagtgcctgcaggatttctgtctgccgtttttgaggataacctctctccttcagcaccacctttttggggaggatttgccctcttgtcaggaagaggaggagttcagtgttttggcctcctgtcttggcttgcttccgacattctaccagacagagcaccccttcatatcagccagttgccttgattggcctgttccagccttcgacattattacacagtggtgtttcgagattaagtccttcacggaacggcacgcagaacagggtaaagccctcttaatccaggaatctaagtggaagctaccacacctcctccaactcccagagaactacaacacaatttttcagtattaccaccgtaagacctgcagcgtgtgcactaaagtgcccaaggatcctgccgtgtgtctcgtgtgtggcaccttcgtttgcttgaagggcctatgctgtaagcagcagtcctactgcgagtgcgtcctccactcacaaaattgtggagccggaaccggcatttttctgttgatcaacgcttcggtaattatcataatcagaggccaccggttttgcctctgggggtcagtgtatctcgacgcacacggggaagaagatagggaccttagaaggggaaaacctctgtatatttgtaaagagcggtacaaggtccttgagcagcagtggatcagccacacgtttgatcacattaataaacgctggggtcctcattacaatgggctatag

SEQ ID NO: 210538 - DNA, 5754 bp, synthetic construct
  misc_feature 1..5754: note = Description of Artificial Sequence: Synthetic coding sequence
  source 1..5754: mol_type = other DNA
atggccgccgccgccgccgccgccgtgggcggccagcagcccagccagcctgagctaccagcacccgggcttgccctggacaaagctgcaaccgccgcccacttaaaagcggccctgtccaggccagacaatcgggcaggcgctgaggagctacaagccctcttagagcgcgtactcagcgccgagagaccattagccgccgcagccggcggtgaggacgcagccgctgcgggcggtggggggggcccaggcgccgcagaggaggaagctcttgaatggtgcaagtgtcttctagcggggggaggcggctatgatgaattttgtgcagccgtacgggcatacgacccggccgccctctgcggactggtctggaccgctaactttgtagcgtatcgctgccggacttgcggaatcagcccgtgcatgagcctttgcgcagaatgttttcatcagggcgaccacacaggtcacgatttcaacatgttcaggtcgcaagcgggtggagcctgtgactgcggcgactccaatgtgatgagggagagtggattttgcaaaagacatcaaatcaagtcttcctctaacatcccatgcgtccctaaagatctccttatgatgtccgagttcgtgctgcccaggttcatcttctgcctcatccagtacttgagagaaggatacaacgagcctgccgcagacggaccgtctgagaaagacttaaacaaggtgctccagctcctggaacctcaaattagcttcctggaggatctgactaagatgggtggagccatgcggagtgttttgactcaggtcctgacaaaccagcagaactataaggacctgacatccggcttaggcgaaaacgcctgcgtaaagaaaagccacgaaaagtatctaatcgccctcaaatccagtggtctcacataccccgaggacaaactggtctatggcgtccaggaacctagcgccgggactagctccctggcggtacagggattcatcggtgcaacaggaacgctgggccaggtcgattcttcagatgaggacgaccaagatggatcacaggggctcgggaaaagaaagagagtgaagttatcctctgggacaaaagaccagtctattatggatgtgctgaaacataagagctttctggaggaactgctgttttggaccattaaatacgagttcccgcagaaaatggtaacattcctccttaatatgcttccagaccaggaatacaaagtggcgtttacgaagactttcgtccaacactatgcttttattatgaagaccctcaagaagtcacacgagagcgacacaatgagcaatcgcattgtgcacatcagcgtacagctattcagcaatgaggagttggctcggcaggtgacagaggaatgccagctcctggatataatggtaaccgtgcttctatatatgatggaaagctgtctgatcaagtccgagctgcaagacgaggagaactccttacatgtcgtggtcaattgcggtgaggcgctgctaaaaaataatacctattggcctctcgtcagtgacttcatcaacatcctcagccaccagtcggtcgcaaagcgctttttggaggaccatggactactggtgacctggatgaactttgtctccttcttccagggcatgaatctcaacaagcgggaacttaatgaacatgtagaattcgagtcccaaacatattacgccgcttttgctgccgaattggaagcgtgtgcacagcccatgtggggtcttctgagtcattgcaaagtgcgcgagactcaggagtatacgcgaaacgtggttagatattgcttagaagccctacaagactggttcgacgctattaacttcgtggacgaaccagcgccaaatcaggtaacattccatcttccactacataggtactacgcaatgttcctgagtaaagccgtgaaatgtcaggagctagaccttgatagtgtgctgccggaccaggagatgcttatgaagcttatgatccatccactgcagattcaggcctctctggctgagatacactcaaacatgtgggtccgcaatggcctgcaaatcaaaggccaggcgatgacttatgtacagagtcatttctgcaattccatgattgatcccgacatctatctgctccaggtgtgcgcatctcggctggaccccgattatttcattagctctgtctttgagcgcttcaaggtggttgatttgctcaccatggcatcccagcaccagaacactgttttggatgccgagcacgagagatcaatgctcgaaggggccctgacttttctggttatactgctgtcacttaggctgcacctgggtatgagcgatgacgaaatccttagggctgagatggtggcgcagctgtgtatgaacgaccgtacacatagcagccttctggacctgatcccagagaatcctaacccgaagtctggaatcatccctggaagctactccttcgagtcggttctgagcgccgtggcagattttaaggcacccgtgtttgagcctggggggtccatgcagcaaggcatgtacacacccaaagccgaggtctgggaccaggagtttgatccagttatggtgatccttaggaccgtctatcgaagggacgtgcagagcgcgatggatagatatactgcattcctgaaacagtctgggaaattcccgggtaatccatggcctccttacaagaagcggacttccctgcacccgtcctacaaaggactgatgcgcttgctgcactgcaaaaccctgcatatcgtcttgtttaccctactgtataaaatcctaatggatcatcagaatttaagcgagcacgtgctctgtatggtgctctatctcatcgaactcgggcttgaaaattccgcggaagaggaatccgacgaggaggcctctgtcggcgggccggagcggtgtcatgacagttggttccctggttcaaaccttgtgtccaacatgcgccattttataaattatgtcagggtccgggtccccgaaacagcacctgaggtgaagcgcgattcccctgccagcacttcttctgataatctcggctctctccagaacagtggtactgcacaagtgttcagtctcgtagcagagagaaggaagaagttccaagaaattatcaataggtcgtccagcgaagctaaccaggttgtccggcctaagacctcctctaagtggagcgcccctggaagcgctccccagctgaccactgccattctagaaattaaggagtccatactgtccctactgatcaaattgcatcacaagctgtccgggaagcagaattcatattaccctccttggctcgatgatattgagattttgatccaaccagagattccaaagtactcccacggagacggcattactgctgtagaaaggatcctgttgaaggcagccagccaatcccggatgaataaacgtataattgaagaaatttgccggaaggtcaccccccctgttcctccaaaaaaagtgactgcggccgaaaagaagacactggataaagaggagcgaagacaaaaagcccgagagcgccagcaaaagctcttggcggagttcgcatcaagacaaaagagtttcatggagaccgccatggatgtggattctcccgagaacgacatcccaatggagatcaccactgcagaaccacaggtgagcgaagctgtatacgattgtgtgatctgtggccaaagcggcccctccagtgaggaccggcccaccgggcttgttgtgctgctgcaagcaagcagtgtactcggtcagtgccgtgataatgtagagcccaaaaagcttccaattagcgaagaggaacagatttacccatgggacacctgcgccgccgttcatgatgttcggttgtccctcttgcagcggtattttaaggactccagctgcctcttggccgtgagtatcggctgggagggcggcgtgtatgtacagacttgcgggcacactctgcacatcgattgccacaagagctatatggagtctctaaggaatgatcaggtgttacagggtttctcggtggacaaaggcgaatttacttgccctctctgcagacagttcgccaattctgtcctgccttgttacccagggtcaaacgtcgaaaataacccatggcagagacctagcaacaaatctattcaggatttgataaaagaggtagaagaactccaggggcgcccaggcgcttttccaagcgaaacaaacttgtctaaggaaatggaatccgtgatgaaggacataaaaaatacaactcagaagaaatatcgggattactccaagacccccggttcccctgacaatgatttcctgttcatgtacagtgtcgccagaacaaatttagaactggaactgattcatcgagggggcaacctctgctccgggggcgcttcaacagcaggcaaacggtcgtgtctaaatttctgctttattatcttcccttttacgaagtcggaaatcattctttgtcagtacaggaagtctcacgataaggtctatcctaagtatcagctgttccatgtattagctttgcatatgcgtctttattctattgactccgaatacaacccctggcgtaaactgacccagcttgaagagatgaacccacagcttggctatgaggaacagcagcctgaggtacctatcctatatcacgatgtgacttccttgctcctcatccaaatcttgatgatgccccagccactccggaaggatcactttacatgtatcgtgaaagtcctgtttacactcctgtacacacaggccttagccgcgctgtctgtgaagtgtagtgaggaggacagaagtgcctggaaacatgcaggagctcttaagaaatcgacgtgcgacgctgaaaagtcctatgaagttttgctgtccttcgtgatttctgagctcttcaaggggaagctgtaccatgaggaaggaacccaagagtgcgcaatggtcaatcctattgcgtggtctccagagagtatggaaaagtgtttacaggatttttgcttgccctttttacggatcacatccctgctccagcaccaccttttcggggaagacctgcccagttgccaggaggaggaggagttctctgtgctggcttcatgcttgggtctgctcccgactttttatcaaactgaacaccctttcatttcagcctcctgtctcgactggcctgtgccagcctttgatatcataacccagtggtgctttgaaatcaaatcctttactgagaggcatgcggagcaggggaaggctttgcttatccaggaatccaagtggaagctccctcatctcctgcagttgccggagaactataacaccattttccagtattatcacagaaaaacgtgtagtgtgtgtactaaggtgcccaaggacccggccgtgtgtctggtgtgtggtacctttgtttgtctgaaggggctatgctgtaagcagcagagctattgcgaatgtgttcttcatagtcagaattgtggagctggtacagggattttcctgctaattaacgcaagcgtgatcattatcatccgcggtcaccgtttttgcctttggggctccgtctacctcgatgcacacggcgaagaagacagggatttgcgaagagggaaacctctctacatctgtaaggaaaggtacaaggtgctggagcagcagtggataagccacactttcgatcacattaataaaaggtgggggcctcactacaacggactttag

SEQ ID NO: 210539 - DNA, 1278 bp, synthetic construct
  misc_feature 1..1278: note = Description of Artificial Sequence: Synthetic coding sequence
  source 1..1278: mol_type = other DNA
atggccggcgccgagggcgccgccggccggcagagcgagctggagcctgtagtttctctcgttgacgtgctggaagaggacgaagaactggagaacgaggcctgtgctgtgcttgggggatccgacagcgagaaatgctcatattcccaagggagcgtaaaacgccaggccctctacgcttgctctacctgcacgcctgagggagaagagcccgctggaatatgcctggcctgctcctatgagtgccatgggtcccacaagttgtttgaactctatacaaagaggaactttagatgtgattgtggcaattcgaaattcaagaatcttgagtgtaagctactaccggataaggctaaggtgaattccgggaacaagtacaacgacaacttctttggattatattgcatatgtaaacgtccgtatcctgacccagaagatgagataccagacgagatgattcaatgcgtggtgtgcgaggactggtttcatggacgtcacttaggtgccatacctccagaatccggggactttcaggaaatggtgtgccaagcttgtatgaagcgttgctctttcttgtgggcctacgccgctcagctcgcggtgaccaaaatctctaccgaagatgacggacttgtccgcaacatcgacggtatcggagaccaggaggtgattaagccagagaacggagagcaccaggacagcaccttaaaggaggacgtaccagagcaggggaaagacgatgtgcgggaagtgaaggtggaacagaacagtgagccatgtgcaggatcaagctccgagagtgacctgcagacagtgttcaaaaatgaatccctgaacgcggagtccaagtcaggatgcaagctacaggaactgaaggctaagcagttaatcaagaaagacactgccacatactggcccttaaactggcggagcaaactttgcacatgccaggattgtatgaagatgtatggtgacctggatgttctgtttctcacagacgagtatgataccgtgctcgcctacgagaataagggcaaaatcgcgcaagccacagaccggtcggatcccctgatggatactcttagtagcatgaacagagtgcagcaggttgaattgatttgcgagtacaatgatctaaagacagaactgaaggactatttgaaacggttcgccgacgaaggtactgtggttaaaagggaggacatccagcagttcttcgaggagttccagagcaagaagcgtcgccgggtggacggcatgcagtactattgtagctag

SEQ ID NO: 210540 - DNA, 1050 bp, synthetic construct
  misc_feature 1..1050: note = Description of Artificial Sequence: Synthetic coding sequence
  source 1..1050: mol_type = other DNA
atgcggcgggccctgagctgggccgccgccaccccccggagcgcccctaccctgcggaacttcagatgtgattgcggaaatagcaaatttaaaaacctggagtgtaaactgttgcctgacaaggccaaggtcaacagcggtaacaaatataacgataatttcttcggattgtattgcatctgcaagcgaccctatccagatcccgaggatgagatcccagatgagatgatccaatgcgtggtctgcgaggactggttccacggacgccacctcggagcgatcccacctgagagtggggactttcaggaaatggtctgccaagcctgtatgaaaaggtgttcattcctctgggcctatgcagcccagctcgctgtgaccaagatttcgaccgaggacgatgggcttgtccggaacatcgacggcattggggatcaggaagtaataaaacccgagaacggggaacatcaggacagtaccctcaaagaagacgtgcccgagcagggcaaggacgatgtgagggaggtgaaggtcgagcagaacagcgaaccctgtgcgggctcctcctcagagtcagacctgcaaacagtcttcaagaacgaatcacttaatgccgagtccaagtccgggtgtaagctgcaggaactgaaagcgaagcagcttatcaagaaagacacagccacctactggcctctgaactggagatctaaactgtgtacttgccaagactgtatgaaaatgtacggtgatctggacgtgctgttcctgaccgatgagtatgacacagtgctggcatacgagaacaagggcaagatcgcccaggccaccgatcggagcgaccctttgatggatacactgtcttcaatgaacagggtgcaacaggtcgagctgatatgcgagtacaatgatctgaagactgaactcaaagactacctgaaacggtttgccgatgaaggaacagtagtgaagcgggaggacatccaacagtttttcgaagagttccagtccaagaaacggaggcgggtagacggaatgcagtactactgcagctag

SEQ ID NO: 210541 - DNA, 1083 bp, synthetic construct
  misc_feature 1..1083: note = Description of Artificial Sequence: Synthetic coding sequence
  source 1..1083: mol_type = other DNA
atgcggcgggccctgagctgggccgccgccaccccccggagcgcccccaccctcagaaattttcgctgtgactgcgggaactccaaattcaagaatcttgagtgcaaattactccccgataaggccaaggtgaactcaggcaacaaatataatgataacttctttggcctgtattgtatttgtaaaaggccttacccagatccagaagatgaaatccctgatgaaatgattcagtgtgtggtgtgtgaggattggttccatgggcgacacctgggcgcgattccgccagagtccggggactttcaggagatggtgtgccaggcctgcatgaagcgctgttcatttctgtgggcctacgctgctcaacttgcagttacaaagattagtaccgaggacgacgggcttgtgcgaaacatcgacggaattggcgaccaggaagtgataaagcctgaaaacggtgagcaccaggattccactcttaaggaggatgtgcccgagcaaggaaaggatgacgtgcgggaggttaaggtggagcagaattccgaaccttgtgctgggtctagttccgaatccgacttacagaccgtgtttaaaaacgagagtctgaatgcggaatccaagtccgggtgcaagctgcaggaactcaaagcaaagcagctgataaaaaaggatactgcaacttattggccgctgaattggcggagcaagctctgtacatgccaagactgcatgaaaatgtatggagacctagatgttcttttcttgacggatgaatacgacacagtgctggcctacgaaaacaaaggcaaaatagctcaggctactgatagaagcgatccgctcatggacactctgtcttccatgaacagggtgcagcaggtcgagctgatctgcgaatataatgatcttaaaacagagttaaaggattacctaaagagattcgccgacgaagggactgtagtgaagcgcgaggatatccaacagttttttgaggaatttcagaagaaggagaagaaaagtggctgggatgccgtgctgctccaattagagtggtctatgaaattaagtcattcctcacagtag

SEQ ID NO: 210542 - DNA, 2121 bp, synthetic construct
  misc_feature 1..2121: note = Description of Artificial Sequence: Synthetic coding sequence
  source 1..2121: mol_type = other DNA
atggccagccccgccgacagctgcatccagttcacccggcacgcctccgacgtcctgttgaatctcaatcgactgcggagtcgagacatccttaccgatgtcgtgattgtcgtgagccgggaacagttcagggcacacaagaccgtcctgatggcttgttcgggactgttttacagtatctttaccgaccagttgaaatgtaacttgtccgtgatcaacctcgacccagagatcaaccctgagggtttctgtatcctgttggactttatgtacacgtcacgcctgaacctaagagaaggaaatattatggctgtcatggcaacagctatgtatttgcagatggagcatgtggtcgatacttgcaggaagttcattaaggccagcgaagctgaaatggtgtcggccatcaagccccctcgggaggaattcctaaattccaggatgctgatgccacaggacattatggcctaccgcggtcgcgaggtcgtggagaacaatctccctttgcggtccgcgccaggttgcgagtcgcgggcctttgcgccttctctctactcaggactaagcaccccccctgcatcctacagcatgtacagtcatctcccagtgtcttctcttctgttctccgatgaggaatttagagatgtgcgcatgcccgtggctaatcccttcccaaaggaacgggccctgccctgtgactctgcgagacctgtcccgggagagtacagtcgacctaccctcgaggtttctcctaacgtgtgtcactctaacatttattcccccaaagagaccatccctgaggaggccagaagtgacatgcattacagcgtggcggagggacttaagccagccgcgccgagcgcccgtaatgcaccatacttcccatgcgacaaggcctccaaggaggaagagcggccatccagcgaggacgaaattgccctccacttcgaaccacctaacgcccccctgaatcgaaaaggcctggtgtccccgcagagcccacagaagtccgattgtcaaccgaatagcccaaccgagtcctgctctagcaaaaacgcgtgcatcctgcaggctagtggatcaccaccggccaaatctccaactgacccaaaggcctgcaactggaagaagtacaaattcattgtcttaaactccctgaaccaaaatgccaagcccgagggtccagaacaggctgaactgggaaggctcagtccacgggcctataccgccccgccagcctgtcaaccaccgatggaacccgagaacctcgacctgcaaagtcctaccaagctgtctgcttctggtgaagactccactatccctcaagcttcaagactcaataacatagtgaatcgaagcatgacaggctctccccgctcttccagtgagagccactcgccgctgtacatgcatcccccaaaatgtaccagctgcggtagccaaagtccccagcacgctgagatgtgccttcacactgctggacccacgtttccagaagagatgggagagactcagtctgagtatagcgacagcagttgtgagaacggggctttcttttgtaacgaatgcgactgccgattttctgaggaggcttctctgaagaggcacacactccagacacacagcgataaaccatacaaatgcgacaggtgccaagcttcctttagatacaagggaaatctagcgtcccacaaaacagtgcacacaggagaaaagccctaccggtgcaatatctgcggggcccagttcaatagacctgcaaacctgaagacacacacacgcattcattctggggaaaagccatataagtgtgagacgtgcggtgctcgtttcgtgcaggtcgcccatctgcgtgcacacgtgcttatccatacaggggagaaaccatacccgtgtgaaatctgtggtacaagatttcgacacctccagacactgaaatctcatctgcgaatccacacaggggaaaaaccctaccattgcgagaaatgcaacttacattttcggcacaagtcacaactgaggctccaccttcgtcaaaaacatggtgccatcactaacactaaggtccaatatcgagtgagtgcgactgacctccctcctgagctgcctaaggcctgctag

SEQ ID NO: 210543 - DNA, 2619 bp, synthetic construct
  misc_feature 1..2619: note = Description of Artificial Sequence: Synthetic coding sequence
  source 1..2619: mol_type = other DNA
atgcggagcgtgtgccaccggagcggcgagccccagagcgacgacattgaagcatcccgcatgaagcgagccgcagcgaaacatttgattgagcgttattaccatcagctgactgaaggatgtggaaacgaggcctgcaccaatgaattttgcgcatcttgcccaacttttttaagaatggacaacaacgctgctgccattaaggcgctggagctttacaaaataaatgctaagctgtgcgacccccatccatctaagaagggcgccagttctgcttacctcgagaacagcaaaggcgctccaaacaactcttgcagcgaaatcaagatgaataagaaaggcgcaaggatagatttcaaagatgtgacatatctcactgaagaaaaggtctacgagattctagagctctgcagagagcgcgaggattatagccccttgatccgcgttatcggaagagttttcagcagtgcagaggccctcgtgcagagtttccgcaaggtgaagcagcacactaaagaggagctgaagagtcttcaggctaaagacgaagataaggacgaggatgaaaaggaaaaggccgcgtgctccgcagctgccatggaggaggattccgaggcatcctcttcacgtatcggagactcttcacagggcgacaacaatctgcagaagctcgggcccgacgatgtgtcggtggatatcgacgctatccgtcgcgtctacaccagactgttgtctaatgagaagatcgaaaccgccttcctaaatgccctggtgtatctctctccgaacgtggagtgtgatctaacctaccacaacgtgtactctcgcgacccgaactatctcaatctcttcatcatcgtgatggaaaaccgcaacctgcattccccagaatatctggaaatggctctgccgcttttctgcaaggctatgtccaagctgcctctcgcggctcaaggcaaactaataagattgtggtcgaagtataatgccgaccaaatcaggagaatgatggagactttccagcagttgattacatacaaggttataagcaatgaattcaactcgcgaaaccttgtaaacgacgacgacgccatcgttgccgcgagcaaatgccttaagatggtgtattacgccaatgttgtaggcggtgaggtggataccaatcacaacgaagaggatgacgaggaacccatacccgagtcttctgagttaaccttacaggagctgctcggagaggaaaggcggaataaaaaagggcccagggtggatccgctcgaaacggagctgggtgtcaaaacactggactgccgaaagcctctcattcccttcgaagaatttatcaatgaaccattaaacgaggtgcttgaaatggacaaggactatactttcttcaaggtcgaaaccgaaaacaaattttccttcatgacatgccctttcatcttgaatgcagtgactaaaaacctggggctgtactatgacaataggattcgaatgtactctgagagacgtatcacagtattgtactctctggtacaggggcagcagcttaatccttatctgaggctgaaggttcggcgcgatcacatcatagatgacgctttggttcggttagagatgattgccatggagaaccccgctgaccttaaaaagcaactgtacgtggaattcgagggcgagcagggcgtggatgaaggaggcgttagcaaagagttctttcaactggttgtcgaagagatcttcaacccggatataggcatgttcacttacgatgaatctacaaaactcttttggttcaaccccagctcttttgagacggaagggcagttcacgctgatcggcatagttcttggtttagccatttataataattgtatactggatgttcacttcccgatggtggtgtaccgcaaattgatgggcaagaaaggtacattccgagacctcggagattcccatcccgtcttgtatcagagcctgaaggatctgctggaatacgagggaaacgtggaggatgacatgatgattacgttccagataagtcagactgatttgtttggcaatccaatgatgtatgacctgaaagaaaatggagacaagattccaataacaaatgagaaccgcaaagagtttgtgaatctttacagcgactacattctgaacaagtccgttgaaaaacagtttaaagcctttcgccgcggattccacatggtcaccaacgaatcaccactgaagtacttgttcaggccggaggagattgaactcttgatctgtggcagcagaaacctcgacttccaggcacttgaggagaccaccgagtatgacggcggctatacgagagactcggtgcttatcagggaattctgggagatcgtgcacagtttcaccgacgagcagaaacgcctttttctccaattcactaccggcactgatcgcgctccagtcggcgggctgggcaagctaaagatgataatcgctaaaaatgggccagataccgagaggttacctactagccacacatgtttcaacgttcttctgctgccagagtattccagcaaggagaaactcaaagaaagactccttaaggcaattacttacgccaagggatttggtatgctgtag

SEQ ID NO: 210544 - DNA, 2628 bp, synthetic construct
  misc_feature 1..2628: note = Description of Artificial Sequence: Synthetic coding sequence
  source 1..2628: mol_type = other DNA
atggagaagctgcaccagtgctactggaagagcggcgagccccagtccgacgatatcgaagcaagcaggatgaagagggcagcggccaaacacctcatcgaaagatactatcaccagttaactgagggatgtgggaatgaagcttgcaccaacgagttttgtgcgtcatgtcccacctttctgaggatggacaataacgctgccgctatcaaagccctcgagctctataaaattaacgccaagctgtgtgacccacacccctctaagaagggcgctagctcagcttacctggagaactcaaagggtgcccccaacaactcctgctccgaaataaagatgaacaagaagggcgcaaggattgacttcaaggatgtgacataccttacggaagagaaggtgtacgagatcctagaactgtgtcgcgagcgagaagattattcaccactgatccgcgttatcgggcgtgtgttctctagcgcagaagcactggtgcagtccttcagaaaagtcaaacaacatactaaggaagagctaaaaagtctgcaggcaaaggacgaagataaggacgaggatgagaaagaaaaagcagcctgctctgcagccgctatggaagaggactctgaggcgtcatcttcccgcatcggagactccagccagggtgataacaatctgcaaaaactgggtcctgatgacgtgtccgttgacatcgacgccatccgaagagtgtacacccggttgctctcaaacgaaaaaattgagacagccttcctgaatgccctggtctacctgtcgcctaacgtcgaatgcgacctgacttatcataatgtgtatagtcgggaccctaattatctgaacttatttattatcgtaatggagaatcgcaatcttcactctcctgaataccttgagatggctctccccctgttttgcaaagcgatgtccaagcttcctcttgccgcacaggggaagctcatccggctgtggtctaagtacaatgccgaccagattagaagaatgatggagacgtttcagcagctcattacatacaaagtgatcagtaacgaatttaattctcgcaatcttgtgaacgatgatgacgcgatcgtggccgcaagcaagtgtctgaagatggtatactacgccaacgtcgtcggaggcgaggtcgatacaaatcataacgaagaggacgacgaagagcccatcccggagtcgagtgaactgactttgcaggaattgttaggggaggaacgtcggaacaaaaaggggcctcgagtggacccccttgaaacagagcttggcgttaaaacccttgactgtcggaagccccttatcccgttcgaagagttcatcaacgagccattgaacgaggtactggaaatggataaggattacacctttttcaaagtggagactgagaacaaattctctttcatgacatgcccattcatcttaaacgccgtaactaagaaccttggactgtactatgataaccgtatacgaatgtatagcgaaaggaggataacagttctgtattctctggtacaagggcagcagctgaacccatacctgcggctgaaagtccgacgcgaccacatcattgacgacgcccttgttcggctagagatgatcgcaatggagaaccctgctgacctcaaaaagcagctgtacgtggagttcgagggggagcagggagtcgacgagggaggagtttctaaggagttctttcagctcgtggttgaagagatattcaatccagatatcggcatgttcacatatgatgaatcaacaaagctcttttggttcaatccttccagtttcgaaaccgaaggccagttcacattgataggcatcgtacttggcctggccatatacaacaactgcatcctggacgtccacttccccatggtcgtgtacaggaagcttatggggaaaaagggaacttttcgcgacctgggggactcccatccagtgttataccagtctctgaaggacctgttggagtatgagggtaatgttgaggacgatatgatgataacttttcagatatcccagacagacctctttggcaacccgatgatgtacgatcttaaagagaacggcgataaaattcccatcacaaatgagaatcgcaaggagtttgttaatttatatagtgactatatcctaaataaatccgtggagaagcagttcaaggccttccggcgcgggttccatatggtcactaacgagagccccctgaaatatctatttcgcccggaagagattgaactgctcatttgcgggtccagaaacctggactttcaagccctggaggagacgacggaatatgacggaggatacacaagggactctgttctgatcagagagttctgggagattgtgcattctttcaccgatgaacagaagaggttgttcctacagttcaccactgggacagacagagctccagtaggcggattgggcaaactgaagatgatcattgcaaaaaatgggcctgacacggagcggctccctacctcacacacttgcttcaatgtgctgctgctccccgagtactctagtaaggagaaattaaaagaaagattgctaaaagccataacctacgcaaagggattcggcatgctgtag

SEQ ID NO: 210545 - DNA, 2559 bp, synthetic construct
  misc_feature 1..2559: note = Description of Artificial Sequence: Synthetic coding sequence
  source 1..2559: mol_type = other DNA
atgaagcgggccgccgccaagcacctgatcgagcggtactaccaccagcttaccgaagggtgcggcaacgaggcatgtaccaatgagttttgtgcaagctgccctacctttctacggatggacaataatgccgctgccatcaaggccctggagctgtacaaaattaatgctaagctgtgcgacccacatcctagcaagaagggggcaagtagtgcctatctagaaaactcgaagggggccccaaataattcctgttcagagattaagatgaataagaagggcgctcggatcgatttcaaggacgtgacatatctcacagaagaaaaggtctacgaaatcctggaactctgtcgcgagagggaggactacagcccactcattagggtgataggtcgcgtatttagcagcgcagaggctttagtgcagtccttccgaaaggtcaaacaacacacaaaagaggagctcaaatctctccaggcgaaagacgaggacaaggacgaggacgagaaggagaaagcagcatgttcagccgcggccatggaggaagacagcgaagctagttcaagtcgcatcggagactccagccagggtgataataacctacagaagctgggcccagatgacgtaagtgttgacattgacgctatacgtcgtgtctacaccaggctgctttccaatgagaagattgaaacagcatttctcaatgctctggtctatctcagccccaacgttgagtgtgatctgacctatcacaatgtgtatagtcgagatccaaactatctaaacctctttatcattgttatggagaatcgcaatctgcatagtccagagtacctggaaatggctctccctttgttttgtaaggcaatgagtaaactgccgctcgccgcccagggaaagctaatccgactatggtcaaaatacaatgcagatcagattagacgaatgatggagacatttcagcagctgataacgtacaaggtgatatccaatgaatttaacagtagaaatctcgttaatgatgacgacgctattgtggcagcatcgaaatgcctaaaaatggtgtactacgcgaacgtcgtggggggtgaagtggatactaaccacaatgaggaggacgatgaggaacctattccagagagtagtgaattgacattacaggaattgctcggggaggagcggcgaaataaaaaggggccacgagtcgatcctctggaaaccgagttaggggttaaaacgcttgactgccgcaaacccctcattccctttgaagaattcattaatgaaccactgaatgaagttctggagatggacaaggactacaccttcttcaaagtggaaactgaaaataagttctccttcatgacctgccccttcatacttaacgctgttactaagaatctgggactctactacgataaccgtattcggatgtactccgagaggaggatcactgttttatactcactggtccagggccagcagctgaatccctacttaagattgaaagtaagacgtgatcacatcattgacgacgcactagtgcgactggagatgattgctatggagaaccctgctgacctgaagaaacaactttacgtcgagtttgagggagagcagggcgtcgacgaagggggtgtgtctaaggagttttttcagctggtcgttgaggagatcttcaaccctgacatcggaatgttcacttatgatgaatccacaaagctcttctggtttaatccctccagtttcgagacggagggacagtttacattaatcggcatcgtgcttggactcgccatatataacaattgtatcctggacgtccactttccgatggtagtctaccgcaagctcatgggaaagaaaggaaccttcagagacctgggagattcccacccagttctctaccaaagtttaaaggatctgttagaatacgagggtaacgtggaagacgatatgatgattacatttcagataagtcagaccgacctcttcgggaaccctatgatgtacgacctcaaggagaacggggacaagataccgatcactaacgagaacagaaaagaatttgtgaatctgtactcagattatatactcaacaagtcagtggaaaaacagttcaaggccttccgacgtggctttcatatggtgacaaacgagtcaccgctcaagtacctctttaggcccgaggaaatcgagcttctgatctgcggttcaaggaaccttgacttccaggccttggaagagaccactgagtacgacggtggctataccagagatagtgtgctcattagagagttttgggagatagttcactcatttaccgacgagcaaaaaagactattcctgcagtttactaccggcacggaccgggcccctgtgggcggtctgggaaaattaaagatgattatcgccaaaaatggtcctgatactgagaggctccctacgagccatacctgcttcaacgtgcttcttctgccagagtattccagcaaggaaaaactaaaagaacgtttgctaaaggcaattacatatgctaaaggctttgggatgttatag

SEQ ID NO: 210546 - DNA, 2559 bp, synthetic construct
  misc_feature 1..2559: note = Description of Artificial Sequence: Synthetic coding sequence
  source 1..2559: mol_type = other DNA
atgaagcgggccgccgccaagcacctgatcgagcggtactaccaccagttgactgaaggttgcggtaacgaggcttgtactaacgagttttgtgcttcttgtcccacatttttacgcatggataacaatgccgcagccatcaaggccctggaattgtataagatcaacgctaaactatgcgatcctcacccatccaagaagggagctagtagcgcttatttggaaaactctaagggcgctccaaacaattcttgttcagagattaaaatgaacaaaaagggagccaggattgatttcaaggacgtgacttacctaactgaagagaaagtgtatgagatcttagaactgtgccgtgagagggaagactactcacctctgatacgagtaatcggccgcgtgttctcctcagccgaagcacttgtacagagcttccgcaaggttaagcaacacaccaaggaggaactcaagtctctccaagcgaaggacgaagataaagatgaggatgagaaggagaaagccgcttgttctgccgccgccatggaagaagactctgaagcctcaagttcaaggatcggggattcttcacagggcgacaacaacctgcagaaactgggcccagatgatgtgagcgtggatattgatgccatccgccgggtctatacacgccttctgagcaatgaaaagatagaaacagccttccttaacgcccttgtgtacctttctcccaatgtggaatgcgacctcacgtaccacaacgtctatagtcgcgaccccaactacctcaacttatttataatcgtgatggaaaacagaaacctccacagtcctgaatacctggaaatggcactgccactgttctgtaaagcaatgtctaaactgccgctggccgcccagggaaaactcatccggctctggtctaagtataatgctgatcagattcggaggatgatggagacgtttcagcaattgatcacatataaggtaatcagcaacgaatttaactcacggaacttagtaaacgatgatgatgctatcgtggctgcttccaagtgcctaaaaatggtctactatgccaacgtagtaggaggggaggtggataccaaccataacgaggaagacgatgaggaaccaatacctgagtcatccgagttaacactccaggaattgcttggggaggagcgacgcaacaagaaagggccccgagttgatcctttagagacagaactgggcgtgaaaacactggattgtcgaaagcctctgatacccttcgaggagtttattaatgagcccctgaatgaggtgctggagatggacaaggactataccttcttcaaggtcgagaccgagaataaattttcattcatgacctgcccttttattctcaacgctgtcacaaagaacctgggactgtactatgataataggatccggatgtattccgagagaagaattactgtgctctactccttagtgcagggacagcagctgaacccctatttacgactgaaggtacgaagagaccatattattgacgatgctctggtccgcctggaaatgattgcaatggagaaccctgcggacctgaagaaacagctgtacgtggagtttgaaggagaacagggcgtggacgaaggaggcgtgtctaaggagtttttccaactggtggtcgaagagatcttcaaccccgacatcggcatgtttacgtacgacgagtccaccaaattgttctggttcaacccttcgagtttcgaaaccgaaggccagttcacacttattgggattgttctcgggctagctatctataacaattgcatcctcgacgttcacttccctatggtggtgtaccgcaaacttatggggaagaagggaaccttcagagatctgggggactcccaccccgttctgtatcagtctctcaaagacctgctcgagtatgaagggaatgtggaggacgacatgatgattacattccagattagtcagaccgatctgtttgggaatcctatgatgtacgacctgaaagaaaacggagacaagatccctatcaccaacgagaaccgtaaggaatttgttaatctgtactccgattatatcctgaataagtccgttgagaagcaatttaaggcatttcgcaggggcttccatatggtgacaaacgagtctcctttgaagtacttgttcaggcccgaggaaatcgaattattgatctgtggctcacgtaacctggactttcaggctctggaggaaaccaccgaatatgatgggggatacacccgcgattcagttctgatccgggaattctgggaaatagtgcattcttttaccgacgagcaaaagcggttgtttttacagttcactacaggcaccgacagggctcctgttggaggcctagggaagttgaaaatgattattgctaagaatggtccagatacggaacgtcttccaactagccacacctgtttcaacgtcctgctgctcccagagtattctagtaaggagaagctcaaggaacggctgctcaaggccattacatacgccaaagggttcggaatgctctag

SEQ ID NO: 210547 - DNA, 3252 bp, synthetic construct
  misc_feature 1..3252: note = Description of Artificial Sequence: Synthetic coding sequence
  source 1..3252: mol_type = other DNA
atgttcagcttcgagggcgacttcaagacccggcccaaggtgagcttaggaggcgcaagtagaaaggaagagaaagcatccctcctgcatcggacccaggaagagcgacgaaaacgggaggaggaaagacgccgactgaaaaatgcgattataatacagtcatttattagaggatatagagacaggaaacagcagtattctatccagagatcagcattcgaccgttgtgccaccctctctcaaagcggaggcgcttttcctatcgccaatggccccaatttgactctcctggttagacagctcctgttcttctataagcagaacgaagactcaaaacggctgatttggctgtatcaaaacctaattaagcatagttccctgttcgtaaagcagctggatggcagcgaaaggttgacttgtctttttcagattaagcgtctaatgtcactgtgctgccgtctgctacagaactgcaacgacgacagtcttaacgttgctctccccatgaggatgttggaggtgttctctagcgaaaatacatacctacctgtcttgcaggacgcaagctacgtggtgtctgtcattgaacaaatactgcattatatgattcataacgggtactaccgctcactctatctgctcatcaactcaaaactgccaagtagcatcgaatacagtgacctgtcgagggtgcccattgccaaaatcctgctcgagaacgtgttgaagccattgcatttcacttacaactcttgtcccgaaggcgcgaggcagcaggtgtttactgccttcacagaggagtttctggcggccccgttcacagaccagatcttccatttcatcatcccagctctggccgacgcccagactgtgtttccttacgagccttttcttaatgccttacttctgatcgagtccagatgcagccgaaagagcggcggagctccgtggctgttttattttgtcctgaccgtgggcgagaactatttaggcgctctgtccgaggaaggactactcgtgtatttaagggttcttcagacattcttgtcccaactaccagtgtccccagctagcgcgtcatgccatgatagcgcctcagatagcgaagaggagtcagaggaagccgacaaaccgtcttccccagaagacgggcgcttgtccgtgtcatacatcacagaggagtgcctgaagaaactcgacacgaaacagcagacaaacactctgctgaatctagtatggagagactcagcctcagaagaagtgttcaccaccatggccagtgtctgtcataccctgatggtccaacaccgtatgatggttccaaaggttagactgctatacagcctggcattcaatgcaagattcttgcgacatctgtggtttttaatatcttccatgagcactaggatgatcacgggatccatggtgccactcctacaggtcatttcacggggaagtcccatgagttttgaggacagcagcagaatcataccccttttctatctgtttagttcgctgtttagccacagtcttatctccatccatgataatgagttctttggtgaccccattgaggtggtgggccagcgtcaatcatctatgatgcctttcacgctcgaggagctgattatgctcagtcggtgtctgagggacgcctgcctcggcatcattaaacttgcttacccggagacaaagcctgaggtacgcgaggagtatataaccgccttccagtctatcggagtgactacttctagcgaaatgcaacagtgtatacagatggagcagaagcgctggatccagctctttaaagtgatcacaaacctcgtgaagatgcttaaaagccgcgacacccgtcgaaacttctgcccaccaaaccactggttatcagagcaagaagatattaaagcggacaaggtcacacaactctacgtacctgcttcaaggcacgtgtggcgctttcgtcgtatggggcgcattggcccactgcaatcaaccctggacgttggactggaatctccccccttgtccgtcagtgaagagcgccagctggcagtgctgacagaactgccttttgtggtaccctttgaggagagagtgaaaatctttcagcggttaatttacgcggacaagcaggaagtgcagggtgacggtcccttccttgacggaatcaatgttacgatccgccgaaattacatttacgaagacgcctatgataaactgtctcccgaaaatgagccagatttaaagaaacggatcagggtccatctgctgaatgcccatggactggacgaggccgggatcgacggcgggggaatattccgagagtttctgaacgagctcttgaaatctggatttaatcccaatcagggattcttcaaaactaccaacgaaggactcttatatcccaacccagccgcgcagatgttagttggcgattccttcgctagacattactactttctcggacgcatgttaggtaaggcactctacgaaaacatgctggtggagcttccctttgccggcttcttcctgtccaagttactgggcacctcagccgacgttgacatccaccatctggcctcactggacccggaggtctataagaacctactctttcttaagtcttacgaggatgatgtcgaggagttgggcctgaactttacggtggtgaataacgatcttggcgaagctcaggtcgttgagttgaaattcggagggaaggatatccctgtaaccagcgccaataggattgcctatatccacctcgttgccgactatcgcttaaaccgccaaatcagacagcattgccttgcattccggcaaggcctcgccaacgttgtcagcctagaatggctgcggatgtttgaccagcaggaaatacaggtgctcataagcggggcacaggtacccatcagccttgaagacctaaagtcgtttacaaactacagtggcggatattctgctgatcatccagtgatcaaggtgttttggcgtgtggttgagggattcacagatgaagaaaagaggaagctgttaaaattcgtcacctcttgctctcgcccccccctgctaggctttaaggaattgtacccagcattttgtatacacaatggaggttccgacctggagaggctgcccacagcaagcacttgcatgaatctattgaagctgccggagttttacgatgaaaccctcctgcgttctaaactcttgtatgccatagaatgcgccgctggtttcgaattgtcctag

SEQ ID NO: 210548 - DNA, 1215 bp, synthetic construct
  misc_feature 1..1215: note = Description of Artificial Sequence: Synthetic coding sequence
  source 1..1215: mol_type = other DNA
atgttcagcttcgagggcgacttcaagacccggcccaaggtgagcctaggcggagcctctaggaagtactccattcagcgaagtgcgtttgaccggtgcgcgacactgtctcagtccggaggggcgttcccaattgcaaacgggcctaacctaacactgttggtgaggcagctcctcttcttctacaagcagaatgaggactcgaagcggctgatttggctgtaccaaaatctcatcaagcacagttcccttttcgtgaaacagctggacgggtctgaacgtctgacctgtctgtttcagatcaagcggttgatgagcctctgctgcagacttctgcaaaactgcaacgacgactctcttaacgttgctttgccaatgagaatgctggaggttttctcctctgaaaatacctatctgccagtcctgcaggatgcctcgtacgtcgtgtcagttatcgaacagatactacactatatgatccataacggatactacagaagcttatatttattaatcaacagcaagttacctagctccattgagtattcagatctgtctcgggtcccaatcgccaagattctactggagaatgtcttgaaacctcttcattttacgtacaactcctgccccgaaggagcacgccagcaagtcttcaccgcgtttaccgaggaattccttgccgctcctttcaccgaccaaatcttccacttcatcattccagctcttgcagatgcccaaacagtgtttccctacgagcctttcctcaatgcgctgctgcttatcgaatcccgatgtagccggaagagcgggggagcaccgtggctattttacttcgtgctgactgtgggtgagaattacctgggagccttgtctgaagaaggcctgttagtgtatctcagggtgctccagaccttcttgagccagctgcccgtgagccccgccagtgcatcctgtcatgactctgctagtgacagcgaagaggagtccgaggaggcagataaaccttcctcacccgaggatgggcggcttagcgtctcttatatcaccgaggagtgcctcaagaagctcgacacaaagcaacaaactaacaccctcttgaacttggtgtggagagattccgccagcgaagaagtgttcacaacaatggccagtgtttgccacactttgatggtccaacacaggatgatggtccctaaggtcagagtttacaagtag

SEQ ID NO: 210549 - DNA, 192 bp, synthetic construct
  misc_feature 1..192: note = Description of Artificial Sequence: Synthetic coding sequence
  source 1..192: mol_type = other DNA
atggccgcccccctgagcgtggaggtggagttcggcagcagccccggttgtttgtttctatggagtagttttgccgaggtagtgaggtcctcttgccttaccgtactcagaaatatagaatccctgtgcttggatagacgcaacccaggaacctccggaacttgctctagcggaagtcgaagaatctgttag

SEQ ID NO: 210550 - DNA, 192 bp, synthetic construct
  misc_feature 1..192: note = Description of Artificial Sequence: Synthetic coding sequence
  source 1..192: mol_type = other DNA
atggccgcccccctgagcgtggaggtggagttcggcggcggcgccgaacttctgtttgatggcatcaaaaaacatagagttaccttgcccggacaggaggaaccttgggacatccgtaacctccttatctggatcaaaaaaaacttactgaaggaacgacccgaactttttatacaaggagacagtgtctag

SEQ ID NO: 210551 - DNA, 306 bp, synthetic construct
  misc_feature 1..306: note = Description of Artificial Sequence: Synthetic coding sequence
  source 1..306: mol_type = other DNA
atggccgcccccctgagcgtggaggtggagttcggcggcggcgccgagttgctgttcgacggcatcaagaaacaccgggtaactcttcccggacaggaggagccatgggacatccgcaatttgcttatctggattaaaaaaaacctgttaaaggaaaggcccgaactgtttatccagggggattcagtgcgcccggggatcctagtattgattaatgacgcagactgggaactgctcggagaactggactaccaactgcaggatcaagacagcgtattattcatctccactctccacggcggctag

SEQ ID NO: 210552 - DNA, 441 bp, synthetic construct
  misc_feature 1..441: note = Description of Artificial Sequence: Synthetic coding sequence
  source 1..441: mol_type = other DNA
atggccgcccccctgagcgtggaggtggagttcggcggcggcgccgaactgctgttcgacggcatcaagaagcatagagtgactcttcccggccaagaggaaccttgggacattcgaaatctcttaatctggataaagaaaaatctgctgaaggagagacccgaactgttcattcagggcgattccgtgcgcccgggcattctggtgctgatcaatgacgccgactgggagctgctcgtatcgaccttaggcgatattcccccaccagcccccgccctggcggcaagcgttggcaagagatgggcctccccacaggcacacatagagtggttaggcaaccctccgccacactcatctcccactctccgtcttttagagagccctacccctggggaggaagggatggggtcctggggtcatggctccaccccgccttcttag

SEQ ID NO: 210553 - DNA, 2358 bp, synthetic construct
  misc_feature 1..2358: note = Description of Artificial Sequence: Synthetic coding sequence
  source 1..2358: mol_type = other DNA
atgcccggcgtgatccccagcgagagcaacggcctgagccggggcagccctagtaagaagaaccgactaagtttgaagtttttccaaaagaaggaaacaaagcgagcactagacttcaccgatagccaggaaaacgaggaaaaggcctccgaataccgcgcttctgaaatcgaccaggtggtacccgcagcacagagttcaccgatcaactgtgaaaaacgtgaaaatcttctgccgttcgtgggcttgaacaatctcggcaatacatgttatcttaattcaatcctgcaggtcttatacttctgtcccggatttaagagcggggtgaaacacctctttaacattattagtcgaaaaaaagaggctttgaaagacgaggctaatcaaaaagataaaggaaattgcaaggaggattctcttgcctcttatgagctcatttgtagtctccagagtcttattatatcagtggagcagttacaagcctcgtttctgctgaaccccgagaaatacacagacgaactggccacacagcctcgccggttactgaacactcttagagagctgaatcctatgtatgaaggatacctgcagcacgacgcccaggaggtattgcagtgtattttgggaaatatacaggaaacatgtcagcttctgaagaaggaagaagtcaagaatgtagctgaacttcctacaaaggtggaagagatacctcatcctaaggaagagatgaacgggataaattcgatagagatggacagcatgcggcactcagaagacttcaaggagaagctgcccaagggaaacggcaagcggaaatccgatacagagttcggtaatatgaagaaaaaggtgaagctgagtaaagagcatcagtctctggaggagaaccagcgacagacccggtcgaagcggaaggcaacttccgacacccttgagtctccacctaaaatcatcccaaagtacatcagtgagaacgagtccccccgaccgagccagaaaaaaagtagagtgaaaattaactggctgaagtcggccactaaacagccatcaatcctgtcgaaattctgttctcttggcaaaataaccacaaatcagggggtaaagggccagtctaaggaaaatgagtgcgatccggaggaagacttaggcaaatgcgagagcgacaacaccactaacgggtgcggcctcgagtctccagggaacactgtgaccccagtcaatgtgaatgaagtgaagccgatcaataaaggcgaagaacagatcggtttcgaactcgtagagaagctttttcagggacagctcgtcttgcggactcggtgcttagagtgcgaaagtttgacagagcgaagagaagacttccaggatataagcgtgccggtccaagaagacgaactgtcaaaggttgaggagagctctgaaatctctcccgagcctaaaaccgaaatgaagaccctgaggtgggccatcagtcaattcgcctcggttgagcggatagtgggagaggataagtacttttgcgaaaattgccaccactacaccgaagccgagcggagcctcctgttcgacaagatgcccgaagtaattacgattcacctgaaatgcttcgctgccagtggccttgaattcgattgttatgggggggggctgtcaaaaataaacaccccactccttacgccattaaaattgagtctggaggagtggagcaccaagcccaccaatgactcttacgggctgttcgctgtggtaatgcattctgggatcactatttccagcgggcattacacagcaagcgtgaaagtcaccgaccttaactccctcgaactggacaagggaaattttgtggtggaccagatgtgtgagataggaaagcccgaaccgttaaacgaggaggaagctcgaggtgtcgtcgagaattataacgacgaggaagttagcatcagagtcggtggaaacactcagccttccaaggtattgaacaaaaagaatgtggaggcgattggactgctgggtggccagaaatccaaagccgattatgaactctataacaaagccagtaaccctgacaaggtggcttcgaccgccttcgccgagaatcggaactcagaaaccagcgatactaccggtacgcacgaaagcgataggaataaggagagctccgaccaaactgggataaacatctcgggatttgagaataaaatctcttacgtagtccagtctcttaaggagtatgagggcaagtggctgctgttcgatgatagcgaggtgaaggttactgaggagaaggattttttaaactcccttagcccttcgacaagtcctacttcaaccccctacctcctgttctacaaaaagctgtag

SEQ ID NO: 210554 - DNA, 2358 bp, synthetic construct
  misc_feature 1..2358: note = Description of Artificial Sequence: Synthetic coding sequence
  source 1..2358: mol_type = other DNA
atgcccggcgtgatccccagcgagagcaacggcctgagccggggcagtccttctaagaagaatcggttgtcactgaagttcttccagaaaaaggagaccaagcgcgctctggacttcaccgactcacaagagaatgaggaaaaagcgtctgagtatagagcctccgaaatcgaccaggttgtgcccgccgcacagtcatcccccatcaattgcgagaagagagaaaatctcctgccctttgttggactaaacaatctgggtaatacttgctatttgaactccattctgcaggttttatatttctgcccagggtttaagtccggagtgaagcatctctttaacatcatttcccgcaaaaaggaagccctgaaggacgaagctaaccagaaggacaaggggaactgcaaggaagattcactggcttcgtacgagctcatttgttccctgcagtccttgattatctcagttgagcagctgcaggcctcatttctcctgaacccggaaaagtatacagatgaactcgccacacagccccggaggcttctgaatacacttcgggagctcaatccaatgtacgaggggtatctccagcatgacgcacaagaggtcctgcaatgcattttgggcaatatccaggagacctgtcagctgctgaagaaagaggaggtgaaaaatgtggccgaacttcccaccaaggtggaggagataccccacccgaaggaagaaatgaacggcatcaacagcatcgaaatggactctatgaggcactctgaggactttaaagagaaattgcctaaaggtaatggaaagcggaagagcgataccgaattcggtaatatgaagaagaaggttaagctgtctaaggagcaccagtctcttgaagagaaccagcggcagactagaagcaagagaaaagccacctccgacactttagagagccctccaaagattattccgaaatacatttctgagaacgagagccctaggccttcccagaaaaaatcccgggtcaagataaactggctgaagagcgctaccaagcagccaagcattctgagtaagttctgcagtctgggcaaaatcacaacaaaccagggggtgaaaggtcagagcaaagaaaatgagtgtgatcccgaggaggaccttggaaaatgtgaaagcgacaacaccacaaacgggtgcggtcttgagagcccagggaacacggtgactcctgtaaatgtaaacgaggtcaagcccattaataagggtgaagagcagatcggatttgagctcgttgagaagctcttccaagggcagttggtgcttcgcacccggtgccttgaatgcgaaagtctgactgagagacgtgaagacttccaggacattagtgtgcccgttcaagaggacgagttgagcaaagttgaggagtctagtgagattagcccggaacccaagactgaaatgaagacactgcgatgggccatctcccagtttgcatctgtggagcgaatcgttggagaggataaatatttttgtgagaactgtcatcactacaccgaagcagaacgatcactcctgttcgataagatgccagaagtgatcaccatccatctaaagtgtttcgccgcaagcggccttgaatttgactgctatggggggggactgagtaagataaacaccccactgctgacccccctgaaactgagcctggaggaatggagtactaaaccaaccaatgatagttacgggctgttcgctgtcgtgatgcatagcggaataaccatcagctccgggcactacaccgcaagtgtcaaagtcaccgatctcaatagccttgagctggacaagggaaattttgtagtggaccaaatgtgtgagatcggtaaacctgaacctctgaatgaagaggaagcgaggggagtggttgaaaattataatgatgaggaggtgagcataagggttggaggcaatacccagccttccaaagtgctcaataaaaagaatgtggaagcaatcggcttgctcggaggccagaaatccaaggcagattatgagctgtacaacaaggctagtaatcctgataaagttgcttcaaccgccttcgcagagaatcgtaatagcgaaacctctgatacaacagggactcacgaatctgatcgaaacaaggaatctagcgaccagaccggtatcaacatctcaggcttcgaaaacaagatcagttatgtcgttcagagtctcaaggagtacgaggggaagtggctgctgttcgatgacagcgaagtgaaggtgacagaggagaaagacttcctcaactccttgtctccatctacatcacccacttcgacgccctacctgcttttttataagaagttgtag

SEQ ID NO: 210555 - DNA, 264 bp, synthetic construct
  misc_feature 1..264: note = Description of Artificial Sequence: Synthetic coding sequence
  source 1..264: mol_type = other DNA
atgcccggcgtgatccccagcgagagcaacggcctgagccggggctccccctctaaaaaaaataggctgtctctgaaatttttccaaaaaaaagagacaaagcgcgctctggattttacagatagccaggagaacgaagagaaggcaagcgaataccgcgcctctgaaatcgatcaggttgtacctgccgcacagagcagccccatcaattgtgaaaagagagaaaatctgctcccattcgtgggcctcaacaaccttgggtag

SEQ ID NO: 210556 - DNA, 561 bp, synthetic construct
  misc_feature 1..561: note = Description of Artificial Sequence: Synthetic coding sequence
  source 1..561: mol_type = other DNA
atgcccggcgtgatccccagcgagagcaacggcctgagccggggcagccccagtaagaagaatagactttccctgaagtttttccagaagaaagagacgaagcgtgcactggacttcactgactcgcaagaaaacgaggaaaaagcttctgagtacagggcctccgagattgatcaggtggtcccagcggcccagtcaagtcccatcaactgtgagaaaagagaaaaccttctcccgtttgttggcctgaataacctcggtaacacatgctacctgaactccatcctccaggtgctgtacttttgcccagggttcaaatctggcgtaaagcacttgtttaatattatcagcaggaagaaggaggcgttgaaagatgaagctaatcaaaaggacaagggaaactgtaaagaagacagtctggccagttatgaactgatctgctcgctgcagagccttatcatttcagtggagcaactgcaggcctccttcttgctgaacccagagaagtataccgatgaactggccacccagccccggagactccttaacaccctgaggtag

SEQ ID NO: 210557 - DNA, 663 bp, synthetic construct
  misc_feature 1..663: note = Description of Artificial Sequence: Synthetic coding sequence
  source 1..663: mol_type = other DNA
atgcccctgaccggcgtgggccccggcagctgccggcggcagatcattagagcgttgtgcctgcttctgctcctgctgcacgccggcagcgcaaagaatatatggaagcgggcattgcctgccaggttagcagagaaatccagagccgaagaggccggcgctccagggggacctcgtcagccccgtgcagacaggtgcccacctcctccacgcaccttaccccccggggcttgccaggcagctagatgtcaagccgattctgagtgtccgaggcaccgccggtgctgttataatggttgcgcatatgcatgcctggaggcagttccccccccacccgtattggactggcttgttcagcctaaaccccgatggctagggggaaacgggtggctgttggacggccccgaggaggtgttacaggcagaggcctgcagtactacagaagatggcgctgagcctctgctttgcccatctgggtatgaatgccacatcctgagcccaggagacgtcgctgagggcatcccaaacagaggccagtgtgtcaagcagcgcagacaggcggatggaaggattttaaggcataagctttataaggaatatccggagggggacagtaaaaatgtagccgagccaggccgcggccagcagaaacacttccagtag

SEQ ID NO: 210558 - DNA, 687 bp, synthetic construct
  misc_feature 1..687: note = Description of Artificial Sequence: Synthetic coding sequence
  source 1..687: mol_type = other DNA
atgtaccacctgatgaagttcatccccctgtacagcaaggtgcagcgcccatgcaccagcacacccatgatcgactccttcgtgcggctcatgaatgagtttacaaacatgcccgtgccacctaaaccaagacaggctctgggggacaagattgtgagagacattcgtcctggtgcagcctttgaacctacctacatatacagactcctaacagttaacaagagcagcctttcagagaaaggccgccaggaggacgctgaagaataccttggcttcattctcaatggcctgcacgaagagatgctgaatctcaagaagctgctcagtccaagcaacgagaagctgaccattagcaatgggcctaagaaccattctgtgaatgaagaagagcaagaggagcagggcgagggttcggaggatgaatgggagcaggtaggcccaagaaacaaaaccagcgttacccggcaggctgactttgtgcagacgcccatcaccgggttctggtggacacatcaggtatgtggtctgccagctgaattcaagcgcatctgtcacttcgctgcgatattccatgttgcggtcggttaccctgtgcgtcaggatacccacagcccaggatgcactggcgaacttggcgggaagcggatttgcccgcggctgtaccacaaaaatcaaacacgcgggtag

SEQ ID NO: 210559 - DNA, 189 bp, synthetic construct
  misc_feature 1..189: note = Description of Artificial Sequence: Synthetic coding sequence
  source 1..189: mol_type = other DNA
atggccctgcacagcccccagtacatcttcggcgacttcagccccgacgagttcaaccagttcttcgtgacccccagatccagcgtggaagacaaaaatattcgtgaactttctcttgtttcgatgaaaagcctgaatccagtgaccctttgccgagagccgcctgctacagtgttccaggcacactag

SEQ ID NO: 210560 - DNA, 2472 bp, synthetic construct
  misc_feature 1..2472: note = Description of Artificial Sequence: Synthetic coding sequence
  source 1..2472: mol_type = other DNA
atgaagcggcaccggcccgtgagcagcagcgacagcagcgacgagagccctagcacatcctttacatctggctccatgtaccgcataaagagcaaaattcccaatgaacataaaaagcccgctgaagtattcagaaaagatctaatctctgctatgaagttgcccgactcccaccatattaatccagattcatattatctcttcgccgatacttggaaagaggagtgggaaaaaggagtgcaggtgccggcttctccagatacagtgccccagcccagtctgcggattattgcggagaaagtgaaagatgtgttgttcatccgacctaggaagtacattcattgctcctcacccgatacaaccgaaccgggctatatcaatatcatggagctagctgcctccgtgtgtcggtacgatctggacgacatggatatattttggttgcaagaactaaatgaggatcttgcagagatgggctgtggaccagtcgatgaaaacttgatggaaaaaactgtcgaagtgctggagagacactgccatgagaacatgaaccatgctatcgagaccgaggaagggttaggcattgagtatgatgaggatgtcatttgcgacgtctgccggtcaccggattctgaggagggcaatgacatggtgttctgtgataaatgtaatgtgtgtgttcatcaggcatgttatggaatactgaaagtgccagaggggagctggctctgtagaagctgtgtactcggaatctacccgcagtgtgtgttgtgtcccaagaaaggcggtgctcttaagacaacaaagacaggcacgaagtgggctcacgtcagctgcgccctgtggatcccggaagtcagtattgcttgccctgagcgtatggagcccattaccaaaatctcccatattcctccttcccgatgggcgctggtgtgcaatctgtgcaagttgaagaccggagcatgtatccagtgttccatcaaaagctgtatcacagctttccatgttacgtgcgcctttgaacacggattagaaatgaaaacaatcctagacgaaggggacgaagtgaagtttaaatcttactgccttaagcactctcaaaatagacaaaaactgggtgaggctgagtatccccatcatcgggcaaaagagcaaagtcaggccaaatcagagaagacaagccttcgcgcccagaagctccgggagctcgaagaagaattctatagtcttgtacgcgtcgaagatgtcgccgcagagcttgggatgccgacattggcagttgacttcatttacaattactggaaactcaagcggaaaagcaactttaacaagcccctgttcccccctaaggaggacgaagaaaatgggttggtgcagccaaaggaagaaagcattcacactagaatgaggatgtttatgcacctgcggcaggatctggaacgcgttcgcaacctatgctacatgatctcccgaagggaaaagttgaaattgtctcacaataaaattcaggaacagatcttcgggttgcaggtccagctcttaaatcaggaaatcgatgccggcctcccgctgacaaacgccttggagaattctttattctatccacctccacgaattactctgaagttaaagatgcctaaatcgacaccagaggaccatcgcaacagctcaaccgagaccgaccagcagcctcactccccggactctagctcttccgttcactcgattcgcaacatgcaggtaccacaggagagtttggagatgagaaccaagtcctatccccgctatcccctagaatcaaaaaataatagactgcttgcttccctgtcccattcacgctcagaagcaaaggagtcatccccggcttggcgcacgccctcctcagagtgttaccacggacagagtctcggcaagcctttggtgctccaggcggccctgcacggccagtcctctattggtaatggcaagtcacagcctaactccaagtttgctaagagcaatggcctcgaggggagttggtcgggcaatgtgacccagaaggacagcagtagcgagatgttttgcgaccaggaaccagtgttttctccacacttagtctcccaaggaagttttcgcaagagcacggtggagcattttagtaggagcttcaaagaaacaacaaatcggtgggttaaaaatactgaagacctgcagtgctatgtgaaaccgaccaagaacatgtcgcccaaggagcagttctgggggcgtcaggtactgcgccgatcagccggacgggccccttaccaggaaaacgacggatattgcccggatctggagctctccgactccgaggccgaatccgacggaaacaaagagaaggtgcgagtaagaaaagattccagcgacagagagaatccccctcacgattcgaggagggactgccacgggaagagtaagactcatcctttaagccatagttcaatgcaacgttag

SEQ ID NO: 210561 - DNA, 2763 bp, synthetic construct
  misc_feature 1..2763: note = Description of Artificial Sequence: Synthetic coding sequence
  source 1..2763: mol_type = other DNA
atggccaccgtggccgccaaccccgccgccgccgccgccgccgtggccgctgcagctgctgtcacagaagacagggagcctcagcacgaggagcttcccggcctggactctcagtggcgccaaatcgagaacggcgagtctggccgggagcggccactcagagccggggaaagctggtttctagtcgagaaacactggtataagcagtgggaagcttatgtgcaaggcggcgatcaagattcgtctactttccccgggtgcataaataacgcaacactcttccaggacgagatcaactggcgactcaaagaagggctggtggagggtgaggattatgtccttctgcccgcagctgcatggcactacctcgtgtcttggtacggcttggagcatggccaaccacctatcgaacggaaagtcatcgagcttcctaatatccagaaggtcgaggtgtatccagtcgagttgcttctggtgcgacacaacgacctggggaaaagtcacactgtccaattctctcacaccgactctatcggtctcgtgcttagaactgcaagagaaaggttcttggtggaaccccaggaagacactaggttatgggcaaagaattcagagggatccttggaccggctatacgatactcacatcaccgtgctcgatgctgctttggagactggccagttgatcattatggaaacccgaaaaaaggacggaacatggccctcagctcagttacatgtcatgaataacaacatgtcggaggaagatgaagattttaagggacagccaggcatctgtggcttgactaacctcgggaacacatgctttatgaattctgcgctccagtgtctgtccaatgtgccccagctgactgagtactttctcaataattgttacctggaagagcttaacttccgcaatccactggggatgaagggcgagatcgccgaagcctacgccgatctggtgaaacaggcctggtccgggcaccatcggtctatagtgccccacgtgttcaaaaataaagtgggtcatttcgcttctcagtttctcggctaccaacaacatgactcccaggaactgctgagcttccttctagatggactgcatgaggacctaaacagagtcaagaagaaagaatatgtcgagctatgcgatgccgcaggccgtccggatcaggaggtggctcaggaagcctggcagaaccataagcggcgcaatgactcagttattgtcgatacctttcacggactttttaagagcacactggtctgtccagattgtggcaacgtgtcggttacatttgatcctttctgttacctcagcgttccacttccaatcagtcataaaagggtactcgaagtgttttttattcccatggatccaaggagaaaacctgagcagcataggttggtggtccccaagaagggcaaaatatccgacctgtgcgtagctttgtctaaacacaccggaatttctcctgaacgaatgatggtggcagatgtgttcagtcaccgattttataagctctaccagctggaggagcctctttcgagtattctcgatcgtgatgatatattcgtatacgaggtgagtgggcggatagaagctatcgagggaagccgggaggacatcgtggtacccgtctatctgagggagcgaacacccgccagggactataataactcatactacgggttaatgctctttggtcacccactgcttgtatcggtaccccgggacagattcacttgggagggcctttataacgtcctgatgtaccgcctgtcaagatacgtgactaaacctaactcagatgatgaagatgacggagatgagaaagaggatgatgaagaagacaaagacgacgtgccgggccccagtactgggggctctctaagggacccagaacctgagcaggccggcccttcatcaggggttaccaacaggtgtccctttctgctggataattgtttggggacctcgcagtggcccccgaggaggaggcggaagcaactgtttactctccaaaccgtgaattccaacgggacctccgaccggaccactagtcctgaggaggtgcatgctcagccatacattgccatagactgggaaccagaaatgaagaagcggtactacgacgaagtggaggccgaggggtacgtaaagcacgactgcgtgggctatgtcatgaagaaggctccagtacgtctgcaggagtgcattgagctcttcactactgtcgaaaccttggagaaagaaaacccatggtactgtccgtcctgcaaacaacaccagcttgccaccaagaagctggatctttggatgctccccgaaatcctgatcattcatcttaaacggttctcttatactaagttttcacgcgagaagctggacacattggtggaatttccaatccgagatctggatttcagtgagttcgtgattcaaccacagaatgagtccaaccccgagctgtataaatatgacttgatcgcggtctcaaatcattacggcggcatgagagatggtcattacactaccttcgcctgtaataaggatagtggccaatggcattatttcgacgacaattctgtatcaccagttaacgagaatcaaattgaatccaaagccgcttatgtcctgttctaccaacggcaggacgtggccaggcgcctgctctctccagccggaagcagtggggctccagccagccctgcctgttctagccctcctagctctgagttcatggacgtgaactag

SEQ ID NO: 210562 - DNA, 1113 bp, synthetic construct
  misc_feature 1..1113: note = Description of Artificial Sequence: Synthetic coding sequence
  source 1..1113: mol_type = other DNA
atggagatcctgatgaccgtgagcaagttcgccagcatctgcaccatgggggctaatgcctccgcactagagaaggagatcggccctgagcagtttcctgtgaacgaacactacttcggacttgtcaactttggcaatacatgttattgcaactcagtgcttcaggccctttacttttgtcgcccctttcgtgagaaagtgctggcttataaaagtcagccccgaaaaaaggagagccttctgacctgcttagctgacctgtttcattcgatcgcaacacaaaagaagaaggtgggcgttattccccccaaaaagtttattacccgtctacgcaaggagaacgaattgttcgacaattacatgcagcaggacgcccacgagttccttaattatctcttgaataccatcgcagacattctccaggaggaaagaaaacaggagaagcaaaacggaagactgccaaacggcaacatcgataacgagaacaacaattccacaccagatcccacttgggtgcacgaaatttttcagggcaccctcacaaacgagacacggtgtctgacgtgcgaaaccatcagcagtaaagatgaggatttcctggacctatcagtggacgtggagcagaacacgagcattactcactgcctgagaggattttccaataccgaaacactgtgctctgagtataagtactattgcgaggagtgtcgcagcaaacaggaggctcacaaacgcatgaaagttaaaaagctacctatgatcctggccctgcatcttaaacggttcaaatatatggaccaactgcaccgatacactaaactcagctatagggtggtattcccactggagctgcggctgttcaacactagtggcgatgcaaccaatcctgataggatgtatgacctcgttgcagtggtggtccactgtgggagcggacccaatcggggccattacattgccatcgtgaagagtcacgacttctggcttttattcgacgatgacatcgtggaaaaaattgatgcccaggcaatcgaagagttttatggcctgacaagcgacatcagtaagaactcggagtcgggatacattctcttctatcaaagtcgtgattag

SEQ ID NO: 210563 - DNA, 2592 bp, synthetic construct
  misc_feature 1..2592: note = Description of Artificial Sequence: Synthetic coding sequence
  source 1..2592: mol_type = other DNA
atgcagcggcggggcgccctgttcggcatgcccggcggcagcggcggaagaaaaatggccgccggggacataggcgagttgcttgtcccacatatgccaactatccgcgtcccacgctcaggggaccgggtgtacaaaaacgaatgtgcattcagctatgactctcctaattcagaaggggggctgtacgtgtgtatgaacactttcctcgcctttggccgtgaacatgtcgagcgccatttcaggaaaacaggacagagtgtgtatatgcacctaaaacgccacgtgagggaaaaagttagaggtgcctcaggtggcgccctgcccaagaggcgcaattctaaaatcttcttggatctggacacggacgatgatctgaactcagacgactatgagtatgaggatgaagccaagcttgtgatcttcccagatcattacgaaatcgcactgccgaatatcgaggagctccccgccctcgtgaccatcgcctgtgacgcagtcttgtcgagcaagtctccttatagaaaacaagaccccgacacttgggaaaatgaattaccggtttccaagtacgccaataacctgactcagctagacaatggtgttaggataccccccagcggctggaagtgcgcccgctgcgacctgagggaaaacctttggttgaacctgaccgacggatctgtgctctgcgggaagtggttcttcgactctagcgggggaaatggacacgcactggaacactaccgagatatgggctaccctctcgccgtgaagctgggaaccatcacaccggacggagccgacgtctactccttccaggaagaagagcccgttttggatccacatctcgccaagcatctggcccacttcggcatcgatatgctgcacatgcacggaacagaaaacggactgcaggacaatgatatcaagttgagggtttccgagtgggaagtgatccaagagagtggtactaaactcaaacctatgtatgggccgggctataccgggcttaagaatctcggcaacagttgttacctgtcgtccgtgatgcaggctatattctctattccagagttccaaagggcctacgtggggaatctgccaagaatttttgattacagtccactcgatcctacccaggacttcaacacccagatgaccaagcttgggcatgggttgttgtctgggcagtattctaagccgccggttaagtctgagcttattgagcaggttatgaaagaggaacacaaacctcagcagaacggtatctctcccagaatgttcaaggcctttgtttcaaagtctcaccccgagttctcgagcaaccgtcagcaagatgctcaggaattttttttgcacctggtcaacctggtggagcgcaacagaattggctctgagaatcccagcgacgtatttaggtttcttgtcgaagaacgtatccagtgttgccagacaagaaaagttcggtacacggaaagggttgactatctaatgcagttacctgttgctatggaagccgcaacaaacaaagacgagctgatagcctacgaactgactaggcgggaggctgaagccaatagaagaccacttcccgagttggtgcgggccaagattccattcagcgcctgtctgcaggccttctctgagccagagaacgtagacgatttttggtcttctgctcttcaggccaagtcggccggggtcaagacatctcgcttcgcctcctttcccgaatacctcgtggtgcagatcaaaaagttcaccttcggactcgactgggtcccaaagaagtttgacgttagcattgatatgccagacttgctagacatcaatcacctgagggcccgtggacttcaaccaggggaagaggagctgccagatatcagtcccccgatcgtgatccccgacgattctaaagatcggcttatgaatcaattgatcgacccttctgacattgacgagagctcagttatgcagctggccgagatgggcttccctctcgaagcctgtagaaaagctgtgtacttcaccggcaatatgggggcggaggtggcatttaattggatcattgtgcatatggaggaacctgacttcgccgaacccttaaccatgcccgggtatggcggtgctgccagcgccggagcaagcgtcttcggtgcatctgggttggacaatcaacctcccgaagagatcgtagcaatcatcacctcaatgggattccaacgaaaccaagctatccaggctttgagagcgactaacaataacctggagcgagctctggactggattttctcacacccagagttcgaagaggattcagactttgtaattgagatggagaataatgcaaacgccaacatcatctcagaggccaagcccgaaggtcccagagtcaaggatggctctggaacttatgaattattcgcctttatatctcacatggggacctcaactatgtccgggcactacatttgccatatcaagaaagaggggaggtgggttatttacaacgatcacaaggtttgtgcctctgagcgtcccccgaaagatttaggatatatgtatttctaccgccgtatccccagctag

SEQ ID NO: 210564 - DNA, 1485 bp, synthetic construct
  misc_feature 1..1485: note = Description of Artificial Sequence: Synthetic coding sequence
  source 1..1485: mol_type = other DNA
atgcccctgtacagcgtgaccgtgaagtggggcaaggagaagttcgaaggcgtcgaattgaatactgacgaaccacctatggtgttcaaagctcagctgtttgcactgactggtgtgcaaccagcgcggcagaaagtgatggttaaagggggcactctgaaggatgacgactggggcaatatcaaaataaagaatggtatgacgctgttgatgatgggatctgccgatgctctcccagaagaaccttcagctaagacggtcttcgtcgaggatatgaccgaagagcagctggcatccgcaatggagctgccttgcggtctgaccaacctcggaaatacctgctatatgaatgctaccgtccaatgtattcgatctgtgccggaactcaaggacgcacttaaaagatacgccggcgcactgagagccagtggggagatggccagcgctcagtacataaccgctgccctgcgtgacctgtttgacagcatggacaaaactagttccagcatcccacctataattttgctccaattcctccatatggcctttccacaattcgcggagaagggcgaacaaggacagtacctgcaacaggatgctaacgaatgttggatacagatgatgagagtgctccaacaaaagctagaagctatcgaagacgatagcgtaaaggaaacggattcctcttctgcctcggctgccactccatccaagaaaaaaagtttaatcgaccagtttttcggagtggaattcgaaacgactatgaaatgcaccgagtccgaggaggaggaggtcaccaaaggcaaagagaaccagctacagctgtcctgcttcatcaatcaggaggtaaagtatctgtttaccggtctgaaactgcgcctccaggaggaaattactaaacaatcccctaccctgcagcgcaacgccctgtacatcaaatcttccaagatctccaggctaccagcgtacttgaccattcagatggttcgatttttctataaagagaaggagagtgtcaatgctaaagtcctgaaggacgtaaaattcccgctgatgctagatatgtatgagctgtgcacacccgaattgcaagagaagatggtgtcttttcgcagtaaattcaaggacttggaggataaaaaggtcaaccagcagcctaatacgtccgacaaaaaaagcagtccccagaaagaggtcaaatacgagcctttcagcttcgccgacgacatagggtcaaacaactgcggatattatgatctccaggcggtgcttactcatcaggggcggagtagctcatctgggcactatgtttcatgggtgaagaggaagcaggacgagtggatcaagttcgacgacgacaaggtcagcatagtgacccctgaggacatcctgcggctgtctgggggcggcgactggcacattgcctatgtcttattgtacggtccacgccgggtggagatcatggaagaggagagtgagcagtag

SEQ ID NO: 210565 - DNA, 1380 bp, synthetic construct
  misc_feature 1..1380: note = Description of Artificial Sequence: Synthetic coding sequence
  source 1..1380: mol_type = other DNA
atgcccctgtacagcgtgaccgtgaagtggggcaaggagaagttcgaaggtgtggaattgaatactgatgagcctcccatggtttttaaggcacaactgtttgccctgacaggagtccagccggcccgtcagaaagtgatggtgaagggcggcaccctgaaagacgatgattggggcaatatcaaaataaagaacatggagctcccatgcggactcaccaacctcggtaatacatgctatatgaatgccacggttcaatgcatacggtcggtgccagagctgaaggatgcactgaaacgttatgctggagcacttcgggcaagcggcgagatggcttctgcccagtatatcaccgccgctcttagagatttatttgatagcatggacaagaccagctctagcattccccccataatactcctgcagttcctccatatggccttccctcagttcgcagagaaaggggagcagggccaatacctgcagcaagatgctaatgagtgttggattcagatgatgcgtgtgttacagcagaaactcgaggctattgaagatgatagcgtgaaggaaactgatagctccagcgcctctgctgccactcccagcaaaaagaagtcacttatagaccagttttttggggtggagttcgagactaccatgaagtgtactgaaagtgaggaagaggaagtcacaaaaggcaaggagaatcagttacagttgtcttgcttcataaaccaggaagttaagtatctgtttacgggtttgaagttgcgcctccaggaggagatcactaaacagtctcctaccttgcagaggaacgcactttatattaaaagcagtaaaatctctcgattgccagcatatctcactattcaaatggtgcggtttttctacaaggaaaaggaaagcgtgaacgctaaggtgctgaaagacgtaaagttcccgttgatgcttgatatgtatgaactctgcactcccgagttgcaggaaaagatggtgagctttcgatcaaagttcaaggacctggaggataagaaggtgaatcagcagcccaacaccagcgacaagaaatcttctccccagaaagaggtgaagtacgaaccattctcattcgcagatgacatcggttctaataactgcgggtactacgatctccaggcagtcctaacccatcaagggcgttcttcgtcatcaggtcactatgtgagctgggttaaaagaaagcaggatgagtggatcaagttcgatgacgacaaggtgagtatcgttacacccgaggacattttacgcctgtcagggggcggtgattggcacattgcatatgttctgctctatggccctcggcgggtggagattatggaagaagagtctgagcagtag

SEQ ID NO: 210566 - DNA, 1452 bp, synthetic construct
  misc_feature 1..1452: note = Description of Artificial Sequence: Synthetic coding sequence
  source 1..1452: mol_type = other DNA
atgcccctgtacagcgtgaccgtgaagtggggcaaggagaagttcgaaggcgtggaattgaacacagatgaaccccctatggtgttcaaggcacagctctttgcccttactggggttcagccagcccgacagaaggtgatggttaagggtggaaccctgaaggggatgacccttctcatgatgggttccgccgatgctctgcctgaagaaccttcggctaagacagtgttcgtggaagatatgaccgaagaacagttagcgagcgccatggagttaccctgtggcctgacgaaccttgggaatacatgttacatgaacgctactgtccagtgcatacgctctgtccccgaattaaaggacgccctaaagcgatacgcgggcgctctgagagcatctggtgagatggcctccgcccagtacataacagctgctttgcgggacctgttcgactccatggataagactagttcttctatacctcccataatcctgttgcaattcctgcatatggccttcccccaattcgcagagaagggagagcagggacagtatttacagcaggatgctaatgaatgctggattcaaatgatgcgagttcttcaacaaaaactggaagccatcgaggatgactccgtcaaggagactgatagttccagtgctagtgcggccactccaagcaaaaagaagtctttgatcgatcagtttttcggtgtggagttcgaaacaacgatgaaatgtactgaatctgaggaggaagaggtcaccaaggggaaggaaaatcagctgcaactgtcttgcttcatcaaccaggaggtgaagtaccttttcacaggattgaagctgaggttgcaagaggagattacaaagcagagccccacactgcagagaaacgctttgtatattaaatcctcaaagatttcccggttgcccgcatatctcactatacagatggtcagatttttctataaggaaaaggaatctgtaaatgccaaagtgctcaaagacgtgaaatttccgctcatgctggacatgtatgaactgtgtacacccgaactgcaggaaaagatggtgagcttccgctcgaagttcaaggacttagaagataagaaagtgaatcagcagcctaacacttctgacaagaaatcttccccacagaaagaagtgaagtatgaaccatttagcttcgccgacgacattgggtcgaataattgcggctactatgaccttcaggcagtgctcacccaccaaggccgatccagcagctcaggccactatgtgagttgggtgaagagaaaacaggacgagtggattaaatttgacgacgataaggttagtatcgtgacaccagaggacattctgcgactgagcgggggaggagactggcatatcgcgtacgtgttactttatggcccacgccgcgtcgagattatggaagaggaatcagaacaatag

SEQ ID NO: 210567 - DNA, 1380 bp, synthetic construct
  misc_feature 1..1380: note = Description of Artificial Sequence: Synthetic coding sequence
  source 1..1380: mol_type = other DNA
atgcccctgtacagcgtgaccgtgaagtggggcaaggagaagttcgagggggtggagctgaacaccgacgaacctcccatggtgttcaaggcacagctgtttgcactgaccggggtgcagcccgccaggcagaaggtgatggtgaaggggggtacactaaaggacgacgactggggcaacattaaaattaaaaacatggaacttccttgcggtctcacaaacttgggtaatacctgctacatgaatgctactgtccagtgcataaggagcgtgccagaacttaaggatgctctgaagcgttatgcaggcgccttgcgggctagtggagaaatggcgtcggcccaatacataactgctgctctgcgggatctgttcgatagcatggacaagacctcttctagtatccccccaattatccttctccagtttttgcatatggccttcccacagttcgcggaaaaaggcgaacagggacagtatctgcagcaggacgccaacgaatgctggatccagatgatgcgcgtgcttcaacaaaagttggaggcgatcgaggatgactcggttaaagagactgattcctcatccgcaagcgcggcaacgcctagcaagaaaaagtcattgattgatcaattttttggggtggagttcgaaaccaccatgaaatgcaccgagagcgaggaagaggaggtcactaaggggaaagaaaaccaactgcagctgagctgtttcatcaatcaggaggtgaagtacctgttcacaggcctgaagctccgcctgcaggaagaaatcacaaagcagtccccaactttacagagaaacgccctctatatcaagtcatcaaaaatttcgagactgcccgcatatctgacgatacaaatggtgagattcttttataaggaaaaggagagcgtcaacgccaaggtgttaaaagacgtcaaattccccctgatgctggacatgtatgagctgtgtacccccgagctgcaagaaaagatggtctcctttcgcagcaagttcaaggatttagaagataagaaggtcaatcagcagccaaacaccagcgataaaaagtccagccctcagaaggaggtaaaatatgaaccattctctttcgcagacgatatcggctcaaacaattgcggatactatgatttgcaggcggtgcttacgcatcaggggcgaagcagcagctccggtcattacgttagctgggtgaaaagaaaacaggacgagtggatcaagtttgacgatgataaggtgtctattgtgacccccgaggatatattacggctgagtggaggaggcgattggcacatcgcctatgtgttgttatatggaccgcggagggtcgaaataatggaggaggagtctgagcagtag

SEQ ID NO: 210568 - DNA, 2382 bp, synthetic construct
  misc_feature 1..2382: note = Description of Artificial Sequence: Synthetic coding sequence
  source 1..2382: mol_type = other DNA
atgcccgccggccccgtgcaggccgtgcccccccccccccccgtgcctaccgaaccaaagcagcctaccgaagaagaggcttcttcgaaagaggatagtgccccatctaaacctgtggttggaattatctatcccccccccgaagtgcgcaacatcgtcgacaaaactgctagttttgtggctcggaatggcccagagtttgaagctcgcattaggcagaacgagatcaacaatccaaaattcaacttcctgaatcccaatgacccatatcacgcttactatcgccacaaagttagcgagttcaaagagggcaaggctcaggaaccaagtgccgcgataccaaaagtgatgcagcagcagcagcagaccacccagcagcagctgccacagaaggtgcaggcccaagtgatccaggagaccatcgtgccaaaggagcctccccctgagttcgaattcatcgccgatcctcctagcatcagcgcttttgacttggatgttgtcaaactgacggcccaattcgtagctcgcaacggcagacaattcctcacgcagcttatgcagaaggagcagagaaactatcagtttgacttccttaggcctcagcattcgctgtttaactatttcactaaactggtcgagcagtataccaagatattaatccctcctaaaggtctcttttcaaaactgaagaaggaggctgagaatcctagggaggtcctggaccaggtttgctacagggttgaatgggcgaagttccaagaaagagagcgtaaaaaggaagaagaagagaaggaaaaagagcgcgtggcatacgcccagatcgactggcatgacttcgtggtggttgaaacagttgacttccaacctaacgagcaggggaattttccccctccaactactcctgaggagctgggcgctcggatccttatccaggagaggtacgagaaattcggcgagtccgaggaggtagaaatggaggttgagagcgacgaggaggatgataagcaggagaaagccgaggaacctcccagccaactggatcaagatactcaggtgcaagatatggatgaagggagcgacgacgaagaagaaggacagaaagtcccaccgcctcccgaaacaccaatgccaccgcccctgccccccactccggaccaagtgattgtgaggaaagactacgacccaaaggcctcaaagcctctgcctccggcacccgctcccgatgaatacttggtgagcccgattaccggagaaaagatccctgccagtaagatgcaggagcacatgagaattgggctgttggaccctagatggctggagcaacgggaccgctccattcgagaaaaacagagtgatgacgaggtttacgcccctggcctggacattgagtcctcattaaaacagcttgccgaacggcgcaccgacatttttggagtggaggagaccgcgatcgggaaaaagattggcgaagaggagatacaaaaacccgaggagaaagttacttgggacggacacagtggatctatggcccggacccagcaagctgcccaggctaatatcacattacaggagcagatcgaagctatccacaaggctaaaggccttgttcctgaagacgatacaaaagagaagattggacccagtaagcccaacgaaatacctcaacagcccccacctcccagcagcgctaccaatatcccttcttccgcacctccaataacatccgtcccacgtcctcctacaatgccaccccctgtacgaactaccgtggtatcagccgtcccagtcatgccaaggccacccatggcctctgtggtgcggctcccaccaggatcagtgattgctcccatgccccctatcatccacgccccccgtattaatgtcgtacccatgcctccttctgcccctcctattatggcgcctagacctcctccaatgatcgtgccaaccgcatttgtccctgccccgccagtggcgccggtgcccgctccagccccaatgccccccgtgcaccccccaccacctatggaggatgaaccaaccagtaagaagctcaagaccgaagacagtctgatgcctgaagaggaatttctgagacggaataagggccccgtgagcattaaagtacaggtcccaaacatgcaagataaaaccgaatggaaacttaacggccaagtgctcgtgttcactctgcccctgacggaccaggttagcgtgatcaaggttaagattcacgaggcgaccggcatgcccgcaggaaaacagaaactccagtacgaaggcatctttatcaaagatagcaactcgctcgcctattataacatggcaaatggcgctgtgattcaccttgcactcaaggaaagaggggggcgcaagaagtag

SEQ ID NO: 210569 - DNA, 732 bp, synthetic construct
  misc_feature 1..732: note = Description of Artificial Sequence: Synthetic coding sequence
  source 1..732: mol_type = other DNA
accatccgggtgaaggacagcctgatctgcgtggactgcgccatggagtcttcccgaaatagttctatgctgaccctacctctgagcttatttgatgttgactcgaagccactcaaaactctcgaagacgcactacactgttttttccagccacgagagctgagttccaagtctaagtgtttctgcgaaaattgcggaaaaaagaccagagggaagcaagtgctgaaattgacccacctgcctcagacgcttacaattcacctgatgcggttcagcatccgaaatagtcagacaaggaaaatttgtcatagcttatactttccacaatctttagatttctctcagattctcccgatgaagagggaatcctgcgatgccgaagaacagagtggcggtcagtacgaactgttcgccgtgatcgctcacgtgggaatggcagattctggccactactgtgtctatatccgtaatgctgtagacggtaagtggttttgttttaacgactctaatatctgcttggtcagctgggaggatatccagtgtacctacggcaatccgaactaccactggccacccttcctctgtcacgcttgtatcctgatagaggacggggagtatctcaggctattccgcccggccaatatccgccagttcacctcacgcgaggagacatgggtggaatgttggtgtgtcttaacattgcaatgtaagcagttgcagcaggtatggtag

SEQ ID NO: 210570 - DNA, 1698 bp, synthetic construct
  misc_feature 1..1698: note = Description of Artificial Sequence: Synthetic coding sequence
  source 1..1698: mol_type = other DNA
atgccccaggccagcgagcaccggctgggccggacccgggagcccccagtcaacatccaacctagagttggcagcaaactccccttcgctccgcgcgcgcgctccaaggaaaggcgtaaccctgccagcggccctaatcccatgttacgccccctccctccgcggcccggcttaccagatgagcgacttaagaagcttgaactcggcaggggaaggacctctggccctcggcccagaggaccgctgagggctgatcatggcgtgcctctcccagggagtcccccacctacagtggcactgcctttacctagcaggacgaacctggcgcgctctaagtctgtcagttcgggggatcttcgccctatgggaatcgccctcggcggccaccgcgggacaggcgaattgggcgccgcactgtctcgcttggcccttaggcctgagcccccgacattgagaagaagcacaagcctccgacgcttaggcgggttccctggccctcccacattgttctcaattagaactgagcctcccgcatcccatggatctttccatatgattagtgcacggtcttctgaacccttctacagcgacgacaagatggcgcatcacaccctactgctgggaagcgggcatgtgggactgcggaatctcggcaacacatgctttttgaacgccgtcttgcaatgcttgagctctactcgaccactgcgtgatttttgcttacggcgcgattttagacaagaagttcctgggggcggacgggcccaagagctaacagaggccttcgccgatgtgattggagctctatggcaccctgatagttgtgaagctgtgaacccaactagattcagggctgtctttcagaaatatgtaccttctttttccggctactcccagcaggacgcccaggagttcctcaagctgctgatggagaggctgcacctcgagattaacagaagaggtaggcgggctcctccgatactggcaaacgggccggtaccttcaccgcctagacgggggggcgccttgcttgaagaacccgagctgagcgacgatgaccgggccaacctcatgtggaagagatacctggaaagggaagactccaagatagtggacctcttcgtgggacagctgaagtcatgcctgaagtgtcaggcctgcggctaccgatccacaacattcgaagtcttttgtgatctgtccctgccaataccaaaaaagggcttcgctggcggcaaagtatcgctgcgcgattgctttaacttgttcacaaaagaagaggaactcgagagcgaaaatgcccccgtgtgcgaccgctgccggcagaagactcgtagcaccaagaaactgactgtccagaggttccctcggatccttgtactccacttgaatcgattcagtgctagtcgaggcagcattaagaagagttcagtgggtgttgatttccccctgcaaagactctccctaggagactttgcctctgataaagcagggagtccggtgtaccaactatacgccctgtgtaatcatagtgggtcagtgcactatgggcattacactgctttatgtagatgccagacaggctggcacgtctacaacgactctcgggtctcccccgttagtgagaatcaggtcgcatcctccgagggatatgtcttattctaccagctgatgcaggaacccccacggtgtctttag

SEQ ID NO: 210571 - DNA, 1656 bp, synthetic construct
  misc_feature 1..1656: note = Description of Artificial Sequence: Synthetic coding sequence
  source 1..1656: mol_type = other DNA
atgccccaggccagcgagcaccggctgggccggacccgggagcccccagtgaacatccaaccaagggttggatccaaacttccatttgcgccacgagcacgatccaaggagaggaggaacccagcttccggccctaaccctatgttgcgcccgcttccaccaaggccaggcctcccagatgagcggctaaaaaagctcgaactgggccggggcagaactagcggcccccgaccccgaggccctctacgcgccgatcacggagtaccccttcctggcagccccccgcccacagtcgccctgccactgcccagccgcaccaatctggcacggtctaaatcagtcagcagcggcgatctgcgcccaatgggcattgcgctcgggggacatcggggcaccggggagctcggggcagccctgtccaggctggcactccggccagagccacctacattaaggcggtctaccagcttgcgcaggctgggcggattcccaggccctcctactctttttagtatccgaactgagcctccggctagccacgggagcttccacatgatttcggcaagatcttctgaaccgttttatagtgatgataagatggcgcaccatacactgctgttaggatccggtcacgtcggactgcggaacttgggcaatacatgttttcttaacgcggtcctgcagtgccttagctctactagacccctccgggacttctgcctccggcgtgatttcaggcaggaggttcccggcggggggagggcccaggagctcaccgaggccttcgcagacgtaattggcgccctgtggcatccggactcttgcgaagcggtcaatcccactcgatttcgcgctgtcttccagaaatacgtgccctcattcagcggatacagccagcaagacgcccaggagtttctcaagctgctgatggagcgactgcatcttgagatcaatcggagaggtcgacgtgccccacccatcctggctaacggccctgtcccatcaccacccagacgggggggcgccctgctggaagagcctgaactgagcgacgatgatcgcgcaaatctcatgtggaaacgctatctcgaacgtgaggattccaagatagttgatctcttcgtagggcagcttaagagttgtctgaagtgtcaggcatgtgggtaccgctcaacaacattcgaggtattctgtgacttatccctgccaatccctaaaaagggcttcgctggcggtaaggtcagcctccgcgactgtttcaatctgttcaccaaagaagaggagctggagtctgaaaacgctcctgtatgcgatcgatgccgtcagaagactcgatccaccaaaaagctcactgtgcagcgctttcctcgcatcttggttctgcatctgaacagattcagcgcatcccgggggagcatcaagaagagctcagtaggagtagacttcccgctccagcgcctaagtctcggcgactttgcatcggacaaagcagggtctgtccactatgggcactacacagccctgtgtcggtgccagactggttggcatgtgtacaacgatagcagagttagccctgtatcagagaaccaggtggcgtcctctgagggctatgtgctgttctatcagctcatgcaggaacctcctagatgcttgtag

SEQ ID NO: 210572 - DNA, 1698 bp, synthetic construct
  misc_feature 1..1698: note = Description of Artificial Sequence: Synthetic coding sequence
  source 1..1698: mol_type = other DNA
atgccccaggccagcgagcaccggctgggccggacccgggagccccccgtgaatatccagccccgcgtcggtagtaagctccccttcgcacccagggctcgctctaaggaacggcgcaacccggcgtccggacctaatcccatgctgcggccgctgcccccccgaccagggctcccagacgagaggttaaagaaattggaactgggaaggggccgaactagcggccccaggcctcgaggtccgctgagagcagatcatggagtgcctctccctggtagtccccctcctactgtggctctccctttgccctctaggaccaacctggctcgcagcaaatccgtgagttcaggagaccttaggcccatgggaatcgctctcggaggccaccggggcacaggcgaattgggggcagcattgtccaggctggccctgaggccagagccgcccactctccgccggtcaaccagtttgcggcgtttgggcggcttccccggtccccctacccttttttctattcgcactgaacctcccgcatctcatggcagttttcatatgatatccgcacgatcctcagaacccttctacagcgatgataagatggctcatcacacacttctcctgggctcagggcacgttggcctccgaaacctgggcaacacatgcttcctaaacgccgttctgcagtgccttagctcaacacgacctctgcgcgatttctgcttacggcgggacttcaggcaggaagtcccaggcggtggtagggcccaggaactgacagaagcattcgccgatgtgataggggccctgtggcaccctgattcatgcgaagctgttaaccccactcgtttccgggctgtttttcagaagtatgtgccgtctttctcgggttactctcagcaggacgcccaggagtttttgaagctgctgatggaaaggttacacctggaaattaacagacgggggcgcagagccccacctattctggcaaacgggccagtaccatccccacctcggcgggggggtgcattactggaggaaccagaactatccgacgacgacagagcgaacctcatgtggaagcgttacctagagagggaagatagcaagattgttgatctctttgtcggacagctgaaatcatgtctgaaatgtcaggcctgtggttatcgatcaactacttttgaagtgttttgcgatctttcactgcccataccgaaaaaggggtttgctggaggtaaagtttccctgcgtgattgtttcaatttattcaccaaagaggaagaactggaatcagagaatgctcctgtgtgtgaccgatgcagacaaaaaacgagaagcacgaaaaaactcacagtgcagcgatttcccaggatactggttctgcacctgaaccggttcagcgctagtagggggagcataaaaaagagctccgtcggggtggatttcccgttacagcggctgtccctgggggatttcgcctctgacaaagccggttcccctgtctatcagctgtacgcactgtgcaatcacagcggctccgttcactatgggcactacactgctctgtgccggtgtcagacagggtggcatgtctataatgacagtagggtgagccctgtgtctgagaatcaggtagcttcgagcgagggttacgtgctgttctatcagctgatgcaggaaccacctaggtgtctgtag

SEQ ID NO: 210573 - DNA, 1578 bp, synthetic construct
  misc_feature 1..1578: note = Description of Artificial Sequence: Synthetic coding sequence
  source 1..1578: mol_type = other DNA
atggtgagccggcccgagcccgagggcgaggccatggacgccgagctggctgtggcccctcccgggtgtagtcatttaggttccttcaaggtcgataattggaaacaaaatttgcgggcaatctaccagtgctttgtttggagcggcaccgctgaagctcgaaagcgcaaggcgaaaagctgcatctgtcatgtgtgcggcgtgcatttgaatcgtctgcactcgtgcctatactgcgtcttcttcggatgtttcaccaagaagcacattcacgagcacgccaaggcaaagcgacacaatcttgctattgatttgatgtatgggggcatttactgtttcctttgccaggactacatttacgacaaggacatggagataattgccaaggaagaacagaggaaggcgtggaagatgcagggcgtgggggaaaagttttcaacttgggaacccacgaaacgtgaactcgaattgctgaaacacaacccaaagagaagaaagatcacctcaaactgcacgattgggctgaggggtctgattaacctcggcaacacgtgtttcatgaactgtatcgtacaggctttaacacataccccgctgctgcgagacttctttctgtcagacagacatcggtgcgaaatgcagtccccatctagctgcttggtttgtgaaatgagcagcctgtttcaggaattctactccgggcaccggagtccccacatcccatataaactgctccacttggtctggacacatgcacggcacctggctgggtatgagcaacaggatgcgcacgaatttctgatcgccgcgttggatgtccttcatcggcattgcaagggagacgacaacgggaagaaagctaataacccaaaccactgcaattgcatcatcgaccagatctttacaggtggcttgcagagcgacgtcacttgccaggtttgccacggcgtaagcaccacaattgaccctttttgggacataagtctggaccttcccggttcatcaactcccttttggcctctctcgcctggctctgaagggaatgtcgtcaacggagaatctcacgtgagtggaacgacgacgctgaccgactgcctgcggaggtttactagacccgagcacctcgggagtagcgcaaagattaagtgcagcggctgccactcataccaggaaagtactaaacaactgactatgaagaagctgcctatcgtagcctgtttccatctcaagagattcgaacacagcgccaagttaagacggaagatcacgacgtacgtgtcattcccactcgagctggatatgaccccttttatggcatctagtaaagaaagcaggatgaatgggcagtatcaacagcccactgacagcctgaacaacgataacaagtactccttgttcgctgtggtcaaccatcaagggacactggaatctggacactacactagctttatcaggcagcacaaggaccagtggtttaaatgcgatgatgcgatcatcaccaaggcgtctattaaggatgtcctggactcagaggggtacctgctgttctaccacaaacaatttctggagtatgagtag

SEQ ID NO: 210574 - DNA, 1782 bp, synthetic construct
  misc_feature 1..1782: note = Description of Artificial Sequence: Synthetic coding sequence
  source 1..1782: mol_type = other DNA
gccgccgccgcccggggccggtgcctgccctgcagcctgcccagcgccatcgcccagccacatttgtgccccgcgagtgctctttgttctcgacgtcccggcctgggacagccggggcaacccccatcttcaccccatgccgctctggcctcttcttctcctccctcaccgcccccacctgcccgtgggagggcattacccccaatggtgtcgcgccctgagccggagggcgaggctatggatgcagagctggcggtggctccgcccgggtgtagccatttggggtcattcaaggtggacaattggaaacaaaacttacgggctatctatcagtgctttgtttggagcggtactgctgaggcccggaagcggaaggctaagtcatgtatatgtcacgtatgcggcgtacacttgaatcggctacactcttgcctctactgcgtctttttcggttgtttcactaagaaacatatacacgaacacgccaaagccaaacgacacaatctcgctatcgatctaatgtacgggggaatctattgcttcctctgtcaagactatatctacgacaaggacatggagataattgctaaagaggagcagcggaaggcctggaaaatgcagggagtcggcgaaaagttctcaacttgggagccaacgaagcgggagctggaactcctgaagcataaccccaagagacgaaaaatcacatcgaattgcacaatagggctgcgcggcttaataaatctggggaacacttgttttatgaattgtatcgtgcaggcgctgacccatacccccctactgcgggacttcttcctgagtgatcggcacaggtgcgagatgcagtctccttcttcttgcctggtatgtgagatgagctcactgtttcaggagttttactctggacaccggtcacctcatatcccttataagctgctccacctggtctggacacatgcacggcacctggcgggctacgagcagcaggacgcccacgagttcctcatagctgccctggatgtgctgcatcgacactgtaagggcgacgataatggtaaaaaagccaacaacccgaaccactgcaattgtatcattgatcagatcttcacaggggggttacagtccgacgtgacttgccaagtgtgccatggagtatctacaacgattgatcctttctgggatatatcgttagacctgcctgggtcctccacacccttctggccactatcacctggatccgagggcaacgtcgtcaacggggagtctcacgtgtcaggaactactacactgacagattgcctgaggagatttacccgccccgagcatcttggctcttccgcaaaaatcaagtgctctggctgtcactcctaccaggagagcaccaaacagctgacaatgaaaaagttaccaatagtggcctgttttcatctcaaacgattcgagcactctgccaaacttaggaggaagataacgacttacgtgtccttccctctggaactggacatgactccttttatggcttctagcaaagagagccgaatgaatgggcaataccagcagcctaccgatagcctgaataatgataacaaatattcattatttgctgtggtgaatcaccagggtacgttggaatcaggacattacacctcttttattcgccagcataaagatcagtggtttaaatgtgatgacgcgatcataacaaaagcttccattaaagatgtgctcgactccgaaggatacttacttttctaccataaacagttcctagaatacgaatag

SEQ ID NO: 210575 - DNA, 1542 bp, synthetic construct
  misc_feature 1..1542: note = Description of Artificial Sequence: Synthetic coding sequence
  source 1..1542: mol_type = other DNA
atggcccccggctggcccagcctgagcgccggcagccggcaggaggccccgcagctggcggccggtggatcagcctatcaagccgttgggcgacagttccagccgagagccacagcactgcagggacctagtcaggcgaaatcctgcatctgccacgtttgcggcgtgcacttaaaccgattacatagctgcttatactgcgtgttcttcggatgtttcacgaaaaaacacatccacgagcatgccaaggcaaagagacataatctagcgattgatctcatgtacggaggcatttactgtttcctatgccaggactatatctatgacaaggatatggaaatcatcgccaaggaagagcagcgtaaagcatggaagatgcaaggggtgggtgaaaaatttagtacatgggagcctacaaaaagagagctagaattgctaaagcacaaccctaagcggcggaaaatcacgtcaaattgtaccattggccttcgcggtctgatcaacttaggcaacacctgtttcatgaactgtattgttcaggcactcacccacaccccattgttgagggacttcttcctgtctgaccggcacagatgcgaaatgcagtcgcctagtagctgtctcgtgtgcgaaatgagcagcctcttccaggaattctacagtgggcacagatctccacatataccttacaagttattgcacctggtatggacacatgcaaggcacctggccggatatgagcagcaagacgctcatgagtttctgattgccgcactcgatgtcctacacaggcactgcaagggtgatgacaacgggaagaaggccaataatcccaaccactgcaattgtataattgaccaaatattcactggcggcttgcaatccgatgtgacctgccaggtttgccacggggtgagcaccactatcgaccccttctgggatataagcttagacctacctgggtcctccaccccattttggcctctgtctccggggagcgagggtaatgtggtgaatggagaatcccacgtgagcggcacaacaacactcacagattgcctccgtaggttcacgagacccgagcatctgggctcctctgctaaaatcaaatgtagcgggtgtcacagttaccaggaatcaaccaaacagctcaccatgaagaagctgccgatcgtcgcatgcttccatctcaagagatttgaacactcagcaaaactgcggcgcaagattaccacttacgtgagtttcccactcgagttggacatgactccgttcatggctagctccaaggagtcccgaatgaatggacaataccagcagcctaccgatagccttaacaatgacaacaagtattcattgttcgccgtggtcaatcaccaggggaccctggaatctggccactacacctcctttattcgccagcacaaagaccagtggttcaagtgcgatgacgctattattacaaaagcctccattaaagacgtcctcgactccgagggctaccttcttttttatcataagcagttcttagagtatgaatag

SEQ ID NO: 210576 - DNA, 7863 bp, synthetic construct
  misc_feature 1..7863: note = Description of Artificial Sequence: Synthetic coding sequence
  source 1..7863: mol_type = other DNA
atggagagcgaggaggagcagcacatgaccaccctgctgtgcatggggttttccgatcctgcgactattaggaaggctctgcgactcgctaaaaacgacataaatgaggccgtggccctcctcaccaacgagagaccgggattggattatggaggctatgaacccatggatagtgggggcggtccttctccaggcccgggcgggggcccaagaggcgatggaggcggcgacggcgggggaggaggtccaagcagaggaggaagcacagggggcggggggggattcgaccccccacctgcctaccatgaagtggtagatgccgaaaagaatgacgagaatggcaactgtagcggcgagggaattgagtttcccaccacaaatctttacgaactggaatcaagagtcctgactgatcattggagtatcccatacaaacgggaagagtccctcgggaaatgtctgctggcaagtacgtatctggccaggttggggctctccgagtcggatgaaaattgtcgcagattcatggatagatgtatgccggaagcattcaagaagttgctaacttcttccgcggtgcataagtggggaaccgaaattcatgaaggaatctacaacatgttgatgctgctcattgaattagtagcagaacgtatcaagcaggaccccatcccaacgggcctcctgggggttctaacaatggcatttaaccctgacaacgagtaccacttcaagaatcgaatgaaggtttcccagaggaattgggcggaggtgtttggagaggggaatatgtttgctgtgtcccccgtcagcacattccagaaggaaccacatggctgggtcgttgatctcgtcaataaattcggtgaattgggaggctttgccgcgatacaggccaaactgcacagcgaggatattgagctcggcgccgtgagcgcattaattcaacccttgggggtctgtgccgagtatcttaatagttctgttgtgcaacccatgctggatcccgtgatactcactacgatccaggacgtgcgcagcgtggaggaaaaggacctgaaggataaaaggctggtgtccatccctgagctgctcagcgccgtgaaactgctttgcatgcgattccaaccagacctcgtgacaatagttgatgatttgcgcctggatattctattgcggatgctcaaatccccacatttttctgctaaaatgaattcccttaaggaggttaccaagttgatagaggactctaccctctccaaatcagtgaaaaatgccatagacactgatcggcttctcgactggttagttgaaaacagtgtgctgagcatcgcccttgagggaaatatcgaccaagcgcagtactgcgaccggataaagggaattatcgagctcttgggttcaaagttgtccctagacgagcttacaaaaatctggaaaattcagtccgggcaaagtagcaccgttattgaaaatatccatacaatcatcgcagctgccgcagtcaaattcaactctgaccagctgaatcacctcttcgtgctgattcagaaatcctgggaaaccgaatccgacagagtcagacaaaagctcctgagcctgattggtaggatcgggcgcgaagccagattcgaaacgactagtggcaaagtcctggatgtcctatgggagctcgcccatcttcccaccctaccatcatccctgattcagcaagccctggaggagcaccttactatattgtcggacgcatatgctgttaaggaagcaatcaaaaggtcatatatcattaagtgcatcgaagatatcaagaggcccggagaatggagcgggctggagaagaacaagaaggacggtttcaagagcagtcagctcaacaacccacaattcgtctgggtagtccctgcgctgcgccagcttcacgaaatcaccaggagtttcatcaaacagacatatcagaaacaggataagagcatcatccaagatttgaaaaagaatttcgagattgtaaaactggttaccggaagcttgattgcttgccataggcttgccgctgcagtcgccggtcctgggggactgagcggttccaccttggtggacggtcgttacacctatcgcgagtatctcgaagcgcaccttaagtttctagccttcttccttcaggaagctactctgtatcttggctggaaccgagcgaaggagatctgggaatgcctggtgacaggtcaggacgtatgcgagttagaccgcgagatgtgtttcgagtggttcactaagggacagcatgaccttgagtcggacgtgcagcagcagctctttaaagaaaagattttaaaactggaatcctatgagatcaccatgaatggttttaacctgtttaagactttcttcgagaacgtcaacctgtgtgatcacaggcttaaacgacagggtgcacagctctacgtagagaagcttgagctaattggcatggactttatatggaaaatcgcaatggagagcccagacgaggagattgccaacgaggctattcagttgattataaattattcctatattaatctgaatccgaggctaaagaaagatagcgtgagtctccacaagaagttcattgccgactgctatactcggttggaggctgcatcgtccgccttgggaggacccacgctcacacatgcagtgacccgcgccaccaagatgctgaccgccactgcgatgcctacagtggcgacttcagtccaatctccatacagaagcactaagctggtgatcatcgagcgcttacttctgctggcagagaggtacgtcattaccattgaggatttctacagtgtccctcgcactatcctgccccatggggcctcttttcacggccatctgctgacactgaatgtgacctacgaaagcaccaaggatacattcacggttgaggcccattccaacgagaccattggctctgtgcgttggaaaatagctaaacagctgtgttccccagtcgacaatatccaaattttcacgaacgactcactcctaacggtgaacaaagaccagaagctcctgcaccagctcggctttagtgacgagcagattttgactgtgaaaacatcaggctcgggaaccccttcaggaagttccgccgactcatccacctcctcgagcagtagcagttcgggggtctttagctcctcttacgcgatggagcaggagaagtcccttcccggggtcgtgatggccctcgtttgcaatgtcttcgatatgctgtatcagctggcaaatttagaggagcccagaatcaccctccgagtcaggaagttactgctgctgattcctaccgatccggctattcaggaggccttggaccagctggactcactgggcagaaagaagaccttattgagcgagtctagctctcagtccagtaagtctcctagcctgtctagtaaacaacagcatcaaccatcggcctcttccattcttgagtccttgttccggagcttcgcccccggaatgagcacctttagggtactgtataatttagaggtgctgagctcgaaactaatgcctaccgccgatgatgatatggcccgctcttgtgctaagagtttttgtgagaactttctgaaggccggcggactgagtttagtggtgaacgtaatgcaacgtgactctatcccgagtgaagtggactacgagacgcgtcagggagtgtattccatatgtttacagctggccaggttcctgctggttggccagaccatgcccactctcctggacgaggatctgaccaaagacggtatcgaagcactatcatcacgccctttccgaaacgtaagtagacagacaagcaggcagatgtcattgtgcggcacccctgagaaatctagctacagacagctgtcggtgagtgacagaagtagcatcagagtggaggaaatcatcccggcagctagggtggcaatccaaactatggaggtgtccgattttacaagcactgtcgcctgcttcatgcgattaagttgggctgcggcagcgggccgattggacttagttgggtctagtcagccgataaaagaatctaattctctctgccctgctggaatcaggaacaggctatccagcagtggctcaaactgtagcagcggatcggaaggcgagcccgtggctctccatgccggcatttgcgttaggcagcagagcgtgtcaacgaaggatagcctgattgccggcgaagctctttcgttattggtgacttgtctgcagctcagaagccagcagctggccagcttctacaacctgccgtgcgttgcggattttatcatcgacattctgcttggatctccttccgccgaaattaggcgcgtcgcatgcgaccagctctacacacttagtcagacggatacatccgcccatcccgacgtgcaaaagcctaatcaattcctgttgggggtcatcctgaccgcccagctgcctttgtggtcccctacgtccattatgcgcggcgtcaaccagcgacttctttcccagtgcatggaatacttcgatctgcgttgtcaactcctcgacgatttgacaacatctgaaatggagcaactcaggattagtccagccaccatgttggaggacgaaatcacgtggctcgataactttgagcccaaccggacagccgaatgtgagaccagtgaagccgataatattctgttggctgggcatctgaggctcataaagacactgctgagtctttgtggggccgagaaggaaatgcttggctcaagcctgatcaaaccactactggacgactttctcttcagagcaagtagaataatcctgaattcgcatagccctgccggctccgctgcgattagccagcaagattttcatcccaagtgttccacagcaaactcccgcctggctgcctatgaggtcctggtcatgctggctgatagttctccctctaatctgcaaatcatcatcaaagaactgctttccatgcaccatcagcccgatcctgccctaaccaaagagttcgattacttgccccccgtcgacagtcggtcaagttctggcttcgtcgggttaaggaacggtggggctacctgctacatgaacgcagtattccagcagctgtatatgcagcccggtctgcctgaatccttgctcagtgtggacgacgacacagataatcctgacgatagcgtgttttatcaggtccagtcgttgttcgggcacctgatggagtccaaattgcagtactacgtccccgagaatttttggaaaattttcaaaatgtggaataaagagttgtatgttcgggaacaacaagatgcctacgaattcttcacaagcttaattgaccaaatggacgagtatctgaaaaagatgggtagagaccagatatttaagaacacattccaaggcatctatagcgaccagaagatttgcaaggattgcccacatcgttacgagagagaggaggcttttatggctctaaacctcggagtgacatcctgccagtcgctcgagattagcctagaccagttcgtgagaggcgaggttctggagggaagcaatgcctattattgtgagaagtgcaaagagaagagaattaccgtcaaaaggacatgcattaagtctctgccttccgtactggttatacaccttatgaggttcggctttgattgggaatcaggcaggtctattaagtatgacgagcagatcaggtttccctggatgctgaatatggaaccgtatactgtgagcggcatggctaggcaagatagcagctcagaggtgggcgagaacggcagatcggtcgaccagggcggagggggcagtccaaggaagaaagtcgctcttacagagaattacgaactggttggtgtgattgtccattcggggcaggcacacgccggccactactactccttcatcaaagacagacggggatgcgggaaaggtaagtggtataaatttaacgatacggtcatcgaggaattcgatctaaacgacgaaactcttgagtatgaatgttttggtggagaataccggccaaaggtctacgatcaaactaacccttacaccgacgtgaggcgtagatactggaatgcatacatgttgttttaccagagagtctcagatcagaacagcccagtgctccccaaaaaatctcgggtaagcgtggtccgtcaggaagcggaagatctgtctctgagtgccccctcatcacccgagataagtcctcagtcctcgcctaggccgcaccgcccaaataacgatcggctgtcaatcttaaccaagctagtgaagaagggggagaagaaaggcctgttcgttgaaaaaatgccagctcgaatctatcagatggtacgggatgaaaatttaaagtttatgaagaatcgggacgtgtattcgagtgactatttttctttcgtcctctctctggccagcttgaatgctactaaattgaagcacccgtactatccatgtatggcgaaagtgtctttgcagctggccatccagtttctcttccaaacttatctcaggacaaaaaagaaactacgcgtcgatacagaggagtggattgcaactattgaagccctcctgtccaaatcatttgatgcttgtcaatggctggtcgaatactttatctccagtgaagggcgagaactaatcaaaatctttctgctggagtgtaacgttcgggaggtgcgcgtcgccgttgcgaccatcctagaaaagactctagactcagctctgttctaccaagacaagttgaagagcctgcaccaattgcttgaggtactgttggctttgttggacaaagacgtgcctgaaaactgcaagaactgtgcccagtacttctttctgttcaacacctttgtgcagaaacagggtatccgggccggggacctactgctgcgacatagtgcgctccgccatatgatctccttcctactgggtgcttcacggcaaaataaccaaatcagacggtggtccagtgcccaagcacgagagtttggaaacctccacaataccgtcgccctgcttgttcttcattccgacgtgagctcccagaggaatgtggccccaggtatttttaaacagcgtccgccgatcagtatagccccatcttcacctttgctgccactccatgaggaagtcgaagccctcctgtttatgtctgagggtaagccttacttactcgaggtgatgtttgcattgcgggaactcactggtagtctgctagcactaatcgagatggtcgtctattgttgcttttgtaacgagcacttctcctttacaatgctgcacttcattaagaaccagttggagaccgcacccccccatgaactgaaaaataccttccagctactccacgaaattctggtgatcgaggatccaatccaagtcgagcgcgtaaaattcgtgtttgaaactgaaaatgggctactggcccttatgcaccacagcaaccatgtggactcgtcaaggtgttaccagtgcgtcaaatttctggtgactctcgcacagaagtgtcctgctgcgaaggagtattttaaggagaactcccatcactggtcctgggcagtccagtggctccaaaagaagatgtctgaacactactggactccacagagtaacgtgtccaatgagacgagcacaggcaaaacttttcaacgcaccatttctgcccaagacacattagcatatgccactgccttgttgaacgagaaagagcagagtgggtccagcaacggatcagaaagcagccctgctaatgagaatggagatcggcatcttcagcaagggtctgaatcgcccatgatgatcggcgagctacgcagcgatctggatgatgtggacccgtag

SEQ ID NO: 210577 - DNA, 7383 bp, synthetic construct
  misc_feature 1..7383: note = Description of Artificial Sequence: Synthetic coding sequence
  source 1..7383: mol_type = other DNA
atgaccaccctgctgtgcatgggcttcagcgaccccgccaccatcagaaaagctttgaggctggctaagaatgacattaacgaagcggtcgctctcctgacaaacgaacgacccggccttgactacggcgggtatgagcctatggactcaggtggactgagtgaatctgacgaaaactgccgtcggttcatggacaggtgcatgcccgaagcgttcaagaaactgctgacgtctagcgcggtacataagtggggcactgaaattcacgaaggcatttacaatatgctgatgctgctcatcgagttggtggccgaaaggatcaagcaggatcctatacctactgggcttctcggtgtgctgacaatggccttcaaccccgacaacgagtaccattttaaaaaccgaatgaaagtgtctcagaggaattgggcagaagtcttcggagagggaaatatgttcgccgtctcacctgtgagtacctttcagaaggagccccatgggtgggtggttgacctggtcaataaattcggtgagctgggcgggtttgcagccattcaagccaaactccacagtgaggacattgaattgggtgctgtgtccgccctgattcagcccttgggagtttgtgctgagtacctcaatagttccgttgtccaaccaatgctggaccccgtgatactaactactatccaggatgtgagatccgttgaggaaaaggatcttaaggacaaacgtcttgtgtccatacccgagctcttatccgctgtgaaacttctctgcatgcgatttcagcccgatttagttaccattgtcgacgacttgcgactggacattctccttcgcatgctgaaaagtccacacttttccgctaagatgaactccctgaaagaggtgactaagcttattgaggactctaccctgtcaaaatcggttaagaatgcaatagacaccgacaggctgctggactggctcgtggaaaatagtgtgctttcaatcgccttagaagggaacatagaccaggcgcaatactgtgaccgcattaaagggatcattgagcttctggggtcaaagttgtctcttgatgaactcacaaagatctggaagatccagagcggccagtcctcaactgttatagaaaatatccacaccatcattgctgccgcagctgtaaagtttaactctgaccagttgaatcacttgtttgtactgatccagaaggtccttgatgtgctttgggagcttgcccacttgcctaccctgccctccagcctgatccaacaggccctcgaggaacacctcacaatcctttccgacgcctatgctgtcaaagaggccataaagcggagctacataattaaatgcattgaagacattaagcgctccagccagctaaacaatcctcagttcgtatgggtcgtgcctgcgctgagacaactgcacgaaatcacccgcagctttataaagcagacctatcagaaacaggacaagtccatcatacaggatctgaagaagaatttcgagatcgttaagctggttaccggaagcttgatcgcatgtcacagattggccgcagccgtcgccggccctggtggactctccggaagcactctcgtcgatggacggtatacttatcgcgagtacctggaggctcatcttaaattcctagccttctttttgcaggaggctactctctacctcggctggaatcgggccaaagagatctgggagtgcttggtgacaggccaggatgtgtgcgagctagacagggagatgtgtttcgagtggtttacaaaagggcaacacgatctggaatctgacgtgcagcaacagttattcaaggagaaaattttgaagctggaatcttacgagatcaccatgaatggatttaacctctttaaaacattttttgaaaacgtcaacttatgtgatcatcgacttaaaagacagggagcccagctctacgtggagaagcttgagctgatcggcatggatttcatatggaaaatcgctatggagtccccagatgaggaaatcgctaatgaagctattcagcttataattaactacagttatatcaatctgaacccaaggctgaaaaaggactccgtgtccttgcataagaaatttatcgcggattgttacacaagactggaggccgccagcagtgctctaggaggacctactcttacacacgccgtcacccgggctaccaaaatgctgactgccaccgcgatgcccacagtggctacttccgtccagtccccgtaccggtcaactaaactagtgatcattgagagactcctactgcttgctgaacgctacgtaatcacgatagaagacttttacagtgtgcctcggacaatcttgccccatggggcatcttttcacggccacctgctgacactgaacgtgacatacgagtcgactaaagacacatttaccgtagaggctcactctaacgaaacgataggctccgttcgctggaagatcgccaaacagctttgtagccctgtggataatatacagatcttcacaaatgattccctcctcactgtgaataaggatcaaaagctgctccatcagctcggcttctcagatgaacagattctgaccgtcaaaacctccggctcaggaacaccgtctggcagcagtgccgatagctcgacatccagttcctcctcgagcagcggcgtcttctcatccagctatgcaatggagcaagagaaaagcctccctggagtagtgatggcactggtctgcaacgtctttgatatgctctaccagctggccaatctcgaggaaccgagaataacactaagggttcgcaaattgttactcctcatacccaccgaccctgccattcaggaggcgctggaccagctcgacagcttaggtcggaaaaagaccctgctgtctgagtcaagcagtcagtccagcaaatcaccctcccttagcagtaagcagcagcatcagccatcagccagctctattttggagtcactcttccgatcttttgcacctggaatgagcactttccgggtgctgtacaatctggaagttctgagtagcaagttgatgcctaccgccgacgatgacatggcccgatcatgtgcgaaatcgttttgtgagaactttttgaaggcaggcggcctgtccctcgtggtgaatgttatgcagagggactcgattccaagcgaggtggactacgagacccggcagggggtgtactccatttgtctacagcttgcgagatttctcctggtggggcagacaatgccaaccctgttggatgaggatttgaccaaggatggcattgaggccctatcctcacggccatttcgtaatgttagcaggcagacttcccgtcagatgtcactgtgcggaacaccggagaagtccagctaccgacagctctcagtgagtgataggtcatctatacgagtcgaggagattattcctgccgctagagtcgccattcagacgatggaggtgagcgattttacttctacagtcgcatgcttcatgaggctgtcttgggccgccgctgcgggaagactagatctggtgggctcatcccagcccataaaggaatctaattccttatgccctgccggcattagaaacagattgtcttcttccggctccaattgtagttcaggaagtgagggagaacccgttgctctgcacgccggaatttgcgtgcggcaacagtccgtaagtactaaggactcacttatagccggcgaagcgctctctctcttggtgacttgcctgcagcttaggagtcagcagctcgccagtttttataacctgccttgtgtcgcggattttataatcgacattctcttgggctctccaagtgccgaaatccgtcgagtagcatgtgaccagctttataccctctctcagaccgacacgtcagctcaccccgacgtacagaagccaaaccaatttctcctgggagtcattcttactgcacagctccctctttggagccccacctcgatcatgcggggcgtcaaccagaggttgttgtcccagtgcatggagtatttcgacctgcggtgccagcttcttgacgatttgactacatcagagatggaacaactgagaatctctcccgctactatgttagaggacgagattacgtggctggataattttgagcctaaccgaacggccgagtgcgagacaagcgaagcagataatatattgctcgccggtcatctccgtctgatcaaaaccttgctgtcgctgtgtggcgccgaaaaggagatgttgggctcctcgctgatcaagccgttgctggatgattttctgtttcgggctagtcggattattttgaattctcactcacctgctgggtcagcagccatctcccagcaggactttcacccaaaatgttctactgcaaacagtaggctggctgcttacgaggtgctggtgatgctggcggactcctcaccttcaaacctgcagataatcataaaggagctgttgtccatgcatcatcagcccgatccagccctcacaaaagaattcgattaccttccacctgtcgactctaggtcatcatccggcttcgtaggattacgtaacggaggggccacctgttacatgaacgccgtcttccagcagctgtacatgcagccagggctcccagagtcccttttgtctgtggatgatgatactgataaccctgacgatagtgtgttctatcaggttcaatccttgttcggccacctaatggagagtaaattgcaatactacgtgcccgagaatttttggaagattttcaaaatgtggaacaaggagctctacgtgagggagcagcaggatgcttatgaatttttcacctcccttatcgatcagatggacgaatatctgaaaaaaatgggccgcgaccagatttttaagaacaccttccagggtatttactcagaccagaagatttgcaaggattgcccacaccggtatgagcgggaggaagcttttatggctctgaatctcggcgtgacttcatgccagagcctcgagattagcctggaccagttcgtgcggggagaagtgctcgaaggttccaatgcctattattgtgagaagtgcaaggagaagagaattactgtgaaaagaacgtgtattaagagtttaccaagcgtgctggtgatccacttgatgagatttggatttgactgggagtctgggaggtcaatcaagtacgacgagcagatacgattcccatggatgttgaatatggagccatataccgtgtcaggtatggctaggcaggacagctcctccgaggtcggggaaaacggaaggtccgttgaccaaggcggcggggggagcccccggaagaaagtcgcgttaacagaaaattacgagcttgtgggagtgatcgtgcactcaggccaggcccacgccggacactactattcatttatcaaagaccggcgggggtgcggaaaggggaaatggtataagtttaatgatacggttatcgaagagttcgacctcaatgatgagactcttgagtacgagtgctttggcggcgaataccgccctaaagtctacgaccaaactaatccatatactgacgtgaggaggagatactggaacgcctacatgctgttttatcagcgcgtcagcgatcagaattccccggtgctgccaaaaaaaagtcgcgtgtctgtcgtgcggcaggaagccgaggaccttagcttgtccgccccttcctccccagagatctccccacagagttctcctagaccccaccggcccaacaacgaccggttaagcatcctgaccaaactcgtgaagaagggcgagaagaagggtctgttcgtggaaaagatgccagctcgtatatatcagatggtccgggatgagaatctgaagttcatgaagaacagagacgtgtattcctccgattacttctcattcgtgctcagtctggccagcttgaacgccaccaaactgaaacacccttattatccctgtatggccaaagtcagccttcaacttgccatccagttcctgtttcagacatatctgcgcaccaaaaaaaaactccgcgttgacaccgaagagtggattgccacgatcgaagctctcctcagtaagtcctttgacgcctgccaatggctggtggagtattttataagctcagagggacgtgagctgattaaaattttcctgctggagtgtaacgtgcgagaagtccgagtggctgtggccactatcttggagaagactctcgatagcgcactcttttatcaggataaactcaaaagcctccatcagcttctggaagtcctgctcgccttgcttgacaaagacgtccccgaaaactgcaagaactgcgcccaatatttttttctattcaatacattcgtgcaaaaacagggaataagagccggtgatttgctgctgcgacattccgccctgcggcatatgattagttttttgctcggggcctccaggcaaaacaatcaaattcgcaggtggtcctctgctcaggcaagagaattcggcaatctgcataatactgtggcactattggtgctgcattctgatgtttccagccagaggaatgtggccccaggcatctttaagcaacgaccgcctatatcaattgccccatctagtccccttctccccctgcatgaagaggtggaagccctcctctttatgagcgagggcaaaccctatctgctggaagtcatgtttgctctgagggaactaacaggttctctcctggcactgatcgagatggtcgtttactgctgtttctgtaacgagcattttagcttcacaatgctccactttattaaaaatcagctggaaactgcacctccacatgaacttaagaacacattccagttgttacacgagatactggtgattgaggaccccattcaagtggaacgagtcaagttcgtcttcgagaccgaaaatgggctgctggcgctgatgcatcactcgaaccatgtggattcaagtcgctgttaccaatgcgtgaaattcctggtaaccctggcacagaagtgtcccgcggccaaggagtacttcaaggagaattcccaccactggtcctgggcggtgcagtggctgcagaagaagatgtctgaacactattggaccccccagtccaacgtgagcaacgagactagcacaggaaaaaccttccagcgcaccatctctgcacaggacactttagcctatgccacagccttactcaacgagaaagaacagtctggttcttcaaacggtagtgaatctagccctgccaacgagaacggtgatcggcatctccaacagggcagtgaatcccccatgatgatcggagagctgagatctgatctggatgacgtagacccctag

SEQ ID NO: 210578 - DNA, 2742 bp, synthetic construct
  misc_feature 1..2742: note = Description of Artificial Sequence: Synthetic coding sequence
  source 1..2742: mol_type = other DNA
atggccgccctgttcctgcggggcttcgtgcagatcggcaactgcaaaaccgggatctcaaaaagcaaggaagcctttatcgaggctgtggagcgcaaaaagaaggataggctcgtgctgtactttaaaagtggcaaatatagcacctttaggctctcagataatattcagaatgtcgtgctaaaaagctacaggggaaaccagaatcatctgcatcttacacttcagaacaacaacggcctcttcattgaaggtctcagttcgacagacgccgagcaactcaagattttcctcgatcgagtgcaccagaatgaggtgcagccgccggtacgccccggtaaaggcggctccgtcttttcaagcacaactcaaaaagagatcaataagaccagctttcataaggtcgatgaaaagagctctagcaaaagctttgagatagccaagggctctggaacaggggtgctacaacgtatgccactcctgacatcaaaactgacattgacttgcggtgagctctccgagaatcagcacaagaagcgcaagagaatgctgtcctcctcatccgaaatgaatgaggaattccttaaagagaacaattccgtggagtacaagaaatcgaaagctgactgctccagatgtgtttcctacaacagggaaaagcagctcaagctgaaggaattagaagagaacaaaaagctggagtgtgagtcttcttgcattatgaacgccacagggaacccctacttagacgatattggtctgctccaggctcttacagaaaagatggtgttggtgttcttgctccagcagggttacagcgatggctacacaaagtgggataagctcaaactctttttcgaactattccctgagaagatatgtcacggacttcctaaccttggtaacacgtgctatatgaacgcggttctgcagtcgcttctcagcatcccatctttcgcggacgacctgttaaaccaaagctttccatggggtaagatccctctgaatgcgcttactatgtgcctggcccggctgttattcttcaaggacacatataacattgagattaaagagatgctgttgctcaatctgaaaaaggcgatttctgccgccgccgagatctttcatggcaatgcacagaacgacgcccacgagtttctggcacattgtctggatcagctgaaagacaacatggagaaactaaacacaatttggaaacctaagtcagaatttggtgaggacaacttccctaagcaggtctttgccgacgaccctgacacctccgggttttcctgccccgtgattaccaatttcgaactagagcttctgcacagcatagcatgtaaggcctgtggccaggtgatcctgaaaactgaactgaacaactacctgagcataaaccttccccagaggatcaaggcccatccctcctcaattcagtctacgtttgatcttttctttggggccgaggagcttgagtacaagtgtgccaagtgtgaacataaaacctctgtcggggtgcacagttttagtcgacttccccgtatactcattgtgcatctcaagcgctactcactcaacgaattctgtgctctgaagaagaacgatcaggaagtgatcattagtaagtacctcaaggtatcgtctcactgcaacgaaggcacgaggccccctctgccactctccgaggacggcgaaatcaccgatttccaacttctcaaagtcatacgcaagatgacaagcggcaacatctctgtgagttggccagcaacgaaggagtctaaggatatcctagccccccatatcggtagcgataaggagagcgaacagaagaagggccagactgtcttcaaaggcgcctctaggagacagcagcagaagtatcttggtaaaaattccaagccaaatgagttagaatctgtctatagcggcgaccgtgcctttattgaaaaggaacctctcgctcaccttatgacctatctggaagatacatccctctgtcagtttcataaggctgggggaaagcctgctagctcgcccggcacgccactgagcaaggtagactttcaaacagtccctgagaacccgaagagaaaaaaatatgtcaaaaccagcaaattcgtggcttttgatagaattattaacccaaccaaggacctctacgaagacaagaatatcagaattcccgaaaggtttcagaaagtgtctgagcagacccagcagtgtgacggcatgcggatatgtgaacaggccccacagcaggcactgccccaatcatttcccaagccaggcacacaagggcataccaagaaccttctccggccgaccaagctgaatctgcagaaatccaacagaaatagtttactggcgttaggaagcaacaagaatccacgcaacaaggatatccttgacaaaatcaagagcaaagctaaagaaaccaagagaaacgatgataagggtgaccacacctatcgtctgataagcgtcgtgagtcatcttgggaagacattaaagagcgggcattatatctgcgatgcctacgatttcgagaagcaaatttggtttacgtacgatgacatgcgggtgctggggatccaggaggcacagatgcaggaagaccgccggtgcacagggtacatcttcttttacatgcataacgagattttcgaggaaatgctgaagcgagaggaaaatgcccagttgaactctaaggaggtcgaagaaacgctgcagaaggaatag

SEQ ID NO: 210579 - DNA, 2742 bp, synthetic construct
  misc_feature 1..2742: note = Description of Artificial Sequence: Synthetic coding sequence
  source 1..2742: mol_type = other DNA
atggccgccctgttcctgcggggcttcgtgcagatcggcaactgcaagaccggtatatctaagtctaaggaggcgttcatcgaggccgtggagagaaaaaaaaaagaccgactggtgctttattttaagtcagggaagtatagtactttccgactgtccgataatatccagaacgtggttctgaagagctatagagggaaccagaaccatctgcatttaactctgcagaacaacaacggcctcttcattgagggcttgagctctactgatgcggagcaactgaagatttttctagaccgcgtgcaccagaatgaggtccagccacccgtaagacccgggaagggaggtagcgttttttcatctactacacagaaagaaatcaacaagacttcgttccataaagtggatgagaaaagttcctccaagtcttttgagatcgcaaagggctcaggaaccggcgtgctgcaaaggatgcctctcctcaccagtaagctgacgctcacgtgcggcgagctgagcgaaaaccagcacaaaaaaagaaaacgtatgctgagctcctcctccgaaatgaacgaagaattcctgaaagagaataactctgtcgaatataaaaagagtaaggcagattgttccaggtgtgtctcttacaacagggagaaacaactaaagttgaaggagcttgaagagaacaaaaagttggaatgcgagtccagctgcataatgaatgcaactggcaacccttatcttgatgatataggcctgctccaggctcttaccgagaaaatggttcttgtcttccttctccagcagggatattccgatggatacacgaagtgggacaagttaaaactcttcttcgaactcttccccgagaaaatctgtcatgggctgcctaatttgggaaatacgtgctacatgaacgctgtccttcagtctctgctttcaatcccctcctttgccgatgatctcctgaaccagtccttcccttggggcaagattcctcttaacgcattgacaatgtgtctggctcgacttctcttttttaaagatacatataatatagaaattaaagaaatgctgttattgaatctcaaaaaggcaatatccgcagccgcagaaatcttccatggtaacgcgcagaatgacgcccatgagtttcttgcccactgcctcgaccagctcaaggacaacatggagaaactgaacaccatttggaagccaaaatccgagttcggtgaagacaatttccctaagcaggtgttcgcagatgacccggacacctccggattcagttgccctgtaatcacaaacttcgaactcgagttactgcactccatcgcctgtaaggcatgtgggcaagtgatcctgaagaccgaacttaataattacctgtccattaacttgccacagcggattaaggctcatccaagttccatccagagcacctttgatctgttcttcggggccgaagaattggagtataagtgcgcaaaatgcgaacacaaaacgagcgtgggcgtgcattcattctccaggttgccccggattcttatcgtccacttaaaacgctattcactgaacgaattctgcgcgttaaagaaaaatgaccaggaagttatcatttccaagtacctgaaggtatcttcacactgcaacgagggaaccagaccccctctgccactgtcggaagacggagagatcacagattttcaactgctgaaggtgattcgtaagatgacttcaggaaatataagtgtctcatggccggcgacaaaggagagtaaggacatcttggcaccgcacatcggctccgacaaagaatctgaacaaaagaagggccagacagtatttaagggcgcctcccgcagacagcagcagaagtatctgggcaagaatagcaaacccaatgagctggagtcagtttacagcggcgatagggcctttatagagaaggaaccccttgcccacctgatgacatacctcgaggatacaagcttgtgtcaattccacaaggccggcggaaagcccgcatcttcccccggtacccccctgagcaaagtggacttccaaacagttccagaaaatccgaagaggaagaagtacgtcaaaacatccaagtttgtagccttcgaccgtatcatcaacccaacgaaggatctttacgaggataagaacattaggattcccgagcgcttccagaaggtgagcgagcagacacaacaatgcgatggtatgaggatctgtgaacaggcgccacaacaggctctgcctcaaagcttcccaaagccagggacccaaggtcacacaaagaatttgttgcggccaactaagctcaacttacagaaatctaataggaactctttacttgcactgggatccaataagaaccctcggaataaggatattctcgataaaatcaagtccaaagccaaggagacaaaacgaaacgacgacaaaggagaccacacttatcggctcattagcgtggtctcccatctgggcaagactctgaaatcagggcactatatttgcgatgcctacgactttgaaaagcagatctggttcacatacgatgatatgagggtactgggaatacaggaagcccagatgcaagaagatcgtcgatgtactgggtacatttttttttatatgcacaatgagatattcgaggagatgctgaaaagagaggaaaatgcccagctgaatagcaaggaagtggaggagaccctacaaaaagagtag

SEQ ID NO: 210580 - DNA, 3234 bp, synthetic construct
  misc_feature 1..3234: note = Description of Artificial Sequence: Synthetic coding sequence
  source 1..3234: mol_type = other DNA
atgaccgccgagctgcagcaggacgacgccgccggcgccgccgacggtcacggaagttcatgtcagatgctacttaaccagcttagagagatcactggtattcaggatccatctttcttgcacgaggctctgaaggcgtccaatggggacattactcaggccgtcagtttgttgaccgatgaacgggtgaaggaaccaagtcaagacaccgtcgccacagagcccagtgaggtggaaggttcagctgcaaataaggaagtgttagcgaaagtgatcgacctgacccatgataacaaagacgacctgcaggccgctatcgctttaagcttgctcgaaagccctaagatccaggcggacggccgggatttaaatcgcatgcacgaagctacaagcgccgaaacaaagcggagcaaacgcaaacgatgcgaagtctggggcgagaatcccaaccctaacgattggaggcgcgtagacggctggcccgtcgggttgaagaacgtaggcaacacttgctggttcagtgcagtgatacaatccctattccaactacctgagtttcgacggttagttctgagttatagccttccacagaacgtcctcgagaactgtcggtcgcacactgaaaaacgaaatatcatgttcatgcaggaacttcagtatctctttgccctcatgatgggatccaatcgcaagtttgtggatccctctgcagctctggatctcctgaaaggtgcatttcggtcttccgaggagcagcaacaggatgtgtccgagtttacccataaattgctggactggttggaggatgcgtttcaactggcggtgaacgtcaacagccctagaaataaaagtgaaaatcctatggtgcagcttttttacgggacattccttacagaaggagttcgcgaaggtaagccattctgcaacaacgagacattcggacagtatccccttcaagttaacgggtacaggaatctggacgagtgcctcgagggggccatggtcgagggcgacgtggagctcctccccagtgatcatagcgtgaaatatgggcaggaaagatggtttaccaagctgccgccagttctcacgttcgaattgagtaggtttgaattcaaccagtcgctaggtcaacccgaaaagattcataacaaactcgaatttccccagatcatttatatggataggtacatgtatcgctcaaaggagcttattaggaataaaagagaatgtattaggaaactcaaagaagaaatcaagatcctccagcagaagttagaaagatatgtaaaatatgggagcgggcctgcccgttttcctttaccagacatgttaaaatatgtaatcgagtttgcatctaccaaaccagcatctgagagctgccctcctgagtctgacacccacatgactctgcctctgtcttctgtgcactgtagcgtaagcgatcagacctctaaagaaagtacatccaccgaaagtagtagccaggacgtggagtccaccttttcgtcgcctgaagacagcctgccaaagtcaaaaccattgactagttctagaagcagcatggaaatgccctctcaacccgcgccccgcactgtgacagacgaggagatcaacttcgtgaagacctgtctgcagcggtggcgctctgagatcgaacaggatatccaggatctgaaaacatgtatcgcctccaccactcagacaattgagcaaatgtattgcgaccccttgctgcgtcaggtaccataccgcctgcatgcagtcctcgttcacgaaggtcaggcgaacgccggacattactgggcctacatctataaccagcctcgacagagttggcttaagtataacgacatctccgttacagagtctagttgggaagaagtggaacgcgatagttacggcgggttgcggaacgtgtctgcctattgtttgatgtacatcaacgataaactgccttattttaatgccgaagcagctccaaccgaatcggatcaaatgagcgaagtcgaggcgctgtctgtggagctgaagcactatatccaggaggacaattggagatttgagcaagaagtagaggagtgggaagaggagcagagctgcaaaatcccccagatggaaagctctacgaacagctcatctcaggactactctacatcacaggagcctagcgtagcttcctcacacggtgtgcgatgtttgtcttcagaacacgccgtgatagtgaaggaacagactgcccaggcaattgccaacacagcccgagcatacgagaagtccggagttgaggcggccctttctgaagtgatgctgagcccggcgatgcagggcgtaattctcgccattgctaaagccagacaaactttcgaccgtgatggttctgaggctggcctgatcaaagcctttcacgaagaatactcgaggctttaccagctcgccaaagagacgcctacctcccattctgatccccgcctgcagcatgtactggtgtatttcttccagaatgaggcaccgaagcgcgttgtcgagaggactttattggaacagtttgccgataagaatctgtcttatgatgagcggtcaatctctataatgaaggtggcgcaggccaaattaaaggagatagggccagacgacatgaacatggaggaatataagaagtggcacgaagactattctctctttcgaaaggtctccgtgtacctgctcaccggtctggagctctaccagaaaggaaaatatcaggaggctctcagttacttggtgtatgcttatcaatcaaatgctgctctgctgatgaaaggaccgaggaggggcgtgaaagagagcgtaatagcactctatagaaggaaatgccttttagaacttaacgccaaggctgcgagtttatttgaaactaatgacgatcacagcgtgacggagggcattaacgtgatgaacgaacttatcattccctgcatccatctgataattaacaacgatatcagtaaagatgacctcgatgccatagaggtgatgcggaatcactggtgctcatatcttggtcaggatatcgccgaaaatctccaactttgcttgggagagtttctcccgcgcctgctcgacccttctgccgagattatcgttctgaaagagcccccaaccatcaggcccaatagcccttatgatctgtgttcccgctttgcagctgtcatggaatcgatccagggcgtgtccaccgtcaccgtcaagtag

SEQ ID NO: 210581 - DNA, 3138 bp, synthetic construct
  misc_feature 1..3138: note = Description of Artificial Sequence: Synthetic coding sequence
  source 1..3138: mol_type = other DNA
atgaccgccgagctgcagcaggacgacgccgccggcgccgccgacggccatggaagttcttgccagatgctattaaaccagcttagggaaatcactgggattcaggacccttccttcctgcacgaagccttgaaggcaagtaacggcgatattactcaggctgtgtcactgcttaccgatgagagagtgaaagaaccatcccaagacaccgtcgcaacggaacccagcgaggtcgaagggagtgcagccaacaaggaagtgttagctaaggtcatagacctgactcatgacaacaaggatgatctgcaggctgctattgctctaagtttactcgagtctcctaagatccaagcagacggacgggatctcaaccgaatgcacgaggccacaagtgcagagaccaagcgcagtaagcggaagcggtgtgaagtgtggggtgagaatcccaatccaaatgactggcggagagtggatggctggcctgtggggttgaagaatgtcggcaatacttgttggttttccgccgtgattcaaagcctgttccaattaccggagtttcgcagactagtgctaagttattccctaccgcagaatgtacttgaaaactgcaggagccacacggagaaacggaatattatgttcatgcaggaactccaataccttttcgcattgatgatgggatcaaacaggaagttcgttgacccatccgctgcacttgatttactgaagggtgccttccggagtagtgaagaacagcaacaggatgtgtccgaatttacccacaagctgctggactggcttgaagatgcctttcagctggcagtgaatgtcaatagtccaaggaacaaatcagagaaccctatggtccaactcttctacggcacctttctgacagaaggagtgcgcgagggtaagccgttctgtaacaacgaaacgttcggacagtaccctctccaggtcaacggatatcgtaatctggatgagtgtctcgaaggcgctatggttgagggagacgtggagcttctcccatctgatcattcagtgaagtacgggcaggagaggtggtttacaaagctcccccctgtgctgacattcgagctgagtcggttcgagtttaaccagtccctgggccagccagagaagatccacaataagctggagttcccacagataatctacatggaccgctacatgtacagaagcaaagaactcatacgcaataaacgggagtgtatccggaagctgaaggaagaaattaaaatcctgcaacagaaattggagagatatgtgaaatatggttccgggccagcgcggtttccactgcctgatatgctcaaatacgtgatagagttcgcgtctaccaagccagcaagcgaatcttgcccaccagagagcgatacacacatgacacttcccctgtcctctgtgcattgttccgttagcgaccaaacctcaaaggaatctaccagcaccgagagttcttcacaggatgtcgaaagtactttctctagcccggaagactctctcccaaagagtaaaccactgacaagctcccgcagctctatggagatgccttcacagccagcaccacggacggtaacagacgaagaaatcaatttcgtgaaaacctgtctgcagcggtggaggagtgagattgagcaggacatccaggatctgaagacatgcatagcatccactacacagactattgagcagatgtattgtgacccgctcctgcgccaggtcccatacagactgcatgccgtgctggtccatgagggccaggcgaatgccgggcactattgggcatacatttacaaccagccacggcagtcttggctcaagtacaatgacatttccgtgaccgaatcgagttgggaggaggttgagcgggactcgtacgggggacttagaaacgtgagcgcatactgtctcatgtatataaatgacaagctgccctattttaatgccgaggctgcccctacggagtctgatcagatgagtgaagtagaagctttatctgttgaattgaagcattatatccaggaagacaattggaggtttgagcaagaagtggaggaatgggaggaggagcaaagttgcaaaatcccacaaatggagtcctctaccaacagctcatcccaggactattccacctcgcaggagccctcagttgccagttcccacggtgtacgatgtctcagtagtgagcatgcggtcattgttaaagagcagacagctcaggcaattgcaaacactgccagggcatacgagaagtctggcgtggaagctgcactttctgaggctttccatgaagaatacagccggttatatcagctcgccaaggaaacgcccactagccactccgatccacggctccagcacgtcctggtatacttctttcagaacgaggcacctaaacgtgtcgtggagcggaccctgttagagcagtttgccgataagaacctctcctatgatgagcgatccatctctataatgaaagtagctcaggctaaactgaaagagatcggcccggatgatatgaacatggaagaatataagaaatggcatgaagactacagtttgttccgtaaggtctccgtctacctccttaccggtctagagctgtaccagaaggggaaatatcaggaggccttatcctatctggtgtatgcctatcaaagcaacgccgcgctgttgatgaaaggaccccgccgaggtgtgaaggagtccgttattgccctctacagacgtaaatgcctgttggaattgaacgccaaggcagcatccttgtttgaaacaaacgatgaccattcggtaaccgaggggataaatgtgatgaacgaattgataatcccctgcatccatctgatcattaataatgacataagcaaggacgacctggacgctattgaggtgatgcgaaaccattggtgttcctaccttgggcaagatattgctgagaatctccagctgtgtttgggagagttcttgccacgccttctcgatccctcagctgaaatcatagttctcaaggagcctcctaccatcaggccaaactccccatatgatttgtgttcacggtttgccgccgttatggagtccatccagggggtgtctacagtcacagtgaagtag

SEQ ID NO: 210582 - DNA, 1497 bp, synthetic construct
  misc_feature 1..1497: note = Description of Artificial Sequence: Synthetic coding sequence
  source 1..1497: mol_type = other DNA
atgcagagccccccccacctggccgtgtgccggagcaacaagagcccatgggtatgtttgacatgttccagcgttcactgcggaagatacgtgaatggccatgccaagaaacactacgaggatgcgcaggttcctctcaccaatcacaagaagtcggaaaagcaggacaaagtacagcacacagtatgcatggactgctcaagctactctacctattgctaccgctgcgacgatttcgttgtcaatgacacaaagctaggcctcgtgcagaaggttcgcgaacacttgcaaaacttagaaaactccgcatttacagcagatagacacaaaaaacgtaagctcctggaaaatagcacattgaacagtaagttactcaaggtgaatggctcaaccaccgcgatttgcgccaccgggctccgcaacctaggaaacacctgcttcatgaacgcaattctccagtctctctctaatatcgaacaattttgttgctacttcaaggaattgccagctgtagaactacgcaatgggaaaaccgcaggaagacgaacataccataccagatcgcagggcgacaataacgtgagtttggtcgaggagttccggaagaccctctgcgctttgtggcagggcagccagacagccttctcccccgagtccttgttctatgttgtctggaaaataatgcccaactttaggggctaccagcaacaggatgctcacgaattcatgcgatatctattagatcacctgcatctggagttgcagggaggatttaatggggtgagtcgctctgccatattacaggaaaactcgacactttctgcctcgaacaagtgttgtataaacggagcatcgacagtggtcaccgccatttttggtggaatccttcagaatgaggtgaactgtcttatttgcgggactgaatctcgcaagttcgacccctttctggatctgtctctagacattccatcacagttcaggtcaaaacgttccaagaatcaggagaatggccccgtctgctccctgcgcgactgtctgcgatccttcaccgacttggaagaactcgatgaaacagagttgtacatgtgtcacaaatgcaagaaaaaacagaagtcaacaaagaagttttggatacagaaactgccaaaggtgctctgtctccacctgaaaaggtttcactggacagcatacctgcggaacaaggtggatacctacgtagagtttcctctgcgcggactggacatgaagtgttacctattagaaccagaaaattctgggccggagagctgcctgtacgacctcgccgccgttgttgtgcaccatggtagtggggtggggtccgggcactataccgcgtatgccacacacgaaggtcgctggttccatttcaatgacagcacggtgacgctgactgacgaggaaactgtcgtcaaagctaaggcatatattctattctacgtggagcaccaagccaaagcagggtcggacaaattgtag

SEQ ID NO: 210583 - DNA, 1563 bp, synthetic construct
  misc_feature 1..1563: note = Description of Artificial Sequence: Synthetic coding sequence
  source 1..1563: mol_type = other DNA
atggagtgcccccacctgagcagcagcgtgtgcatcgcccccgactcagcgaagtttccaaacggctcaccaagctcttggtgctgttcagtctgtaggagcaacaagagtccatgggtgtgcctcacatgttcctctgtccattgcggaaggtatgtgaacgggcatgcaaagaaacactatgaggacgcacaggtgcctctgaccaaccataagaaaagcgagaaacaggataaagttcagcacaccgtgtgcatggattgcagttcctatagtacatactgctacaggtgcgacgacttcgtcgtgaatgatacaaagctggggctcgtccagaaggtcagagagcacctccagaacctcgagaatagcgccttcaccgctgatagacataagaagcggaagttgctggagaactccactctaaactctaagttacttaaagtgaacggaagtacaactgccatatgcgccaccggcctcagaaacttgggcaacacttgtttcatgaacgctattcttcagtccctgtcgaacatagaacaattctgctgttattttaaggaactgccggcagtcgagttgcggaacggtaagactgcaggaaggagaacctatcacacgaggtcccagggagacaataacgtctctcttgtcgaagagttcaggaagacgctgtgtgccctatggcaggggagccagacagcctttagtccagaatcgctgttctacgttgtctggaaaatcatgcccaacttcaggggataccaacaacaggatgcgcatgagttcatgcgctatcttctggaccacctgcatttggaactgcaaggcggatttaatggggtttctagaagcgctatcctgcaggagaattcgactctctctgcgagcaataagtgttgcataaacggcgcttccaccgtagtcactgctattttcgggggcattctgcagaatgaagtgaattgcctgatttgtggcaccgagtccagaaagtttgacccgttcctggacctctcactcgatattccaagtcagttccggagtaaaagatcaaagaaccaggagaatgggccggtgtgctccctccgggattgtctcagatcatttactgatctggaggagctggacgagaccgaactctacatgtgccataagtgtaagaaaaagcagaagtctaccaagaagttctggatccagaagctcccaaaggtgttgtgtctgcacctgaaaaggttccattggacagcgtaccttaggaataaagttgacacctatgttgagtttcccctgagaggtttagacatgaaatgctatctcttggaacctgagaattctggccctgaatcatgtctctatgacctggccgccgtcgtggtgcaccacggttctggggtcgggtctggtcactacaccgcatatgcgactcacgaagggcgatggttccacttcaatgattccacagtcaccctgacagatgaggagacagtggtcaaggccaaagcctatatcctgttttatgtggaacaccaagcaaaggccggaagtgacaaactatag

SEQ ID NO: 210584 - DNA, 471 bp, synthetic construct
  misc_feature 1..471: note = Description of Artificial Sequence: Synthetic coding sequence
  source 1..471: mol_type = other DNA
atggagtgcccccacctgagcagcagcgtgtgcatcgcccccgacagcgccaagttcccaaatggcagcccttcctcctggtgttgctctgtatgtagaagcaacaaaagtccttgggtatgtcttacttgtagctcagtgcactgcgggcgatatgtaaacggccatgctaaaaagcactacgaggacgcccaagtgcctctcactaaccacaaaaaaagcgagaaacaggataaagtccagcacaccgtgtgtatggattgctcctcgtactccacctactgctatcgatgcgacgactttgtggtcaacgatacaaaactcggtctggtgcaaaaggtgcgggagcacctgcaaaacctggaaaactctgcttttaccgcagacagacacaagaagcgcaaactgctggagaacagcactctgaacagcaaactgttgaaggtgaacgtgttcgggcggagggtctag

SEQ ID NO: 210585 - DNA, 1071 bp, synthetic construct
  misc_feature 1..1071: note = Description of Artificial Sequence: Synthetic coding sequence
  source 1..1071: mol_type = other DNA
atggactgcagcagctacagcacctactgctaccggtgcgacgacttcgtcgttaatgataccaaacttggtttggtacagaaggtgcgagaacacctacagaatctggagaatagcgccttcaccgccgaccgccacaaaaagcggaagctgctcgaaaattcaaccctcaattctaaactattgaaggttaatggttctaccacagccatttgcgccactggcctgcgcaacctgggtaacacctgtttcatgaacgccatcctacagtcgctttctaatatcgagcaattctgctgctactttaaagagctgccagcagttgaactgcgcaacgggaaaaccgccggcaggcggacttatcatacacggtctcagggagataacaacgtctcacttgtggaagaattccggaaaaccctgtgtgcactctggcaaggctcacagactgccttctccccagaaagtctgttttatgtcgtatggaaaatcatgccaaatttcagaggttaccagcagcaggatgcccatgagttcatgcggtacttactggaccatctacatttggaactgcagggcggtttcaacggcgtgtccaggtccgctattttacaggagaactccacactgtccgcatcaaacaagtgctgcatcaacggagcttcaaccgtggtgactgccattttcgggggaatcttacagaatgaggtgaattgtcttatatgcggaaccgaatcccgaaagttcgatcccttcctagacctttccctggacattccatctcagtttaggagcaagcgcagtaaaaaccaagaaaatggtccagtctgtagccttcgagactgcctcaggtcatttactgacctcgaggaactggatgagacagagctttacatgtgccacaagtgtaagaaaaaacaaaagtccacaaagaaattttggatccagaaattgccaaaggttctgtgcttgcaccttaaaagattccattggaccgcatacctacgtaacaaggttgatacatacgtagagtttccacttcgtggtctggacatgaaatgctactactag

SEQ ID NO: 210586 - DNA, 816 bp, synthetic construct
  misc_feature 1..816: note = Description of Artificial Sequence: Synthetic coding sequence
  source 1..816: mol_type = other DNA
atgcccaacttccggggctaccagcagcaggacgcccacgagttcatgcgatacctgctggaccacctgcatctggagcttcaaggaggctttaacggtgtttcacgttccgctatactgcaagaaaacagcactttgtctgcgtctaacaaatgctgcatcaacggcgcctccaccgtggtcactgccatcttcggaggcatcttgcagaacgaagtcaactgtctgatttgtggtactgagagccgcaaattcgacccgtttctcgacctcagtttggacatcccttcacagtttaggagcaagaggtctaagaatcaggagaacgggcccgtctgctcactgcgcgactgtctccgctcctttaccgacctggaggaacttgatgagaccgagctctatatgtgccacaagtgcaaaaagaagcagaagtcgactaagaaattttggatccagaagctaccaaaagtgttgtgtctgcatttgaagaggtttcactggaccgcatacctaagaaacaaagtcgacacctacgtagagtttcctctgagagggctggacatgaagtgctatctgcttgagcccgaaaactcagggcccgagagttgcctatatgatctggccgctgtcgtggtgcatcacggctctggtgtggggtccggccactacactgcctatgctacacacgagggtaggtggttccattttaacgatagcacggtgacgctgacagacgaagagaccgtggtaaaagcaaaagcctacatactgttttacgtggaacatcaggccaaggcaggaagcgataagctttag

SEQ ID NO: 210587 - DNA, 1431 bp, synthetic construct
  misc_feature 1..1431: note = Description of Artificial Sequence: Synthetic coding sequence
  source 1..1431: mol_type = other DNA
atggagtgcccccacctgagcagcagcgtgtgcatcgcccccgactccgcaaagtttcctaacggcagtccctccagctggtgttgttctgtctgtagatctaataaaagcccatgggtgtgcttgacctgcagcagtgtccattgcggctcttaccgatgtgacgacttcgtcgtgaacgacactaaactggggttggtgcagaaagtaagggaacatctgcagaatttggagaacagcgcctttacagccgatcgtcacaagaagagaaaacttttggagaactcaacgctgaatagcaagttgttgaaagtgaacggctccacgaccgccatctgtgccacgggtttaagaaacctaggtaacacatgcttcatgaatgccatattgcagtctctgagcaatatcgagcagttttgctgctacttcaaggagctgccagctgtggagttaaggaatggcaaaacagccggacgccggacttaccacaccagatcgcaaggcgacaataacgtctctcttgttgaggagtttcgaaagaccttatgtgcactttggcagggttctcagactgcctttagccctgaatcattattctacgtcgtatggaagattatgccaaattttagagggtaccagcaacaggacgcccatgagttcatgaggtacctgttggaccacttacacctggagttgcagggcggcttcaacggggtgagccgctctgccatcctccaggaaaacagtaccttatcagcttccaacaagtgctgcatcaatggagcatccaccgtagtgacagcaatcttcggaggcatcctgcagaatgaggtgaattgtcttatttgcggcacagaatcacggaagttcgatccgtttctcgacctttccttggatatcccgagccagtttcggagtaaacggagcaaaaatcaagaaaacggtccggtctgcagccttagggattgcctccgttctttcacagatctggaagaactggatgagaccgagttgtatatgtgtcacaagtgcaagaaaaagcagaaatccaccaaaaaattttggatccaaaaactgcccaaagtgctttgcctccacttgaaacggtttcattggacagcctacttacggaacaaagtcgatacttacgtcgaatttcccctgcgcggcctcgatatgaaatgttacctgctggagcctgaaaacagcgggcccgagagctgcctgtacgatctggcagctgttgtcgtacaccatggctcgggggtcggcagtggccactacacagcctacgcgacacacgaaggccgatggtttcacttcaacgattccaccgtgaccctcaccgatgaggagacagtggtaaaagcgaaggcttatatccttttttacgtggagcaccaagctaaagcaggatctgataagctgtag

SEQ ID NO: 210588 - DNA, 168 bp, synthetic construct
  misc_feature 1..168: note = Description of Artificial Sequence: Synthetic coding sequence
  source 1..168: mol_type = other DNA
atggagtgcccccacctgagcagcagcgtgtgcatcgcccccgactctgcgaagttcccgaacggttctccctcaagttggtgctgtagtgtgtgccgctcaaataaatctccctgggtgtgcctgacctgttcttctgtacactgcgggcggatctggggcacatag

SEQ ID NO: 210589 - DNA, 1554 bp, synthetic construct
  misc_feature 1..1554: note = Description of Artificial Sequence: Synthetic coding sequence
  source 1..1554: mol_type = other DNA
atgctgagcagccgggccgaggccgccatgaccgccgccgaccgggctattcagaggtttctcaggaccggggcggcagtgaggtacaaggtgatgaagaactggggggtgatcggcgggatagcggctgcgcttgctgccggaatttatgttatctggggtcctattactgaaaggaagaaacggaggaagggattggtgcctgggttggtcaatctgggcaacacctgtttcatgaattctctactgcagggcctgagcgcctgtcccgcattcattaggtggcttgaggagtttacttcccaatactctcgagatcagaaagagcccccttcacaccagtatctaagcctgactttgctccacctgttgaaggctctctcttgtcaagaggtgactgacgacgaggttctggacgccagctgcctgctggatgtgttacgcatgtaccgttggcaaatctccagtttcgaggaacaagacgcccacgaattgtttcatgtcattacaagctcactggaggatgaaagggatcgtcaacccagggtcacccatctgtttgatgtgcatagccttgagcagcagtcggaaattaccccaaagcagatcacctgcaggacgcggggtagccctcaccctacttcgaatcattggaaaagtcagcatccattccatgggcggctgaccagcaatatggtgtgcaagcattgcgaacaccaaagtcccgttcggttcgacactttcgatagcttgtccctgtcaattccggccgctacttggggccatcctcttacactcgaccactgcctgcaccacttcatttcatccgagagtgttagggacgtggtgtgcgacaattgtacaaagattgaggccaagggcaccctgaacggggagaaggttgagcaccagcgaacaacttttgtgaaacagctcaagctcggaaagctgcctcaatgtttatgcattcatctgcagaggctgtcatggtccagtcatggcactcctttgaaacgccacgaacatgtccagtttaatgagttccttatgatggacatctataagtaccatctcctgggccacaagccttcacagcataacccaaagctgaataaaaatccaggacctactctggagctccaggacgggcctggggcccctacgcctgttttaaaccaacctggggcgcccaagacacagatcttcatgaacggtgcctgctccccatcactgctcccaacactgtccgcccctatgccgtttcctctccctgtggtccccgactactcatcatctacatatctgttccgcctcatggccgtcgtggtccatcacggagacatgcacagtggccattttgtcacatacaggcgctcccctccatccgcgcgcaaccctctctcgacttctaatcagtggctgtgggtcagcgatgacaccgtgcgcaaggcaagtctgcaggaagtgctgtcatcctctgcttaccttctcttttacgaacgcgtgctgagccgaatgcaacatcaatctcaggagtgtaaatctgaggaatag

SEQ ID NO: 210590 - DNA, 4815 bp, synthetic construct
  misc_feature 1..4815: note = Description of Artificial Sequence: Synthetic coding sequence
  source 1..4815: mol_type = other DNA
atgggcgccaaggagagccggatcggcttcctgagctacgaggaggcactgcgcagggtgacagatgtggaacttaagcgcctcaaggacgcattcaaacgcacatgcggcttgagctactatatgggtcagcactgcttcatccgcgaggttctgggcgacggcgtccctccgaaggtcgctgaggttatttattgcagttttggcgggacatctaaaggcctgcattttaataacctgattgttggcctcgtgctgttaaccagagggaaggacgaggagaaagccaagtacatctttagtctattcagttcagagagcggaaattacgtgattcgggaggagatggaaagaatgctgcatgtggtagacggcaaagtcccagatacacttagaaagtgttttagcgaaggagaaaaggtcaactacgagaaatttcggaactggctctttctcaacaaagacgcttttacgttctcccggtggttgctttccggcggggtctacgttaccctgacagacgattccgacacccctaccttttatcaaacgctcgcgggtgttacacatttggaggagtcagatatcattgatctggagaaaagatactggctgcttaaagcacagtcccgcacaggccggttcgatttggagactttcgggccccttgtcagccccccaatccggcccagccttagtgaaggcctcttcaacgcttttgacgagaatcgcgataaccacattgacttcaaagaaatttcgtgcgggctttcagcctgttgccgcggtccgctcgcggagagacagaaattctgcttcaaggtgtttgacgttgatagagatggggtgctgtcccgagtggagcttagagacatggttgtggctcttttggaggtttggaaagacaaccggactgacgacatccctgagctacatatggacttgagtgatatcgtcgaggggatacttaacgcacacgacactaccaagatgggccacctgaccctagaggactaccagatctggagtgttaagaatgtgctggctaacgaatttctcaaccttttgttccaagtctgtcacatagtgttaggacttcgtcccgccacccccgaggaagagggtcagatcattcgggggtggctggagcgggagtcacgatacgggttgcaggccggacacaattggttcatcattagcatgcagtggtggcagcaatggaaggaatacgtcaaatatgacgctaacccggtcgtgatagaaccctcttctgtgctgaatggagggaaatactcgtttggcaccgccgctcacccaatggagcaggtggaggatcgcatcgggtcatcactcagctatgtcaatactaccgaggagaagttctcagataatatatcaacagccagcgaggcctccgagacagcaggaagcggctttctttacagtgctactcctggagcagacgtgtgcttcgcgagacagcacaatacatcagataataataaccagtgcttactgggggccaatggtaacattctcttacatcttaacccccagaagcctggtgctatagataaccagccactcgtcactcaggagccagtgaaggcaacctcacttactctcgaggggggaagactcaagcgaactcctcagctgattcatgggcgagactacgaaatggtccctgagcctgtgtggagggctctgtaccattggtacggggctaacctagccctgcctcggcccgtgattaagaatagcaagacggacatacctgagttggaactgtttccacgctaccttttatttctgcgacagcagcccgccacccgcacacagcagtccaacatatgggtgaacatgggaaatgtaccttcgcctaatgccccacttaaacgggtgctcgcctatacaggctgctttagtagaatgcagaccattaaagagatccatgagtacctgagtcaaagactcagaattaaggaggaagatatgaggctgtggttgtataactcggagaattatctcactctgctggatgacgaggaccataagctggaatacctaaaaatccaggacgagcagcacctggtaatagaggtacggaacaaggatatgtcttggccagaagagatgtcctttatagctaactcaagtaagattgacagacataaagtgccaactgagaagggcgcaactggcctaagcaacctgggcaacacatgctttatgaattcgtccatccagtgcgtgtcaaacacccaacccctgactcagtattttatatcagggagacacctttacgagctgaatcggaccaatccgatcggtatgaagggacatatggcaaagtgttacggagatctggtgcaagagctgtggtctggcacgcaaaaaaacgtggctccccttaagctgcgatggactatagccaaatacgccccacggtttaacggctttcagcagcaggatagtcaagaactcctggccttcctcctggatggacttcatgaggatctgaacagggtgcatgagaagccgtatgtagaattaaaggattcagatggcaggcctgattgggaggtcgcagcagaggcatgggacaatcacctgcgcagaaaccgctccatcgtagtggacctcttccacggccagctgcgcagccaagtgaaatgcaagacttgcggccacatcagcgtaagattcgatcccttcaacttcttaagcctgcccctgcccatggactcatatatgcatctggagatcaccgtcattaagcttgacggcaccaccccggttcgctacggtctgcggctgaatatggacgaaaagtacacaggcctgaagaaacagctttccgacctgtgtggcctcaacagtgagcagatcttactggccgaagtccacggatcgaatataaagaattttccacaagacaaccagaaggttagactgagcgtcagcggttttctctgcgcctttgagatccctgtacctgtgagtcctatctctgcaagctctcctacacagacagatttttcctcctcgcctagcacaaacgagatgtttaccttgaccaccaacggcgatctgcctcgccccatttttataccgaacggaatgccaaatacagtggtgccttgcggcaccgagaaaaacttcaccaacggaatggtcaacgggcacatgccatctctgccggactctccgtttaccggttacataatcgctgtgcatcgcaagatgatgcgaacagaactgtactttttgtcatcacagaaaaataggcccagcctgttcgggatgcctctgattgttccatgcaccgtacacacgcgcaaaaaggacctgtatgatgcagtgtggatccaagtaagcaggctcgcatcacctctccccccgcaggaggcatctaaccatgctcaggattgtgacgattcaatggggtaccagtatccctttaccttgagggtcgtgcagaaggatggtaattcatgtgcatggtgcccctggtatcgtttctgcagaggttgcaagatcgactgtggggaggatcgggccttcatcgggaacgcatatattgctgttgactgggaccccacagcattacatctgagatatcagacttcccaagagagggtggttgatgagcacgagtcggttgagcagtctcgccgcgctcaagccgagccaatcaatttagattcttgcctgcgcgctttcacatctgaggaagagctcggcgagaatgagatgtattattgctcgaagtgtaaaacccattgcttggccaccaagaagttagacctttggagactgcctcctatactgattattcacttaaagcgcttccaatttgtgaatggcagatggattaagtcccagaagatagtaaagtttcccagggaatcctttgatccctcagcatttttagtgccccgcgatcccgctctttgtcaacataagcccctaactccacagggcgatgagttgtctgaacctcgcattttagcccgcgaggtgaaaaaggtggatgctcagtcatccgcaggagaagaggatgtgctcctgagtaagtccccttcctccttgtcagctaacatcattagctcaccaaagggatcaccttcgtcgagcaggaagagcggaacctcttgcccttcatctaagaatagctctccaaattccagccctagaacgttaggtcgatcaaagggacggctgcgcctcccacagattgggtcgaagaacaagctgtcatccagcaaagaaaatctggatgccagcaaggaaaatggcgcgggccaaatctgcgaactagccgatgccctgtccagggggcacgtccttggcggctcacagcccgaattagtgacgccgcaggaccacgaggtggccttggccaatggcttcctttatgaacacgaggcctgtgggaacgggtattcaaatggtcagttggggaaccactccgaagaagatagcaccgacgaccagcgcgaagacacaagaatcaagcctatctacaacttgtacgctatctcttgtcattccggaatcctgggcggtggtcattacgtcacatatgctaagaatcccaactgtaagtggtattgttacaacgactcatcatgcaaagagttgcatcccgacgagattgataccgactccgcttacatcctcttttacgagcagcagggaatcgactatgcccagttcctccctaaaactgatggaaagaaaatggcagatacctcttccatggacgaagatttcgagagcgattacaagaaatactgtgtcttgcagtag

SEQ ID NO: 210591 - DNA, 1173 bp, synthetic construct
  misc_feature 1..1173: note = Description of Artificial Sequence: Synthetic coding sequence
  source 1..1173: mol_type = other DNA
atgggcgccaaggagagccggatcggcttcctgagctacgaggaggctttacgtcgggtgacggacgtggagctgaagcgcctcaaggacgctttcaagcgtacctgcggactctcatactacatgggacaacactgttttattcgcgaggtgctcggcgatggcgttccccccaaggttgcggaggtcatctattgcagttttggcgggaccagcaagggcctgcatttcaacaatcttatagtcggcctggtcctgctgacgcgcggaaaagacgaggaaaaagccaaatacatcttttcattattcagctctgagagtggcaattacgtgattcgggaagaaatggagcgcatgctacatgtcgtggatgggaaagtgccggatactctgcgcaaatgtttctcggagggagaaaaggtgaattacgaaaagtttcgaaattggctgtttctgaacaaagacgcttttacattctcgcggtggctcctcagcggtggtgtttacgtgacactcacagacgactctgatactcctaccttctatcagacactggctggagtaacgcacctggaagaaagcgatatcattgatctggaaaaaaggtattggttactgaaggcccagagtcgcacaggcaggtttgacctcgagactttcgggcctctcgtgtcaccacctattcgaccttcactgtctgaaggactgttcaacgcctttgatgagaaccgggataatcacatcgatttcaaggaaatctcatgcgggctgagcgcctgttgccgtggcccgcttgcagaacgccagaagttttgttttaaggtctttgatgtggatcgtgatggggtactgagcagagtggagttgagggatatggttgttgccctattagaagtctggaaggacaacaggaccgatgacattcccgaactacacatggatctttcggacatcgtggaagggatcctgaatgcgcatgacacaaccaagatgggacatttaaccctagaggactatcaaatctggtcagtaaagaatgtgctggccaatgaatttctgaatttgctgttccaggtgtgccacattgtgctgggcctgcggcctgcaacgcccgaagaggagggccagatcattaggaccctggagaccgaccagatctataccagaaattag

SEQ ID NO: 210592 - DNA, 3372 bp, synthetic construct
  misc_feature 1..3372: note = Description of Artificial Sequence: Synthetic coding sequence
  source 1..3372: mol_type = other DNA
atgcccatcgtggacaagctgaaggaggccctgaagcccggccggaaggacagcgccgatgacggggaactcgggaagcttctggcctcgtcggccaagaaggtgcttctgcaaaaaatcgagtttgagcccgcatctaagagttttagttaccagctggaagcactcaagtccaagtacgtcttactcaacccaaagaccgaaggcgccagtaggcataagagcggcgatgaccctcccgcaagacgtcagggctccgagcacacctacgaaagctgtggagacggagtgccagcccctcagaaggtcctgttccccacggagagactctctctcaggtgggaaagggtcttcagagtcggtgccgggctgcacaacctcggcaacacctgctttctcaacgccaccatacagtgtttgacatacacgccaccactcgcaaactatcttctgtctaaggagcatgccagaagctgccatcaagggtcattctgcatgctatgtgtgatgcagaatcacattgtgcaggctttcgctaattccggcaatgcaatcaaaccagtcagcttcattcgagatctgaaaaagatcgccaggcacttccgattcgggaatcaagaggatgcccacgagttcctccggtataccattgacgcaatgcagaaggcatgtcttaatggctgtgccaaactggaccggcagacccaggccacaactctcgttcatcagatcttcggaggctacctccggtcacgtgtcaagtgttctgtttgtaaatcagtaagtgacacttatgatccataccttgatgtggctcttgagatcaggcaggccgccaacatcgtcagggccctggaattgtttgtgaaagcagacgtattgtcaggcgagaatgcatatatgtgcgccaagtgcaaaaagaaagtacccgcctcaaaacgatttacgattcataggactagtaacgtgctgaccttatctttaaaacgattcgcgaacttctcgggaggaaaaataacgaaggatgtgggctatcctgaatttctcaacatcagaccttacatgagccagaataacggtgatccggtaatgtatggactgtatgctgtcctggttcatagcggctattcgtgccacgcaggtcactactattgctatgtgaaggccagcaatggccagtggtaccagatgaacgatagcttagtacatagtagcaatgtaaaggtcgtgctgaaccagcaggcatacgtgctgttctacctcaggattccagggagtaagaagtcaccggaagggctcatctcacggacaggctcctcatctctgcccgggcgcccgagtgtgattcccgatcactcaaaaaaaaacatcggcaacgggatcatttcatcacccctgacgggtaaaagacaggatagtggcaccatgaaaaagcctcatacaacagaagagataggggtcccgatttcccgcaacgggtccacactcggcctaaagagccaaaacgggtgcattcctcctaagttgccaagtgggtctccatcaccaaaactgagtcagaccccaacccatatgcccaccatcttggacgatccgggaaaaaaagttaagaaacctgcccccccccagcacttttcgccacggactgcacaaggattgcccggaactagcaatagcaattctagccgcagtggtagtcagaggcagggctcgtgggactccagagatgtcgtactgagtacctccccaaagttgctagctaccgccacagctaacgggcacgggctgaaaggcaatgatgaaagcgctggtcttgatcggcgtggttcctctagtagtagtccagaacacagcgcctcttccgattcaactaaagcaccacagaccccccgctccggtgcagcgcacctgtgtgattcccaggagaccaactgcagcactgcagggcattcgaagactcccccttctggcgcagacagcaagactgtgaaattgaaaagcccggtgctgagtaacaccaccaccgagcctgctagcacaatgagtccacctccagctaagaaactggcattaagtgcgaaaaaggcctccacattgtggagggctactgggaacgatctacggcctccacccccgtcaccatcttccgatcttactcatcccatgaaaacctcccatcctgttgtggcttcaacctggcctgtacacagggcccgggccgttagccctgcccctcaatcgtcctcacggctgcaacctcctttcagcccacatcccaccctgctgtctagcacacctaaacctcctggaactagcgaaccgagatcctgcagttcaatcagcaccgcactgccccaggttaatgaggacctggtgtcactgccccaccagctccccgaggcttcagaaccaccccagagcccgtccgaaaagcggaagaagacctttgtgggggagccacagagattgggctcggaaacacggctcccccagcacattcgggaagcaaccgcggcccctcacgggaagcgcaaaagaaagaaaaagaagagacccgaggatactgccgctagtgctctccaggagggccagacccagaggcagcctggctctcccatgtatcgtcgagaaggccaggcccagctccctgcggtgcgcagacaggaggacggaacccagccacaggttaacggccagcaggtcggctgcgtcaccgacggccatcatgccagttctcggaagaggcggcggaaaggggctgagggtctgggtgaggagggtggtctccatcaggatccactccgtcactcttgtagtcctatgggcgatggcgatccggaggcgatggaagagtccccccggaagaaaaagaagaagaaaagaaagcaggagactcagagggcggtcgaggaggatggccatctgaaatgcccaagaagcgcgaagccacaggatgcggtggtgccagagagtagttcttgcgcaccgagtgccaacggatggtgccctggcgataggatgggtctgagtcaggctcccccagtgtcgtggaatggagagagggaaagcgacgtggtgcaggagcttttgaaatatagctctgataaggcatatggaagaaaagtgctaacatgggatggcaagatgtcggcagtgtcccaggatgcaattgaggacagccggcaggccaggaccgaaactgtggttgatgactgggacgaagagtttgaccgaggtaaggagaagaaaattaagaagtttaaaagggagaaaagacgtaatttcaacgccttccaaaaactgcagaccagacggaacttctggtccgtgactcaccctgccaaagccgcttccctaagctacagaaggtag

SEQ ID NO: 210593 - DNA, 1647 bp, synthetic construct
  misc_feature 1..1647: note = Description of Artificial Sequence: Synthetic coding sequence
  source 1..1647: mol_type = other DNA
atgcccatcgtggacaagctgaaggaggccctgaagcccggccggaaagattccgcggacgatggcgaactaggtaaactcctggcatcctctgccaagaaagtgctgcttcaaaagattgagtttgaaccagcttccaaaagcttctcctatcagctagaggccctcaagtctaagtacgtccttctgaaccctaagacagaaggcgcttctcggcacaaatccggagacgacccacccgcccgccgccaggggtcagaacatacgtatgaaagttgcggagacggcgtgcccgcccctcaaaaggtcctgttcccgacagagcgcctcagccttagatgggaacgcgtgtttcgtgtcggcgccgggttgcacaacctcgggaacacttgcttcctgaatgcaaccatccagtgcctcacttacactccaccattggctaattatctgttgtctaaggagcatgccaggtcatgccaccagggatccttctgtatgctttgcgtcatgcaaaatcacatcgtgcaagccttcgccaactcagggaacgctatcaagccggtctcttttatccgagacctgaaaaagatcgctcgccatttccgctttggcaaccaagaagacgcccacgagtttctgcggtacacgattgatgcaatgcagaaagcttgcctgaacggatgcgctaagttggatcgacaaacacaggcaactactctagtacatcaaatcttcggtggttatctccgatccagagtcaaatgcagcgtgtgtaagagcgtatctgacacctacgacccctacttagatgtggcactcgaaattcgtcaggctgccaatattgtcagagccctggaactgttcgtgaaagccgatgttctttcgggggagaacgcatacatgtgcgcaaagtgcaagaaaaaggtgccagcaagtaagaggttcacgatccacaggacctccaacgtgctgaccttaagtctgaaacgattcgcgaatttttctggagggaagatcaccaaagacgtgggatatccagaatttctcaatattaggccctatatgtcgcagaataacggcgatccggtaatgtatggcctgtatgccgtgttagtccactctggatatagctgtcacgctggtcactactattgctatgtgaaggctagcaacggacaatggtaccaaatgaatgatagcctggtgcattcatctaacgtgaaggtagtgctgaaccagcaggcatacgtgctgttttatctgcgcattcccgggtcaaaaaaaagtcccgagggccttattagccgcacaggctccagctcgctgcccgggcgcccctctgtcatcccggaccactcgaaaaagaacattgggaatggcattatatcgagcccgctgacaggcaagcgccaggactccggaactatgaagaagccccatactacagaggagatcggcgtgccaatatccagaaatggcagcaccctcggcctgaaaagtcaaaatggatgtatcccccctaagcttcccagcggatctccttctcccaaactgtcacagactcccacccacatgccgaccatcctggatgatcctggaaagaaggtgaaaaagccagcgcctccactgcctactggcatgggttag

SEQ ID NO: 210594 - DNA, 2187 bp, synthetic construct
  misc_feature 1..2187: note = Description of Artificial Sequence: Synthetic coding sequence
  source 1..2187: mol_type = other DNA
atgtgcgccaagtgcaagaagaaggtgcccgccagcaagcggttcacaatccatcgcaccagcaacgtgctgaccctcagcctgaagaggtttgcaaatttctccggtggaaaaattaccaaagacgtggggtaccctgaattcttgaatatcagaccatatatgtcccagaataatggtgaccctgtgatgtatggactctacgcagtgctagtccattccggatatagctgccatgcaggtcactattactgctacgttaaagcttctaacggccagtggtaccagatgaacgactctctcgtgcacagctcaaatgttaaggttgtcctcaatcagcaggcatacgtactgttctacttacgcatccccggaagtaagaaatcacctgagggtctgatctccagaacggggagcagtagcctgcccggtcgtccgtccgtgatccccgaccattctaagaagaatatcggaaatggcatcatctcaagtcccctgacgggtaaaagacaggattccggaacaatgaaaaagcctcacacaaccgaagagatcggggtgccaatcagtcgtaacggcagcacattggggcttaagagtcagaacggttgtatccctcccaaactgcctagcggctctccctctcccaagctgtctcagacaccaacacacatgcccaccatattggacgatcccggcaaaaaggtgaagaagcccgccccccctcagcacttctctcccagaaccgcacagggactccccggtacctcaaattctaactctagcagatccggcagccagcgacagggctcatgggattctagagacgttgtgctgagtacctcccctaaacttcttgctactgcaactgcaaatggccatgggcttaagggaaatgacgaatctgcaggattggacaggcgcggtagttcttcctcaagccctgaacattctgcctcttccgattccactaaggcaccacagacccctaggtcgggagcagctcacttatgcgactctcaggaaacaaactgtagcactgcaggtcatagcaagacccctcccagtggggcagactcaaaaactgttaagcttaaaagccctgtgttgagcaacaccacaacggagccagccagcaccatgtcgcctcccccagctaagaaattagcattaagcgctaaaaaagcaagtaccctttggagagccaccgggaacgatttgaggcctccccccccttctccttcatctgatctgacacacccaatgaaaacctcccatcctgttgtcgcctccacatggcctgtgcacagggctagagccgtgtctcccgcaccccaatcctcctctaggctccagccgccttttagtccacatcctacagcagctagcgctcttcaggagggacagacccaaaggcagccaggatctccaatgtataggcgtgaagggcaggcgcagttaccggctgtgagaaggcaggaagatgggacacagccacaggtgaacgggcagcaagtgggctgcgtaaccgatggtcatcacgcctccagcaggaagcgaagacgtaaaggagctgagggtctcggcgaggagggcggccttcatcaggatccactgcgccatagctgctcccctatgggcgacggcgatcccgaggcaatggaagagtcccccagaaagaagaagaaaaaaaaaaggaagcaagagacccagagagccgtggaagaagacgggcaccttaaatgccctaggagcgccaaaccacaggatgccgttgtcccagagtcgagcagctgcgcgccctctgctaacggctggtgtccaggagacaggatggggctgagccaggcacccccggtgagctggaacggggagcgggagtcagacgtcgtgcaggagctgctgaagtactccagcgataaagcctacggcaggaaagtgctgacatgggatggcaaaatgtctgctgtgagtcaagacgcaatagaggatagcaggcaggcacgaacggagacagtggtggacgactgggacgaagaatttgacagaggcaaagagaagaaaataaagaaattcaagagggaaaagagaagaaatttcaacgcgttccagaagttgcagacccgtcgcaatttttggagtgtcacccacccagccaaggctgccagcctcagttaccgtcgatag

SEQ ID NO: 210595 - DNA, 3372 bp, synthetic construct
  misc_feature 1..3372: note = Description of Artificial Sequence: Synthetic coding sequence
  source 1..3372: mol_type = other DNA
atgcccatcgtggacaagctgaaggaggccctgaagcccggccggaaggattcagccgacgatggggaactgggtaaattgctggcgagtagcgccaaaaaggttcttttgcagaaaatcgaatttgagcccgcaagcaaatccttctcctatcagctggaggcactcaagagtaaatacgtattgctgaaccccaagacggaaggagctagtcgtcacaagtccggcgacgaccccccggctcgcagacagggaagcgagcacacctacgagtcttgtggggacggcgtacccgcacctcaaaaggtgctgttccccaccgaaagattgtctctgcgatgggagcgggtcttcagagtgggcgccggactgcacaatctgggcaatacgtgtttcctgaacgccactatacagtgtttgacctacaccccgccgttggcaaattatctcctgagcaaagaacacgcgagatcctgccatcagggctccttctgtatgctgtgtgttatgcagaatcatattgtccaggcatttgcgaactcaggaaacgccatcaagcccgtgagcttcatccgcgatctgaaaaagattgctaggcattttcggtttggcaatcaggaagacgcccatgaatttctccggtacactatagatgccatgcagaaagcgtgcctgaatggatgcgccaagctcgatcgacagacacaagccacaaccctggtccatcagatatttggaggctacctccggtcccgcgttaagtgtagcgtgtgtaagagtgtttctgacacctacgacccttatctagacgtggcgctggaaatacggcaggcagcaaatatcgtgcgcgctttggagctcttcgtgaaagcggatgtcctgagcggagagaacgcctatatgtgcgctaaatgcaagaagaaggtgccggcttccaagcgtttcaccatccaccggacatccaatgttttaacactgtctctgaagcggttcgctaatttctccggtgggaagatcacaaaggacgtgggataccccgagtttctcaatatccgcccctacatgagtcaaaataatggagacccagtgatgtacggtctgtacgcagttctggtgcatagcgggtattcctgccacgctgggcactattattgctatgtgaaagccagcaatggccagtggtaccagatgaatgactccctggtccacagcagtaatgtaaaagtcgtcttaaaccaacaggcatacgtgctcttttacctccgcatccccggctccaagaagtcgcccgagggtctcataagccgcaccggcagctcttccctgccaggcagaccttcagttataccagaccactcgaaaaagaacatcgggaacggcataattagttcaccgctgactggtaaacggcaagattccgggacgatgaagaagccccataccaccgaggaaataggggtgcccattagcaggaacgggtcaacactaggattgaaaagccaaaacggttgcattccgcctaagctacccagtggcagtccatcccccaaattgagtcaaacccccactcatatgccaaccatcctggatgacccaggcaagaaggtcaaaaaaccagcccctccccagcacttcagtcccaggactgcacagggtctaccgggcaccagtaattccaattccagtcgctctggaagccagaggcaggggtcctgggattcaagagacgttgtcctgagtacatcgcctaaactgttggctaccgccaccgctaatggccatggcttgaagggcaacgacgaatctgcgggcctcgacagacgcggctcttcctcatccagccccgagcatagcgcctcaagcgattccacgaaagccccccagacaccccggagtggggccgcacacttatgcgactctcaggaaacgaactgctccaccgcaggccacagtaagacaccacccagcggtgctgatagtaagaccgtgaaattaaagtccccggtcctgtcaaataccactacagaacccgccagcactatgtccccgccccctgctaagaagctagcgctgagcgccaaaaaagcatcgacgttgtggagagccaccggaaatgatctccgcccgccaccgccttctcccagctcagatctgacccatccaatgaagactagccacccagtcgtcgcctctacatggcctgtgcatagggcccgcgctgttagtccagcgccacagtctagcagccggctacaaccgcccttcagccctcacccgacgctcctgtccagcacaccaaaaccgccaggaaccagcgaaccaaggagttgtagttcaatctcaacggccctgccccaggttaacgaagatttggtgtcgttgcctcatcagctcccggaagctagcgagccgccacagtctccgtccgagaagaggaaaaaaacgttcgtaggtgagcctcagagattagggtcagagacacgactgccccagcacatccgcgaggcaaccgccgcccctcacggcaaaaggaagcggaagaagaaaaaacgcccagaagacaccgccgcatctgctctgcaggaagggcagacacaaaggcagcccggctctccgatgtaccgtagagaggggcaggcacagctaccggccgtgcggaggcaagaagatgggacacagccgcaggttaacgggcagcaagtgggctgcgtaaccgatgggcaccatgcatcgagccgcaaacgacggcgcaagggggccgaaggtttgggggaagagggcggactgcaccaggatcccttgagacactcatgctcacccatgggagacggggaccccgaggctatggaagagtctccgcgcaagaagaagaaaaagaagcggaaacaagagacccagagagccgtggaggaagacggacatctgaagtgccctcgctccgctaaaccacaggacgccgttgttccggaaagcagctcttgcgccccttccgctaacggctggtgccctggtgacagaatggggctaagccaggccccccctgtgtcctggaacggagagagagagtccgatgtggtccaagagctgcttaagtactcatcagacaaagcatatgggcggaaagttctcacttgggacgggaaaatgtccgcagtatcacaggatgcgattgaagatagccgacaggctaggaccgaaacagttgtcgacgattgggatgaggaatttgatcgcggaaaagagaaaaaaatcaaaaagtttaaaagggagaagcgaaggaattttaacgcattccaaaagctgcagacacgaagaaatttttggtctgtgacacacccagctaaagctgcctctctaagctatagacgatag

SEQ ID NO: 210596 - DNA, 1698 bp, synthetic construct
  misc_feature 1..1698: note = Description of Artificial Sequence: Synthetic coding sequence
  source 1..1698: mol_type = other DNA
atgagcggccggagcaagcgggagagccggggcagcacccggggcaagcgtgaatcagagagtcgggggtcgagtggcagggtcaagcgagagcgcgatagggagcgcgaacctgaggcagcatccagcagaggatcacccgtccgggttaaacgggagtttgagccagccagcgctcgagaggctcctgcctctgttgtgccgtttgtgcgggtcaaacgggagcgagaggttgatgaggactcagagcctgaaagagaagtcagggcaaagaatggccgcgtggattcggaagatagaagatcccgccactgtccttatttagataccatcaaccggagtgttctggacttcgatttcgagaaactctgctcaatctccctgagccatataaatgcttatgcctgtcttgtatgtggcaagtatttccagggccgaggactcaagtcacatgcttacatacacagtgtacagttttcccaccacgtcttcctgaatctgcacacactgaagttctattgcctgcctgacaattacgagatcatcgacagtagtttggaggacattacctatgttctgaaacctacttttaccaaacagcagattgccaatttagacaaacaggctaaattaagcagggcctacgatggaacgacctatcttcccggcatcgtcgggctaaacaacattaaggcgaacgactacgcaaacgctgtgctgcaggctctcagcaatgttccgccactgcgcaactatttcttagaagaggataactacaagaacattaaaagaccgcccggggacataatgttcctcctagtacaaaggtttggagagttgatgcgaaagctatggaaccctcgcaacttcaaagcccatgtctcgccgcacgaaatgttacaggcggtggtattgtgctccaaaaaaacttttcaaatcacgaagcagggtgatggcgtcgactttctctcctggttcctcaatgcactccacagcgccctgggcggaacaaaaaagaagaagaagacgattgtgaccgacgtcttccagggaagcatgcggattttcacaaagaagttaccacaccccgatctgccggccgaagagaaggaacaactcctgcacaatgacgaatatcaggagacaatggtggaatctacctttatgtatctgaccctcgatctgcccacagcgcctttgtacaaagatgagaaggagcagttgatcattccccaggttccacttttcaacatccttgccaaattcaacggcatcacagaaaaagaatataagacatataaagaaaacttcctcaaacgcttccagctgaccaagttacccccatacctcatcttttgcataaaacggttcacaaaaaacaattttttcgtggagaaaaacccaacgatcgtcaacttcccaattacaaatgttgacctccgagaatacctgtctgaggaagtgcaagctgtacacaagaacactacttacgatcttattgccaacattgttcacgacggcaagccctctgagggctcatatcggatacatgtcctccatcatggcacaggcaagtggtacgaactgcaagatttgcaagtgacggacatattaccacagatgatcaccctgagtgaggcatatatccagatctggaagagacgggataacgatgaaacaaaccagcaaggtgcctag

SEQ ID NO: 210597 - DNA, 1698 bp, synthetic construct
  misc_feature 1..1698: note = Description of Artificial Sequence: Synthetic coding sequence
  source 1..1698: mol_type = other DNA
atgagcggccggagcaagcgggagagccggggcagcacccggggcaaaagggagtctgagagcagggggagctctgggcgggtgaagcgagagagggatagggagcgcgaaccggaagccgcgtcaagccggggctcaccggtccgcgtcaaaagagagtttgagccagccagcgcgcgcgaggccccagccagtgtggttccctttgtacgcgttaagcgagaaagagaggtcgatgaagacagtgagccggagcgcgaggtgagggctaaaaacggccgggttgatagcgaagacaggcggagtaggcactgtccctacctggacacaatcaatcggagcgtgctggacttcgatttcgaaaagctgtgttctattagcctctcacacatcaatgcctatgcctgtctggtgtgcggtaaatattttcagggccgggggctaaaatctcatgcctatatccactcagtccagttctcacaccacgtatttctgaatctgcatactctgaagttctattgtttaccagataactacgaaataattgactctagcctggaggacatcacatacgtgcttaagccaacattcaccaagcagcagattgctaacttagacaaacaggccaagctatcacgagcctacgacggtactacgtatctccccggcattgtggggctgaacaacatcaaggccaatgactacgccaatgcagttcttcaggccttaagcaatgtgcctccactccgaaactacttcttggaagaagataactacaaaaatatcaaacgccctcccggggacataatgtttctcctagtgcagaggttcggagaactaatgcggaaactttggaatccccgcaattttaaagcacacgtgtcaccacacgaaatgctgcaagctgttgtgctctgctctaagaagaccttccagattactaagcagggcgatggcgttgattttctgagttggttcctcaatgcccttcactccgcactgggaggcactaaaaagaaaaaaaaaaccatcgtgacggatgtgttccaaggctctatgaggatcttcacaaagaaacttccgcatcctgatttgcccgccgaggagaaggagcagttgctccacaacgacgagtatcaggaaaccatggtagaaagcacatttatgtacctaacactggatctgccaacggcacccctgtataaggatgaaaaggagcagctaatcatcccccaagtgcccttgtttaacattcttgcaaagttcaatggtatcactgagaaggagtacaaaacatacaaggaaaactttctcaagaggtttcaactgacgaagctgccgccttacttgatcttctgtattaaacggtttaccaagaacaatttctttgtggagaagaacccgactatcgtgaattttcccattacgaacgttgacctgagagaatacctgtccgaggaggttcaagcagttcacaaaaatacgacctatgacctgattgcgaatatagtgcacgatgggaagcccagcgaaggctcctacaggattcatgtgctccaccatggaacagggaaatggtacgaactgcaggatcttcaggtcaccgatattctgccccagatgatcaccttgagcgaagcatacatacaaatttggaaacggcgagacaatgatgaaactaatcagcagggggcgtag

SEQ ID NO: 210598 - DNA, 1389 bp, synthetic construct
  misc_feature 1..1389: note = Description of Artificial Sequence: Synthetic coding sequence
  source 1..1389: mol_type = other DNA
atgctgaccgccgtgcccagccacctgttcagcgccaagaacggccgggtggacagcgaagataggcggtctaggcattgcccctacctggacactatcaactcttttagcccattccccaccggacggggcctgaaatctcacgcatatattcactccgtgcagttcagccaccatgttttcttgaacttgcacaccctgaagttctattgcctgcccgacaattacgagataatagattcctcactggaggacatcacttacgttctcaagcctacattcacaaagcaacaaatcgcgaacctggataagcaggccaaattgtcacgggcatatgacggcaccacttatctgcctggtatcgtggggctcaataacataaaagctaatgactatgcaaacgctgtactgcaggccttgtctaacgtgcctccactcaggaactatttcctggaagaagacaattataaaaatatcaagcggcctccgggcgatattatgttcctacttgtccagagattcggtgaactgatgcgcaaactctggaacccacggaactttaaggctcatgtatctcctcatgagatgctgcaggctgtagtgttatgctcgaagaagacgttccagataacaaagcagggcgatggggtggatttcctgtcatggtttcttaacgctttgcactccgctctgggagggactaagaaaaagaaaaagaccatcgttacggatgtctttcaggggagcatgaggatctttaccaagaaactaccccacccagacctccccgccgaggaaaaggagcagcttttgcacaacgatgagtatcaagaaacaatggttgaaagcacatttatgtatctgactctggacctccctaccgcgccgctctacaaggacgaaaaagagcaactcatcatccctcaagtcccactgttcaatatcctggccaagtttaacgggattaccgaaaaggagtataaaacctacaaagagaatttcctcaagcgttttcagttgaccaaattgccaccctacctcattttttgtatcaagaggttcacaaaaaataatttcttcgttgaaaagaaccctacgattgtgaacttccctatcaccaacgtggatcttcgggaatacctctcagaagaagttcaagccgtgcataagaacacaacctatgacctgatcgccaacatcgtccacgacgggaagcctagcgagggtagttaccggatacacgtgttgcaccacggcacaggaaagtggtatgaactgcaggacttgcaggtgaccgacattcttcctcagatgatcaccctctcggaggcttacatccagatatggaaaaggcgcgataacgacgagacaaatcagcagggggcctag

SEQ ID NO: 210599 - DNA, 1467 bp, synthetic construct
  misc_feature 1..1467: note = Description of Artificial Sequence: Synthetic coding sequence
  source 1..1467: mol_type = other DNA
atgagcggccggagcaagcgggagagccggggcagcacccggggcaaaagggagtccgaaagtaggggttcctctggcagagttaagagggaacgtgatagggaacgggaacccgaagccgctagctcgcggggcagccctgttcgggtcaaacgagagtttgagccggcgagcgcaagggaagcacctgcctcagtcgtccccttcgttcgtgtcaagagggagcgcgaagtggatgaggactcagagccagagcgtgaggtgcgtgcaaaaaacgggcgtgttgacagtgaagaccggcgctctagacactgtccatacctggatacaattaaccgcagcgtgctggactttgactttgagaaactgtgctcaatatccttgagccacatcaacgcatatgcttgtctggtttgcggcaaatacttccagggcagaggtttgaagtctcatgcttacatccacagcgttcagttctcacaccatgtgttcctgaacctccatacactgaagttttactgcttacctgacaattatgaaatcatcgatagttctttagaagacattacatatgtccttaaacccaccttcaccaagcagcaaatcgcaaatcttgataaacaggcaaaacttagccgtgcctatgatggcactacgtacttaccaggcatcgtgggcctgaacaatatcaaggctaacgattacgcgaacgccgtactccaggccctcagcaacgttccaccactgagaaactactttcttgaagaggataattacaagaacataaaacgccctcctggtgacatcatgtttctccttgtgcagcggttcggcgagctgatgcgaaagttgtggaatccccgcaatttcaaggcacacgtcagcccgcacgaaatgttacaggctgtggtgctctgttctaagaagacctttcagattactaagcagggagacggggtggatttcctttcttggttcctaaacgccctacactcagcactgggcggtactaagaaaaagaagaaaaccattgtgacagacgttttccaagggagtatgagaatattcacaaaaaagctgccgcatccagatctgcccgctgaagagaaagaacagcttcttcataacgatgagtatcaggagactatggtggaatcaacgtttatgtacttaaccctcgacttgcccactgccccattgtacaaagatgaaaaggaacagctcatcattcctcaggtgccacttttcaatatcttggcaaagttcaacgggattacagagaaggagtacaaaacttataaagagaactttcttaagaggtttcagttgaccaaactccccccttacctcatattttgcatcaagcgtttcacaaagaacaacttttttgtggaaaaaaaccccaccattgtgaactttccgattactggccaggccaacggcatgaactacaagactagccggtag

SEQ ID NO: 210600 - DNA, 2892 bp, synthetic construct
  misc_feature 1..2892: note = Description of Artificial Sequence: Synthetic coding sequence
  source 1..2892: mol_type = other DNA
atggccgagggcggcggctgccgggagcggcccgacgccgagacccagaagtcagagttgggacctctcatgcgaacgacattacagagaggcgctcagtggtatctcattgacagcaggtggtttaaacagtggaagaagtacgttggattcgatagttgggatatgtacaatgttggggaacataacctgtttccaggccctatcgacaactctgggttgttcagcgatcccgagtctcaaaccctgaaggagcacctcatagatgagctcgattacgtgctggtccctaccgaggcctggaataaattactgaattggtacggatgtgtcgaaggacagcagccaatagtgcgcaaagtcgtggagcacgggctcttcgttaaacactgcaaagtcgaagtttacctgctggaattaaaactgtgcgaaaatagcgatcctacgaacgtcctgtcctgtcactttagcaaggctgatacaatcgccacaatagagaaggagatgaggaagctgttcaacattcccgccgagcgcgagacacgtttgtggaacaagtatatgtcaaatacctatgagcaattaagtaaactcgacaataccgtgcaggacgcaggcctctaccaggggcaggtgctagtcattgagccccagaatgaagatggcacctggcctagacagacgctgcagtccaagagttctactgcaccttcccgtaacttcacaacaagcccaaaatcatctgctagtccgtactcttcggtgtctgcgagcctaattgcgaacggtgacagcacgtcgacctgtgggatgcatagctccggggtgtctcggggtggtagcggcttctctgcgtcatacaattgtcaagaacctccctcctcacacatccagcccgggctctgcggattgggtaacctggggaacacctgctttatgaacagcgcccttcagtgcctctcaaacaccgctcctttgactgactatttccttaaggacgaatacgaagcggaaatcaacagagataatccactgggcatgaaaggcgaaatagccgaggcctacgcagagttgattaaacagatgtggtccggcagagatgctcatgtagcgcctaggatgttcaagactcaagtgggacgatttgcaccccagttctctggctatcagcagcaggattcccaagagctgctggcatttctgctggacggactccatgaggatctcaatcgggtgaagaaaaagccataccttgagctaaaggatgccaatgggaggccagatgccgtggtcgccaaggaggcctgggagaaccatagacttagaaacgattcagtgatcgtggacacctttcatggactgtttaagtccacactggtatgcccagaatgcgccaaagtcagcgtcacctttgatcctttttgctatttaacactgcccctgcccctgaagaaagatagagtcatggaggttttcctcgtgcctgctgatccgcactgcaggccaacccagtacagagtcacagtaccattaatgggggctgtcagcgatctatgcgaagctttaagtaggctttccgggatagccgcggagaacatggttgtggctgatgtttataatcaccgttttcacaaaatatttcaaatggacgaaggactgaaccatatcatgcctcgtgatgatatatttgtttacgaggtgtgttccaccagtgtggatggcagcgagtgtgtcacccttcccgtatactttagagagagaaagtcccgcccctcctctacatcctccgcctctgctttgtacggccagcccttgctcttgagtgtgcccaaacacaaacttactctcgaatcattgtaccaggccgtgtgcgaccgcatttcgcggtacgtgaaacagccactacctgacgaatttggatccagccctctggaaccaggcgcctgtaatggatcacggaattcgtgtgagggcgaagatgaggaggagatggagcaccaggaagaaggcaaggaacagctgtcagagactgagggcagcggagaagatgagccaggcaatgatccaagcgaaactactcagaaaaagataaagggacaaccatgcccgaaaagactgttcacgttctctcttgtaaattcttacggtactgcagacataaacagcctggccgctgatggcaaactacttaagcttaacagtcggagtaccctcgcaatggactgggattccgagaccagacgactctactatgacgagcaggaatcggaggcatacgaaaagcacgtgtcaatgctccagcctcaaaagaaaaagaaaacaaccgttgcgcttcgtgattgtatcgaactgtttaccactatggagactcttggcgaacatgatccatggtactgtcctaactgcaagaagcaccagcaggcaacgaagaagtttgatctgtggtctttgccaaaaatactagtcgttcatctaaagcgctttagctataatcgctactggcgggacaagttggatacagtggtggaatttccgattcgtgggctgaatatgagcgaatttgtctgcaatttgtccgctcgcccctatgtgtatgatctgattgctgtatccaaccactacggagctatgggcgtggggcattacaccgcctatgccaagaacaaactgaatgggaagtggtattactttgatgattctaatgttagccttgcttcagaggatcaaatagtgactaaagcagcttatgtgttattctaccagcgcagggacgatgaattctataagacgccaagcttgtcatcctcagggtcaagtgacggaggtactcggccctcctcttcccagcagggtttcggggacgacgaagcctgctccatggatactaactag

SEQ ID NO: 210601 - DNA, 2751 bp, synthetic construct
  misc_feature 1..2751: note = Description of Artificial Sequence: Synthetic coding sequence
  source 1..2751: mol_type = other DNA
atggccgagggcggcggctgccgggagcggcccgacgccgagacccagaaatctgagctgggccccctgatgcggacaaccctgcagcgaggagctcagtggtacctcatagacagtcgctggtttaagcaatggaaaaaatacgtaggtttcgactcctgggatatgtataatgtaggcgagcacaatctattccctggaccgatcgataacagcgggcttttctccgatcctgagtctcaaactctgaaagaacatctgatcgacgagcttgactacgtcctggtcccaaccgaggcctggaataagctactgaattggtatggctgcgtcgagggccagcagcccattgttagaaaagtcgtcgaacatggtctgttcgttaaacactgtaaggtagaggtctatttactcgaactcaaactttgcgaaaactcagatcccaccaatgtccttagctgccatttttcgaaggccgacaccattgcgactatcgagaaggagatgagaaagctgtttaacattcctgctgaacgtgaaacaaggctctggaacaaatatatgtccaatacctacgagcagctgtcaaagctggacaacaccgtgcaggatgccgggctgtaccaaggccaggtcttggttatagagccacagaatgaagatgggacgtggcccagacaaacactacagtcaaacgggagtggtttctccgcttcatacaattgtcaggaacctccatcaagccatattcagcctggactctgcggcctgggtaatctgggtaatacctgcttcatgaactctgccttgcagtgcctctccaacacagcaccactgactgattatttcctgaaagacgaatacgaagccgaaattaaccgagacaaccccctgggtatgaaaggcgaaatcgcagaggcatatgccgagctgattaaacagatgtggtctggtagagatgctcatgttgcacccaggatgttcaagacgcaagtgggacgcttcgccccccagttctctggttatcagcagcaggatagccaggagctgctggcattccttctggatgggctgcatgaagacctcaatcgagtcaagaaaaagccatacttggagttgaaggacgcgaacggaaggccagatgcagttgtggcaaaggaggcttgggagaaccaccggctgaggaacgattctgtgatcgtggatacgtttcacggcctgttcaagagtacactcgtctgtcccgagtgcgctaaggtctcagtgacattcgatcctttttgctaccttacattgccacttcccctgaagaaggaccgtgtgatggaagtctttctggtgcctgctgatccacactgtcgacctacacaatatcgtgtaaccgtgccacttatgggggccgttagcgatctgtgcgaggctctgtctcggctgagtggcattgccgcggaaaatatggtggtggccgatgtctataaccaccgatttcataaaatttttcagatggatgagggccttaaccacataatgccccgggacgacatatttgtgtacgaagtgtgtagtacaagtgtagacggctcagagtgcgtgaccctgccagtctattttcgggaaagaaaatcccggccctcatccactagtagcgccagtgccctgtatggtcagccgctgctgttgagcgtgcccaagcataagctcacactggaatcactctaccaagccgtctgtgatagaatctctaggtatgtgaagcagcccttgccagatgaattcggcagcagtccgctggaaccaggggcctgcaacggttcaagaaactcctgcgaaggtgaagatgaagaggagatggagcatcaggaagaggggaaggagcaattgagtgaaactgagggttctggagaagacgagccggggaatgacccttcagagacaactcagaaaaaaattaaaggacagccttgcccaaaacgtcttttcaccttcagcttagtcaacagttacgggaccgccgatatcaactctctggcggcagacggaaagttactgaagctcaattctcgctctactctggcaatggactgggatagcgaaactcgacgcctgtattacgacgagcaggagagcgaagcatacgagaaacatgtgagtatgctgcagccccagaagaagaagaagacaactgtggccctgagggattgcatcgaactgttcaccacaatggaaacgcttggggaacacgacccctggtattgtcctaattgcaaaaaacatcagcaggctaccaagaagtttgatttgtggtccctgccaaagattctcgtcgtgcatctgaaacgatttagttacaatagatactggcgggacaaactagatactgtagtcgagttccctattaggggtctgaacatgagtgaattcgtgtgtaatcttagcgcgcgcccctatgtgtatgaccttatcgctgtgagcaaccactatggagcgatgggcgtgggccactacactgcatacgccaagaacaaattgaacggtaagtggtattactttgatgactcgaatgtgagcctcgcaagtgaggatcagatcgtcaccaaagccgcttacgtcctcttttaccagcgtcgcgacgacgagttctataaaacgccgtccctgtctagttccggatcctcagacgggggcacccgaccatcatcttcccagcagggcttcggtgacgatgaagcctgttccatggataccaactag

SEQ ID NO: 210602 - DNA, 942 bp, synthetic construct
  misc_feature 1..942: note = Description of Artificial Sequence: Synthetic coding sequence
  source 1..942: mol_type = other DNA
atggccgagggcggcggctgccgggagcggcccgacgccgagacccaaaagagtgagctgggacccttaatgcggacaacactccagcgcggcgcccagtggtatcttatagactcaaggtggtttaagcagtggaagaaatacgttggattcgactcatgggatatgtacaatgtaggggagcacaatctgtttcccggcccaatcgataacagcgggctcttcagcgatcctgagtcacagaccctgaaggagcatctaatcgacgaactggattacgtcctggtgcctactgaggcctggaataaacttctgaactggtacggttgtgtcgaggggcagcagccaatcgtcaggaaagttgtggagcatggtcttttcgtgaaacattgtaaagtcgaagtctacctactggaattaaagttgtgcgagaactctgatccgacgaacgtgctcagttgccacttcagcaaggctgacaccatagctacaattgaaaaagagatgaggaaacttttcaatatacccgccgagagggagaccagactttggaataaatacatgagtaacacctacgagcagctgtcaaagttggacaataccgtccaggatgccggcctttatcaggggcaggtactggttatcgaaccgcagaacgaggacggaacctggccaagacaaacactccagtcaaaggtgtcctttttcctcccacggctggaatgcaatggagcaatactggctcattgcaacttctgtctgcctggatcgagcaatagccccgcgtctgcatcacgtgtggctccatctcacctagccaatttcttcttctttgagatggagtcccatagcgttactaagctggaatgcggaggcgcagtttcagcgtactcaagggtgcaggtcatgttgttaccgcagcctcctgagtggctgggttag

SEQ ID NO: 210603 - DNA, 2139 bp, synthetic construct
  misc_feature 1..2139: note = Description of Artificial Sequence: Synthetic coding sequence
  source 1..2139: mol_type = other DNA
atgctggccatggacacctgcaagcacgtgggccagctgcagctggctcaggaccactccagcctcaatccacaaaaatggcactgcgtggactgtaacaccacggaatcaatctgggcttgtctgtcttgctcacatgtcgcttgcgggcggtacatcgaagagcatgccctcaagcacttccaggagagctcgcatcctgtggctttggaggttaatgagatgtacgttttttgctatttatgcgacgactatgtcctgaacgataatacaaccggcgatctgaagctcctcagaagaactctctctgctataaagagccagaattatcattgcacaactaggtcaggaaggtttctgagaagcatgggaacgggtgatgattcttactttctgcatgacggtgcacaaagcttacttcagtcagaggatcaactgtacaccgcactctggcaccgtcggcgaatactgatgggcaagattttcaggacctggttcgaacagtcaccgatcggcaggaagaagcaggaggaaccttttcaggaaaagatcgtcgtgaagagggaagttaagaaacggcgacaggaattggaatatcaagtgaaggctgagttagaatccatgcctccgaggaaatctttgaggttacaggggcttgcccagagtacaataatcgagattgtgagcgtccaggtgcccgctcaaacccccgccagcccagccaaggacaaagtgttgtcaaccagcgagaacgaaatttcccagaaggtgtctgattccagcgtgaagcggcgacctatcgtcactccaggtgtaaccggcctaaggaaccttggcaatacttgctatatgaatagcgtgttgcaggtgttgtcacatttactcatctttagacagtgctttctgaaactcgacctgaatcagtggttggccatgactgcatcggagaagactaggtcatgcaagcacccccccgtcactgacacggtggtgtaccagatgaatgagtgtcaggaaaaggatactggatttgtctgtagcagacagtcctccctctcatcgggcctgtctgggggggcttcaaaggggcgaaagatggagctgatacagcctaaagagcctacttcacagtacatctcgttatgtcatgagttgcacactctgtttcaggtgatgtggtccggcaaatgggcgctggtgagtccattcgccatgttacactccgtgtggaggctaattcctgctttccgcggctacgcacaacaggatgctcaggagttcctttgcgaactgttggacaaaatccaacgagagctcgaaactacaggaacctccctacctgccctgatacctacgtcccaaagaaagctcatcaagcaggtgctgaacgttgtcaacaacatattccatggtcagcttctatcacaggtgacctgcctcgcttgtgacaacaaaagtaacaccatagaaccattctgggacctgtcactggagtttccagagaggtaccagtgttccggcaaagatatagcctcacaaccctgcctggtgacagagatgctggctaagttcacagaaaccgaagctcttgaagggaagatctacgtttgtgaccaatgcaattccaaacgtcgacgcttctccagtaagcccgtggtgctcacagaagctcagaagcaactgatgatctgccaccttcctcaagtactgcgactgcacctcaagcgctttcgttggagtggccggaataatcgagaaaagattggggttcacgtgggcttcgaagagattcttaatatggagccttactgttgtcgtgagaccctgaagtccttgcgacctgagtgcttcatctacgacctgtccgccgtggtgatgcaccatggcaagggcttcgggagcggccactacacggcttattgttataactccgagggaggattctgggtgcactgtaacgactcgaaactgagcatgtgcacaatggacgaagtttgtaaggcccaggcctacatacttttttatacacagagagtaaccgagaatgggcattcaaagctgctgccaccagagctcctcctcgggagccagcatcctaatgaggatgctgatacttccagcaacgaaatcctcagctag

SEQ ID NO: 210604 - DNA, 2139 bp, synthetic construct
  misc_feature 1..2139: note = Description of Artificial Sequence: Synthetic coding sequence
  source 1..2139: mol_type = other DNA
atgctggccatggacacctgcaagcacgtgggccagctgcagctggcccaagatcacagctctttgaacccacagaaatggcattgtgttgactgcaacaccaccgagagtatctgggcctgcctgtcatgttcccacgtggcatgtggtaggtacattgaagagcacgccctgaagcatttccaggagagttcccacccagtcgcactagaagtgaacgagatgtatgtcttttgctacttatgtgacgactatgtgctcaacgataacacaaccggcgatttaaaactgctccgtcgcaccctgtctgctatcaaaagccaaaattatcactgcacaacacgcagcggccggttcctgcgctccatgggaacgggagatgactcctactttctccatgacggagctcagagcttgctgcagagcgaagatcaactctatacagcactgtggcaccgccgacgtatcctaatgggaaagatattccgcacatggtttgaacaatccccgatcgggcggaaaaagcaggaggagccattccaagaaaagatcgtggtcaagagagaggtgaagaagcgaagacaggaactagagtaccaggtgaaagccgagttagagtccatgccccccaggaagagtctgagactgcagggcctcgctcaaagtacaattattgaaattgtgtccgtccaagtgccagcgcaaacaccagctagcccggccaaagataaggtgctgtcaactagcgagaacgaaattagtcagaaggtgagcgattccagcgtgaagcgcaggcctatagtcacccctggagtgacagggttgcggaatctgggtaatacatgttacatgaatagcgtactgcaggtactgtctcacctgctgatttttcgccagtgcttcttaaagttggaccttaatcagtggctagctatgacagcatctgaaaagactcgttcatgcaagcatccccctgttacggacactgtggtttatcagatgaatgaatgtcaggagaaagacactgggttcgtatgctccaggcaaagttccctcagttcgggactttccggaggtgctagtaaaggcagaaagatggagttaatccaaccgaaggaaccaaccagtcagtacatcagtctatgtcacgagttgcataccctgtttcaagtgatgtggagcgggaaatgggcgctggtcagtcctttcgccatgctgcacagtgtgtggagactgattccagctttccgcggctacgctcagcaggatgcccaggagttcctgtgtgagctgctagataagattcagagagagcttgaaacaactggaacatccctgccagcattgatccccacatcccagcgcaaacttatcaagcaggttttgaatgttgtgaacaatatatttcacggacagttactatcacaggttacttgtctggcctgcgacaacaaaagtaacactatcgagccattctgggatctctcattggagtttcccgaacgctaccagtgttctggaaaggacattgcttcgcagccctgcctggtgaccgagatgctggccaaatttactgagacagaggctctggaaggcaagatatacgtgtgtgatcagtgtaacagtaagcgccggcgcttttcctcaaaaccagttgtgctaaccgaagcccagaaacagctgatgatctgccacctaccccaggtgctgagactccaccttaaacggtttcgctggagcggcagaaataaccgagagaaaattggtgtccacgtggggtttgaggagatcctgaacatggaaccctattgctgcagggagaccctgaaatccttgcggcccgaatgcttcatttacgacctctctgccgttgtgatgcatcacggcaaagggttcggctctggccattataccgcttactgttacaatagcgagggaggtttctgggtgcactgtaatgattccaagcttagcatgtgcacaatggacgaggtttgtaaggcacaggcttacatcctgttctacactcagcgagtcaccgagaacggccactcaaagttactgccacccgagctgctgcttggctctcagcaccctaatgaagacgcagacacctcttcaaatgagattctttcatag

SEQ ID NO: 210605 - DNA, 2139 bp, synthetic construct
  misc_feature 1..2139: note = Description of Artificial Sequence: Synthetic coding sequence
  source 1..2139: mol_type = other DNA
atgctggccatggacacctgcaagcacgtgggccagctgcagctggcccaggaccactcgagcctgaaccctcaaaagtggcattgcgttgactgtaataccaccgagagcatttgggcctgtttatcatgcagccatgtggcatgtggcaggtatattgaggaacacgcactcaaacactttcaggagtcctctcacccagtggcactcgaggtgaatgagatgtatgttttttgctacctgtgcgatgattatgtgctgaacgataacactacaggtgacctgaaactgctccgaaggacactgagcgctatcaaaagccagaactatcactgcactacaaggtctggcaggttcttgcgatcaatgggcacaggggatgattcatactttctgcatgatggggcccagtctttgttgcaaagcgaggatcaactgtacactgctctgtggcacagaagaaggattctgatgggaaaaattttccgaacttggttcgagcagtcaccgattgggaggaaaaaacaggaagagccgtttcaggaaaagatagtcgtgaaacgtgaggtgaaaaagaggcgccaagagctggagtatcaggtcaaagcggagctggagagtatgcctccacgcaaaagcctgcggcttcagggcctcgctcagagcactatcattgagatcgtgtctgtacaagtgccagctcagaccccagcttcaccggccaaggataaagtcttatcaacaagcgaaaatgaaatctcccaaaaggtctctgacagttcagttaagagacgtccaattgtaacccccggtgtgaccggactccggaacctcgggaacacttgctatatgaactcagttcttcaggtgttaagtcacctactcatttttagacagtgcttcctaaagctcgatcttaatcagtggctcgcaatgactgctagtgagaaaactagaagctgcaagcatcctccagtaacagatacagtggtttatcagatgaacgaatgtcaggagaaggatactggatttgtgtgttcaagacaaagtagcctgtcaagtgggctgagcggtggcgcttcaaagggaaggaaaatggagcttatccagcctaaggagccaacgtcacaatacatctcattgtgtcacgaactgcataccctgtttcaggtgatgtggtccggcaagtgggcactggtttccccattcgcaatgttacattccgtgtggcgtctgattcctgcgttccggggttatgcacagcaagacgcccaggagttcttgtgcgaactgttggacaagatccaacgcgaactcgagaccaccggcacttccctgcccgccttgatccctacaagccagcggaaactgattaagcaagtgctgaacgtggtgaacaacatctttcacggccagcttctgtctcaggtgacgtgtctcgcttgtgacaacaagagcaacactatcgagccattttgggatttaagcctcgagttccccgagagataccagtgttcgggcaaagatatagcctcccagccttgtcttgtcaccgagatgctcgcaaagtttacagaaaccgaggccctcgagggcaaaatttacgtttgcgaccagtgtaactccaagaggcggcgtttctcctctaaacctgttgtgttgacagaggctcagaagcagctaatgatatgccatcttccccaagttctgaggctgcacttaaaaaggtttaggtggtccggccgcaacaaccgcgaaaaaatcggagtgcacgttggattcgaagaaattctcaacatggaaccgtattgctgccgcgaaacactcaagagcctgcggcctgagtgctttatctacgacctgtctgccgtggttatgcaccatggtaaaggattcgggtctggccattatactgcctattgctacaattccgagggaggcttctgggtacattgcaatgatagcaaactcagcatgtgtacgatggatgaggtatgtaaggctcaagcgtatatcctgttttacactcagcgtgtgacagagaacggccattcaaaattactccccccggaactcctgctcggttcccagcaccccaacgaggatgccgacacatccagcaatgagatcctctcatag

SEQ ID NO: 210606 - DNA, 336 bp, synthetic construct
  misc_feature 1..336: note = Description of Artificial Sequence: Synthetic coding sequence
  source 1..336: mol_type = other DNA
atgctggccatggacacctgcaagcacgtgggccagctgcagctggcccaggatcatagttccctaaatccccagaagtggcactgcgtagattgtaacaccactgagagcatctgggcttgtctcagctgttctcacgttgcctgcggtagatatattgaggaacatgctcttaaacatttccaagaatctagtcaccccgtcgcactcgaggtgaacgagatgtacgttttctgctacctctgtgatgactatgtgttaaacgacaacactacgggcgacctgaaactcctacgccgtaccctgagcgcaattaagtcccaaaattaccactag

SEQ ID NO: 210607 - DNA, 495 bp, synthetic construct
  misc_feature 1..495: note = Description of Artificial Sequence: Synthetic coding sequence
  source 1..495: mol_type = other DNA
atgctggccatggacacctgcaagcacgtgggccagctgcagctggcgcaggaccacagtagcctgaaccctcagaagtggcattgcgtggactgtaatacaacagagtccatttgggcctgccttagctgtagccatgtggcgtgtggccgctacatcgaggagcacgcgttaaagcactttcaagagtcctcccacccagtcgcactggaggtgaatgagatgtacgtgttttgctatctgtgtgacgactacgtgttaaacgataatacaaccggcgacctcaaactgctaaggcgaacgctgagtgccattaaaagccagaactatcactgtacaacccgtagcgggcggttccttagatccatgggcacaggggatgactcatatttcctccacgatggagcccaatcactgctgcagagcgaggaccagctgtataccgcactgtggcaccgaagacggatcctgatggggaagatcttcaggacctag

SEQ ID NO: 210608 - DNA, 1101 bp, synthetic construct
  misc_feature 1..1101: note = Description of Artificial Sequence: Synthetic coding sequence
  source 1..1101: mol_type = other DNA
atgaccgtgcggaacatcgccagcatctgcaacatgggcaccaacgcaagtgccctggaaaaagatatcgggccagaacaatttcctatcaacgaacattacttcgggctggtgaattttggaaatacctgttattgcaattccgtgcttcaagctttgtatttttgcaggccattccgagaaaacgtgcttgcgtataaagcacaacaaaaaaaaaaggagaacctcctgacctgtcttgccgacctcttccatagcatagcgactcagaagaagaaagtgggcgtaattccaccaaagaagtttatctctcgtctgcgcaaagaaaatgatttgttcgataactacatgcagcaagatgctcacgaatttctaaattatttgttgaatactatcgcggatatcctccaggaagaaaagaaacaggagaagcaaaatggaaaactgaagaacgggaatatgaatgaacctgccgagaacaacaaacccgaactcacctgggttcatgaaattttccaaggcaccctcaccaatgaaacccgatgcctcaattgtgaaacagtctccagcaaggacgaagatttccttgatctcagtgtggatgtggagcagaatactagtataacccattgtttgagagatttttctaacaccgagaccctatgtagtgaacagaagtactactgcgaaacctgttgcagtaagcaggaggcacaaaaacgcatgagagtcaagaagctacctatgattctggctctgcacttgaagcggtttaagtatatggaacagctgcatcggtataccaagcttagctatcgcgtggtcttccccctggaactgaggttgttcaacaccagttcggacgccgtcaacctggaccgcatgtatgatctggtggccgtggtagtacattgcggttctggacctaatcgcggccattacattaccatcgtgaaaagccacggattctggcttctgtttgacgacgatatagtggaaaaaattgacgctcaagccatcgaagaattctacggccttaccagcgatatctccaagaattccgagtcaggttacatactgttctatcagtcgagggagtag

SEQ ID NO: 210609 - DNA, 1080 bp, synthetic construct
  misc_feature 1..1080: note = Description of Artificial Sequence: Synthetic coding sequence
  source 1..1080: mol_type = other DNA
atgaactgcttccagggcaccaacgccagcgccctggagaaggacattggcccagagcaattccccatcaatgaacattatttcggactggtgaatttcggtaacacctgctattgtaatagcgtgctccaagcactctacttctgtaggccttttagagagaacgtgctagcatacaaggcccagcagaagaaaaaagaaaatttactgacctgcctggcagatctgttccacagtatcgccacgcagaagaagaaggtgggcgtgattccccccaaaaagttcatatctagactgagaaaggaaaatgacctgtttgataactatatgcaacaagacgctcacgaattcctaaattacctgctgaacactatcgccgatattctccaggaagagaagaagcaggaaaaacagaacggaaaactgaagaacggaaatatgaatgagcccgctgaaaacaataagcctgagctgacgtgggtccatgaaatttttcagggaacactaaccaacgagaccaggtgcctcaactgcgagaccgtttcctcaaaggacgaagatttcttagacctatccgtcgatgtggaacagaatacatcaatcacccattgtctgcgtgacttctctaacactgaaaccctgtgcagtgagcagaagtactactgcgagacatgctgctcaaagcaagaggcccagaaaaggatgcgggtgaaaaagctgccaatgatactagccctgcatctgaagcgattcaagtatatggagcagctccaccgatataccaagctgagttatcgagtggtatttcccctggaattaagactttttaacacttcttcagatgcagttaacctcgaccggatgtatgatttggtggcagtcgtcgtccactgcggatcaggaccaaaccgcggacactacatcacaatcgtgaagtcacacggattttggctcctgttcgacgacgacattgtcgaaaagatcgacgcccaggccatagaggaattttacgggcttacaagtgatatctccaaaaattcagagtctggttatatccttttttatcaatccagagagtag

SEQ ID NO: 210610 - DNA, 4221 bp, synthetic construct
  misc_feature 1..4221: note = Description of Artificial Sequence: Synthetic coding sequence
  source 1..4221: mol_type = other DNA
atggacatggtggagaacgccgacagcctgcaggcccaggagcggaaagacattctgatgaagtacgacaaggggcaccgggccgggctacctgaggacaaaggaccggagcccgtgggaattaactcaagcattgacaggtttggtatcctgcacgagacggagcttcctcctgtgacagctagagaggcgaaaaaaatccggcgagagatgactcgcacctcaaaatggatggagatgctgggagaatgggagacatataaacactcctctaagttgattgatcgggtttacaaggggatcccaatgaatatccgggggcctgtatggtccgtgttgctgaacatacaggagattaaacttaagaaccctggccggtatcagatcatgaaagagagaggcaagcgtagctcagaacatatccaccacatcgatctggatgttaggacaaccctccgtaaccatgtgttctttagggatagatacggcgccaagcagcgcgagctgttctatatcctactggcttattcggaatataatcccgaagtgggctattgccgggatctgtctcatattacagctctttttcttctgtatctgcctgaggaagacgcattctgggccctcgtgcagttattggccagcgaaaggcacagtctccctggatttcactcacctaatggcggaacagtgcagggacttcaggatcaacaagaacacgtagtccctaagagtcagccgaaaactatgtggcaccaggacaaggaaggcctgtgtggacaatgcgcttcccttggttgcctgctgagaaatttgatagacggcatctctctggggctgacgctgcgactgtgggacgtttatctggtagagggtgagcaggtgctcatgcctataaccagcattgcattaaaagtgcagcagaaacgcttgatgaaaacaagtcgctgcggcctatgggccagactacgaaaccagtttttcgatacgtgggcgatgaatgatgacacggtactcaagcatctgagggcttcaacgaaaaagttgacccgcaagcaaggcgatttgccccctccagccaaaagggaacaggggtccctggcacctcgccccgttcccgcttcaaggggcggtaagacgctctgtaagggataccgccaggccccgccgggtccccccgcccagtttcagagaccaatttgctccgcatccccaccttgggcgtccaggttctccacgccatgtccaggtggcgcagtgagggaagatacgtaccccgttgggacccagggtgtgccctctttggcccttgctcagggcggaccacagggcagctggcgttttctcgagtggaaatccatgcccaggctgcccaccgatctggatatcggcggcccctggttcccccattatgactttgagtggtcctgttgggtcagggctatcagtcaggaagatcagctcgcgacctgctggcaggcagagcactgcggtgaggtccacaacaaagacatgtcttggccagaggagatgagctttacagctaacagttctaagattgaccgccagaaggtgccaacggagaagggagccaccggtttgtctaatcttggtaacacatgtttcatgaactcctcaatccagtgcgtctcaaacacacagcctctcacgcagtattttatttccggcagacatttgtacgaactgaatcgcacaaaccctatcggcatgaagggacacatggcgaagtgttatggtgaccttgtgcaagagctgtggtcagggacacagaagtccgtggcccctctaaagttgcgaagaaccatcgccaaatacgcgcccaaatttgacgggtttcaacagcaggactcccaagagctgctggcgttcctgcttgatgggctgcacgaggacttgaacagagtccatgaaaagccctacgtggaactcaaggacagcgacggcagacccgactgggaggttgcagcggaagcctgggacaatcatcttcggcgcaatcggagcatcatcgttgatttgtttcatggacaattaagatcccaggttaaatgcaaaacatgcgggcatatttccgtgaggtttgatccatttaatttcctctcccttcctctgcctatggattcatacatggacctggagataaccgtcattaagctggatggtacaacgcctgtgcgttacggactgagattaaatatggacgagaaatataccggcctcaaaaaacagctgcgggacctctgcggactcaactcagagcagatattgctcgccgaggttcacgactctaacatcaaaaactttccccaagacaatcagaaagtgcagctgtccgtcagcgggtttctatgcgctttcgagattcccgttccaagctccccaataagtgcctccagccccactcagatcgacttttcctcatcaccatctactaacggcatgtttactctaactacgaacggagatctgcccaaaccaatctttatccctaatgggatgcctaacaccgtggtgccatgcgggacagaaaaaaattttacgaacgggatggtgaatgggcatatgccctctttgccagacagcccgtttacaggctacattatcgccgtgcacaggaaaatgatgagaaccgagctgtacttcctttcaccccaagagaataggccaagcctctttggcatgccattgatagtgccatgcacagttcacacgcggaaaaaggacctgtacgacgcggtttggatccaggtttcatggctggctaggcccttgcccccacaggaggcttcaatacacgctcaggatagagataactgcatgggctaccagtacccttttaccctcagggtagtgcaaaaagatgggaattcctgtgcctggtgccctcaataccgcttctgccgagggtgtaagatagactgtggcgaagatagggcctttattggcaatgcttatatcgcggttgactggcatcctactgcactacatcttagataccaaacaagccaagagagggtggtggacaaacatgaatctgtcgagcagagcagaagggcccaggcagaacctattaatctggactcctgtctccgggcatttacaagcgaagaggagctgggagaatcagaaatgtactactgttctaaatgcaagacgcattgcttagcaacaaagaagttagacctctggaggctgcccccctttctgataattcacctaaagagatttcaatttgtcaatgaccagtggatcaaatcacagaagattgtcagatttctgagagaatccttcgatccctccgccttcctggtgcctcgagatccagctctatgccagcacaagccactgacccctcagggcgacgaactttctaaaccgagaattctcgccagagaggtgaagaaggtggatgcccagtcttcagccggaaaagaggatatgttactgtccaagtctccctcctccctatctgccaacatttcttcatccccgaaggggtcaccttcctcctctcggaaatctggaacatcatgtccctcctcaaagaatagttccccaaattcatcccccaggacactgggcaggtcaaagggtcgcctgaggttacctcaaatcggttccaagaacaagccttcttcaagtaagaaaaacctggatgcatccaaggaaaatggtgctggccagatctgtgaattagctgatgctcttagcagaggacatatgcggggaggtagccagcccgagctggtgacgcctcaggaccacgaggtggcactcgctaatggatttctgtacgagcacgaagcttgcgggaacggctgtggagatggttacagcaatggtcagttggggaaccacagtgaggaagatagtacggacgatcagcgtgaggacacgcacatcaagccgatttacaacctctacgccatatcgtgtcattccggcattctaagcggaggtcactacattacctatgcgaagaatccaaattgtaaatggtattgctataatgactcgtcttgcgaggagctgcatcccgacgagattgatactgactcagcatacatactgttctatgaacagcagggaattgattacgcacaattcttaccgaaaattgacggcaagaagatggctgatacatcttcaacagacgaggacagcgagagcgattacgaaaaatactctatgttgcaatag

SEQ ID NO: 210611 - DNA, 3270 bp, synthetic construct
  misc_feature 1..3270: note = Description of Artificial Sequence: Synthetic coding sequence
  source 1..3270: mol_type = other DNA
atgccccagcggctgccccacgcccggcagcacacccccctgcccctgggaagtgctgactatcggcgtgtcgtcagcgtgcgacctcagggaccacatagagatccaaaggatagcagagacgccgcaaaacgcgaacaagggagtctggcccctcggcctgtccccgcatcaagagggggaaagacactttgtaaaggatatcgacaggctccaccggggcctcccgcccagttccagcgtcccatctgttccgcctctccaccttgggcctctcggttttcgactccctgtcctggaggggcagtaagagaagatacatacccagtgggtactcagggtgtgcccagtctcgccctggcacaggggggaccccaagggtcctggaggttcctagagtggaaaagcatgccacggctacctacagacctcgacataggtggaccgtggtttccgcactatgattttgaatggtcctgttgggttcgcgccatcagccaggaagatcagctggcaacttgctggcaggctgagcactgtggagaggtgcacaacaaagacatgtcttggccagaggaaatgtctttcactgccaactcgtccaaaatcgatcggcagaaggtgccaaccgagaaaggtgcgacaggactgagtaatcttgggaatacatgtttcatgaactcttccattcaatgtgtaagcaatacccagcccctgacacaatattttatctccggcaggcacttgtacgagctaaacaggacaaatcccataggcatgaagggccacatggccaagtgctatggagatctagtgcaggagctgtggtcaggcacccagaagagtgtagctccgttgaagctcagaaggaccatagctaaatacgcacccaagttcgacggatttcagcaacaagattcacaggaactcctcgccttcctgctggacggactccatgaagacctaaaccgggtccacgaaaagccgtacgtggaactgaaagattccgatggacgtcctgactgggaggtagccgcggaagcgtgggataaccaccttcgaagaaacagatctatcatcgtggacctgttccatggccagctgaggagccaggtgaaatgtaaaacttgtggccatatcagtgtgagattcgatccctttaattttctgtccctgcctctgcctatggactcttatatggacctcgaaatcactgtaattaagctcgatgggaccactcccgttaggtatggcctgcggttgaacatggacgaaaagtacacaggactcaagaaacaattgcgggacctgtgtgggctcaacagtgaacaaattctcctagccgaagtccatgactctaatataaagaatttcccccaggataaccagaaggtgcagctgtctgtctccggtttcctatgtgccttcgaaatccccgtgccttcctcccctatcagcgcaagctctcccacacagatcgacttttccagttcacctagcacaaacgggatgttcaccctgacgacaaatggcgatctgcccaagcccatctttatccccaacggcatgccaaacactgttgtaccgtgtgggaccgaaaagaatttcaccaacggaatggtgaacggccatatgccgtctctcccagattcacccttcaccgggtatattatcgctgtacaccggaaaatgatgcgaaccgagctctacttcttgtcaccacaggagaatagaccatccctctttggaatgccgctgattgttccgtgtactgtacacacccggaaaaaggacctgtacgatgccgtatggatccaagtttcatggctggctcggcctctgccgccccaagaagcctcaatccacgcccaggacagagataactgcatgggctatcagtacccttttactctccgcgtggttcaaaaggacggtaattcctgcgcttggtgcccacagtacaggttttgtcgcggatgcaagattgactgcggcgaggaccgggcgttcatcgggaacgcgtacatcgccgtcgattggcacccaacggcactgcatttgcggtatcagacaagtcaggaaagggtcgtggataaacatgagagtgttgaacaatctcggcgagctcaggccgaacctattaacctggatagttgcctccgtgcattcacctccgaagaagagttaggtgagagcgaaatgtattattgcagcaagtgtaagacccattgcctggctaccaagaaactcgacttgtggaggttaccacctttcctgatcattcacctgaagcgcttccagtttgtcaacgaccagtggatcaaaagccagaagatcgtacggttcctgagggagtccttcgatccatctgctttcctagtgccacgcgaccctgctctgtgccaacataagccccttacgccacaaggagacgaactgtcaaagccacggattctggcccgcgaagtgaaaaaggtagatgcccagtctagcgcaggcaaggaggatatgttgctttctaagagtcccagctcgctgtccgcaaacatctcaagctccccaaagggctcccccagctcgtcccgaaagtcgggcaccagttgccctagctcaaagaattcaagtcccaacagcagcccaaggacacttggtagatccaagggcaggctgcgtctgcctcagatcggaagcaagaataaaccctcatcttcgaagaagaacctcgatgctagcaaagagaatggcgcaggccagatatgcgagttggctgacgctctctctagaggccacatgaggggaggatcgcagcctgagttggtaaccccacaggaccacgaggtcgctttggctaatggattcctatatgagcacgaagcttgcggtaacggctgtggtgatggatacagcaatgggcaattgggcaaccatagtgaggaggacagcaccgacgaccaacgagaggacacccatataaaacccatatacaacctctatgccatatcttgccacagcgggattcttagtggcggccattatatcacatacgccaaaaacccaaattgtaaatggtactgttacaacgattcctcctgtgaggaactccacccggatgagattgatacagattccgcgtatattctcttttatgagcaacaagggatcgattacgcccaatttctgccaaagattgacggcaagaaaatggcagacacgagtagcactgacgaggacagcgaatccgattatgagaaatattcaatgctgcagtag

SEQ ID NO: 210612 - DNA, 2361 bp, synthetic construct
  misc_feature 1..2361: note = Description of Artificial Sequence: Synthetic coding sequence
  source 1..2361: mol_type = other DNA
atggacatggtggagaacgccgacagcctgcaggcccaggagcggaaggatatcctgatgaagtatgataaaggccaccgggccggtttacctgaggacaaaggaccagagcccgtggggataaacagttcgatcgataggttcggcattttgcatgagaccgaactccccccagtgacggcccgcgaggcaaagaaaatccgaagggaaatgactcgtacgagcaagtggatggaaatgttaggggagtgggaaacttacaaacatagttcgaagctcatcgacagggtgtacaagggaattcccatgaacatccgaggcccagtttggtccgtccttcttaatattcaggagatcaagctgaaaaatcccgggaggtaccagattatgaaggagcgcggcaaacgatctagcgaacacatccatcatattgacctggacgtgagaactacactgagaaaccacgtcttctttcgggaccgatacggggccaagcaacgggagctcttctatatactcctggcatacagcgaatacaacccagaagtgggttactgccgggacctgagccacatcaccgcgctgttcctactgtacctcccagaagaggatgccttttgggctctcgtgcagctcctagcctcagaaagacacagtctgccgggcttccactctcctaatggcgggactgttcaaggactgcaggaccaacaggagcatgtcgttccaaaatcacaacccaaaacgatgtggcaccaggacaaagaggggctgtgcggacagtgcgccagtctgggctgtttactgcggaaccttatcgacgggattagcctggggctaaccttgcgcctctgggatgtgtaccttgtggaaggcgaacaggttcttatgcctattacttcaatcgctctgaaggtgcaacagaagcgactgatgaagacatcccggtgtgggctttgggccagattgcgaaatcagttctttgacacgtgggcaatgaacgacgacaccgtactgaagcatctcagagctagtacgaagaagttgacacggaagcagggtgatctgccccccccagcaaaaagggaacagggtagtctcgcaccacgcccggtcccagcaagtcgagggggtaagacgctgtgcaaggggtatcgacaagctccccccggaccccccgcacagtttcaacgccctatctgctccgcctcccccccctgggccagccggttctccactccttgccccggtggagccgttagagaggacacttaccctgttggcacacaaggtgttccatcactcgcattagcccaaggaggaccacaggggtcatggcgtttcctggagtggaagtcaatgcctagacttcctaccgaccttgatatcggcgggccctggtttccccattacgacttcgagtggtcatgttgggtgcgggctatcagccaggaagaccagcttgcaacatgctggcaggccgagcactgtggggaggtccacaataaggatatgtcctggcctgaagagatgtctttcactgcaaattcaagcaagatcgatagacagaaggtcccgacggaaaagggcgcaacaggactgtcaaatctgggtaatacttgtttcatgaatagttctatccagtgcgtgtcaaacacccagccgctcacacagtactttatctctggcagacatctatatgaactcaacagaacgaatccaatcggtatgaaggggcacatggcgaaatgctatggggacctggtgcaggagctctggtccggcacacagaagagtgttgctcccctgaagcttcggagaacaatcgccaaatacgctccaaaatttgacggattccaacagcaggatagtcaagagctcctcgcctttctgctcgacggtctccacgaggacctgaatcgcgtacacgaaaagccatacgtggaactgaaggactctgatgggagaccagattgggaggtggcggcagaagcgtgggacaatcaccttaggcgtaaccggtcgatcatcgtcgacctcttccacggtcagttgaggtcccaagtaaagtgtaagacctgtggccacattagcgtcagattcgatcccttcaactttctgtccctgccactgccgatggacagctatatggacctggagattactgtgataaagctggacggtacaacgcccgtgagatatggccttcgtctgaacatggatgaaaagtacacagggctcaaaaaacaacttcgggacctctgtggcctgaacagcgagcagattctgctcgctgaggtgcatgattctaatatcaagatttctcctctgcaccacctccaaatggagtgctcaccatag

SEQ ID NO: 210613 - DNA, 84 bp, synthetic construct
  misc_feature 1..84: note = Description of Artificial Sequence: Synthetic coding sequence
  source 1..84: mol_type = other DNA
atggacatggtggagaacgccgacagcctgcaggcccaggagcggaaggacattctgatgaagtatgataagggacatagatag

SEQ ID NO: 210614 - DNA, 174 bp, synthetic construct
  misc_feature 1..174: note = Description of Artificial Sequence: Synthetic coding sequence
  source 1..174: mol_type = other DNA
atggacatggtggagaacgccgacagcctgcaggcccaggagcggaaggacatcctgatgaaatatgataagggccacagggccggactgccagaagacaaaggctcccctttagaatccactgcagcactgatcgttctggcgttttgtatgcgcaggtcctgcctcttgtag

SEQ ID NO: 210615 - DNA, 3309 bp, synthetic construct
  misc_feature 1..3309: note = Description of Artificial Sequence: Synthetic coding sequence
  source 1..3309: mol_type = other DNA
atgaaccaccagcagcagcagcagcagcagaaggccggcgagcagcagctgagtgagccagaagacatggagatggaggccggagatacagatgatccaccacggatcacccagaacccagtgataaatggcaatgttgccctgtccgacggacacaatactgctgaggaagacatggaagatgacacgtcctggcggtctgaggctacgttccagttcaccgtggaacgtttttcccggctcagcgaatccgtgttgtcgcccccctgctttgtaaggaatcttccatggaagatcatggtaatgccccgcttctaccctgatcgcccgcaccagaaatccgtaggattttttctgcagtgtaatgctgaaagtgacagcacctcttggagctgtcatgctcaggctgttcttaaaataattaattaccgcgacgacgagaagagcttctcgaggaggatctcacacctctttttccacaaggagaatgactgggggttttctaacttcatggcttggtccgaggttactgatcctgaaaaaggctttatcgatgatgacaaagtgacttttgaagtgtttgtccaagccgacgcaccacacggagtggcctgggactcgaagaaacataccgggtacgtaggcctcaagaatcagggagctacttgctacatgaatagcctactccagacacttttctttaccaaccagttgcgaaaggctgtgtacatgatgcctaccgaaggcgacgacagctcgaaatccgtgcctctggccctgcagagagtgttttacgaactacagcacagcgataaacctgtggggaccaagaagttgaccaaaagtttcggttgggagaccctcgattcctttatgcagcatgatgtgcaggagttgtgccgggtattattagacaacgttgagaataagatgaaaggaacatgcgtcgagggtaccattccaaaactgttcagaggcaaaatggtaagttacatccagtgcaaagaggtggactacagatcagaccggcgcgaagactattacgacatccaactttcaattaaggggaagaagaacatcttcgagtcctttgtggactacgtggcggttgaacagcttgacggagataacaaatacgacgctggagaacacggcctccaggaggccgagaaaggcgttaaatttctcactttacctcctgtgctacatctccagctgatgcgtttcatgtacgatccccagacagatcagaacattaagataaacgaccgcttcgagttccccgaacaactacccctagacgaattcctccaaaagaccgatcctaaagaccctgcaaactatatccttcatgccgttctagttcattctggggataaccacggcggccactatgttgtttaccttaacccaaagggggacgggaaatggtgtaagttcgatgacgatgtggtgtcccggtgtaccaaggaggaggccatcgaacataattacggtgggcatgacgatgatctcagtgttcggcactgtacaaatgcatacatgttggtgtacatccgggagagcaaattatcggaggtccttcaggctgtaacagaccacgatatcccacagcaactcgtcgagaggcttcaggaggagaagagaatcgaggctcagaaacggaaagagcgccaggaggctcatctgtacatgcaggtccagatcgttgccgaagaccagttctgtggacaccaggggaacgatatgtacgacgaggaaaaggtgaagtacactgtgtttaaagttctgaaaaattcgtccttggccgaatttgttcagtctctatctcagaccatggggtttcctcaggaccagattcggttgtggccaatgcaggcaagatcaaatgggactaagcggcctgctatgctggataacgaagcggatggcaataaaacgatgattgagctgtccgacaatgagaacccatggacaatattcttagagacagtagacccagagctcgctgcttccggcgcaacactgcctaaattcgataaggatcatgatgttatgctgttccttaaaatgtatgaccccaaaacacgcagcttaaactactgcgggcacatctatacacctatctcctgcaagataagggatctgcttcctgtaatgtgtgaccgagcgggcttcatacaggatacctcactgatcttgtacgaggaagtcaagcccaatctgacagagcgcatccaggactatgatgtttctctggataaagctttggatgagctgatggatggagacattatcgtctttcaaaaggacgatccagaaaatgataatagtgaactacccaccgcgaaggagtacttcagagacctgtaccaccgagtggacgtgattttttgcgacaagactattccaaatgaccctggttttgtggtgactctgagcaacagaatgaactacttccaggtcgccaagacggtggctcagagactgaacaccgatcccatgctgctgcagttcttcaagtcccaaggctatcgggatggcccagggaatccccttcggcacaattacgaggggaccctacgcgatctgctgcagttttttaagcctaggcagccgaagaaactctattaccaacagctcaagatgaagatcacagacttcgagaatcggaggtccttcaaatgtatatggctgaactcccagtttagagaggaagaaattaccttatacccggacaagcacgggtgcgtgagggatttgctcgaagaatgtaaaaaggccgttgagcttggcgaaaaagcctcaggcaaactgagactgctcgagattgtgagctacaagattatcggcgtccaccaggaggatgaactcctggagtgcctgagccctgcgacatcccgtactttcagaattgaagaaatccccctggaccaagttgacatagacaaggagaacgagatgctcgtgactgttgcccacttccataaggaagttttcggaacatttggaatacctttcttactgaggatacaccagggggagcatttccgggaggttatgaagaggatccaatcactgctagatatccaagaaaaagaattcgagaagtttaaatttgctatcgtaatgatgggaagacatcagtatatcaacgaggatgaatatgaagtgaacctgaaggacttcgagccacaacctggtaacatgagccacccccgcccgtggcttggcctggatcactttaataaggccccgaagaggagtcgatatacttacctggaaaaggctattaaaattcataactag

SEQ ID NO: 210616 - DNA, 3333 bp, synthetic construct
  misc_feature 1..3333: note = Description of Artificial Sequence: Synthetic coding sequence
  source 1..3333: mol_type = other DNA
tgcagccacagcgacgtgggcgagcggaccagccccatcccccagcagagaccacttcagtcacatgcggagatggccggcaatcataggctggggctcgaagctggagacaccgacgacccccctcgaattactcagaaccctgtaattaacgggaatgtggctctgtccgatggtcataacaccgcagaagaggacatggaagacgatacatcctggcggtcagaggcaacatttcagtttacagtcgagagattttcaaggctgagcgagtctgtcctgagtcctccatgtttcgtcaggaatcttccatggaagataatggtcatgccccggttttaccccgacagaccgcatcagaagagcgtgggctttttcctgcagtgcaacgccgaatccgactctacgagttggtcttgtcatgcacaggccgtcctcaagatcataaattatcgcgatgatgagaagtcatttagcagacgaattagccacctattttttcacaaggagaacgactggggtttcagcaattttatggcgtggagcgaagtaacagatcctgaaaagggatttatcgacgacgacaaggtgacatttgaggtttttgtacaggccgacgcccctcatggtgttgcctgggactcgaaaaagcatacagggtatgtgggactgaaaaatcagggagccacctgttacatgaattcactacttcagactctgttctttactaaccagttacgtaaggccgtgtacatgatgcctaccgagggagacgacagttctaagagcgttccactggccctgcagcgtgtgttttacgagttgcagcactctgataagcccgtcggcacaaaaaagttgaccaaaagcttcgggtgggagaccctggacagcttcatgcaacatgacgtgcaggagctgtgtcgggtgttactggacaacgtggagaataaaatgaagggaacatgcgtggaaggaaccatacctaagctttttcgtggcaaaatggttagttacattcagtgcaaggaagttgattatagatctgacagacgggaggactactacgacatccaactgtccatcaagggcaaaaaaaatatcttcgagtccttcgtcgactacgtcgcagtagagcagttagatggcgacaataagtatgatgcaggggaacacggcttgcaggaggcagaaaaaggcgtcaaattccttactctgccaccagtgctgcacctgcagctcatgcggttcatgtacgatccgcagaccgaccaaaatataaaaataaacgatcgcttcgagtttcctgaacagcttcctctggacgaattcctgcagaaaactgatccaaaggaccccgctaactacatcctgcacgctgtgctggttcactctggagacaaccacggcggtcactacgtcgtatacctaaaccccaagggcgatggaaaatggtgtaaatttgatgatgacgttgtgtctcgctgcaccaaggaagaggccattgagcataactatggcggccatgacgacgatctctcagtgcgccactgcacaaatgcttacatgctggtatatatccgagagtcgaaactgtcggaggttttacaggcggttactgaccatgatatcccccagcagctggttgaacgattgcaggaagagaagcgcatcgaagctcagaagagaaaagagcgacaagaagcacacctctatatgcaggtgcagatagttgccgaggatcagttttgtggccatcaaggcaacgacatgtatgacgaggagaaggttaaatacacagtcttcaaggtcctgaaaaacagctcacttgcagagtttgtgcagagcctgagtcaaaccatgggatttccacaggatcaaatcagactttggcctatgcaggcccgatctaacggcacaaagcgacccgctatgctggacaacgaggcagatgggaacaagacaatgatcgaactttctgacaatgagaatccttggaccattttccttgaaaccgttgacccagaacttgcagcctccggcgccactctgcctaaattcgacaaggaccatgacgtcatgctattcctgaaaatgtacgaccctaaaactagaagtctcaactattgcgggcacatatatactcctataagctgcaagatccgggatctgcttcccgtcatgtgcgatagagccggctttattcaggataccagtctcattctgtacgaagaggtgaagccgaacttaacagaaaggattcaggactatgacgtgagccttgacaaagcccttgatgaactcatggatggcgatataatcgttttccagaaggacgatccagaaaacgacaatagcgaattgcctacagccaaagagtactttagggacctctatcacagagtagacgtgattttctgtgataaaactatacccaatgacccagggttcgtagtgactttgtccaatagaatgaactactttcaggtagcgaaaactgttgcccagagactgaacacagacccgatgctcctgcagttcttcaagagtcagggctaccgtgacggccctggcaatccactgcgtcacaactacgagggcacgcttcgtgatctcctccagttcttcaagccacggcagcccaaaaagctttactaccagcagctaaagatgaaaattaccgattttgaaaaccgtcgcagctttaaatgcatatggctgaacagtcaattcagagaagaggaaatcacactctaccctgataaacatggttgtgttagagacctgcttgaggaatgtaagaaagctgtagagcttggggagaaagccagtggaaagctccggcttctggagattgtgtcatataagatcatcggggtgcatcaggaggacgagctgctagagtgcttgtcacccgcgaccagtcgaacttttcggatagaggagatcccgctcgaccaagttgatattgataaggagaacgagatgctggtgaccgtggcacactttcataaggaagtgtttggcacattcggaatccccttcctgctgaggattcaccagggggagcactttcgtgaggtgatgaagaggattcagtccctgttagacatccaagagaaggagttcgaaaagtttaaattcgctatcgtgatgatgggtaggcatcagtacataaacgaggatgaatacgaagttaacttgaaagacttcgagcctcagcccggaaacatgtcacacccacggccttggttagggcttgatcattttaataaagctccgaaaagatcacgttatacctacctagaaaaagccattaagatccataactag

SEQ ID NO: 210617 - DNA, 3012 bp, synthetic construct
  misc_feature 1..3012: note = Description of Artificial Sequence: Synthetic coding sequence
  source 1..3012: mol_type = other DNA
atggtgatgccccggttctaccccgaccggccccaccagaagagcgtgggattcttcctgcaatgtaacgccgaatccgattctacttcctggtcatgccatgctcaggcagtgctgaaaataattaactaccgggacgatgaaaaaagcttcagcaggagaatctcccacctctttttccacaaggagaacgactggggtttttctaactttatggcttggtcagaggtcaccgacccagagaaagggttcattgacgacgataaagtgacattcgaggtttttgtccaggctgacgcccctcacggggtcgcatgggatagcaaaaaacacacaggctacgtgggactaaaaaaccagggtgccacttgttacatgaactccttgctccagaccctatttttcaccaaccaattaaggaaggccgtgtatatgatgccaactgaaggcgacgactctagcaagtcggtgcctctggcattacagcgtgttttttacgagctgcagcactcggataaaccggtgggtacaaagaaactgacgaagagctttggctgggagaccctagattcctttatgcagcatgatgtgcaggaattgtgccgggttctgctggataacgtggaaaataaaatgaagggcacatgcgttgagggaaccattccaaagctctttcgcggtaagatggtttcttatatccaatgcaaagaggtggactataggagcgatcgcagggaagattactatgacattcagcttagtataaagggcaagaagaacatttttgagagcttcgttgattacgtcgctgtggaacagttagacggggacaataagtatgacgcgggtgagcatggcctccaagaagcagagaagggggtcaagtttctgactctgcccccggtcctccacttacaactcatgcgattcatgtacgatccccaaacagatcaaaacattaaaatcaacgataggttcgagtttcccgaacagctccctctggacgaatttctgcagaagaccgacccaaaagatccagctaactatatactgcatgctgtgctggtgcattctggggataatcacgggggccattatgtagtgtaccttaaccctaagggagatggtaaatggtgcaagtttgatgacgacgtggtgtcccgatgtactaaagaggaggctatcgagcacaactacggggggcacgatgacgacctgtccgtcagacactgtaccaacgcatacatgctggtgtacattagggaatccaagctctcggaagtcctacaggcagtcacagaccacgacatccctcagcagctagtggagagactgcaagaagaaaaaaggatcgaagcccaaaagcgcaaggaacggcaggaagcccatttgtacatgcaggtgcagatcgtggcggaggaccagttctgtgggcatcagggcaacgacatgtatgacgaggaaaaggtgaagtacacagtgttcaaggtgctaaaaaattcgagcctggcggagtttgttcagagcttaagccagaccatggggttcccgcaggaccagatcaggctttggccaatgcaggctagatctaatggcactaaacgacccgccatgctagacaacgaagccgacggtaacaaaaccatgatcgagctgagcgataatgaaaacccttggactattttcctagagactgttgaccccgagctggccgcgagcggtgccacacttcctaaattcgataaggatcatgatgtcatgttatttctcaagatgtatgatcccaaaactagatctttgaattactgcggtcatatctatacccctatttcctgcaagattagagatcttttgccagtcatgtgcgatcgcgccggattcatccaggatactagccttattctatatgaggaagtcaagccaaatctgactgagcggatccaagactatgacgtttcactggacaaagccctggatgagctgatggatggcgacatcatcgttttccagaaggatgaccctgaaaacgacaactctgagctgcctacggccaaggagtactttcgcgacttgtaccatagagtggatgtgattttttgcgacaaaacaattcccaatgaccccggctttgtagtgactctctctaatcgcatgaactactttcaagtcgccaagactgtggcacagcgcttaaacacagaccctatgctgctccagttttttaagtcacagggctaccgggacgggcctgggaatcctctccggcacaactacgagggcacccttcgcgacctgctgcagttcttcaaaccacggcagcccaaaaagttatactaccagcaattgaaaatgaaaatcaccgacttcgagaatcgccggagttttaaatgtatctggctcaattcacagttccgagaggaggagattaccctctaccctgacaaacacggctgtgtgcgtgatctgctggaggaatgtaaaaaagctgttgaactcggggagaaggccagtggcaagttgcgtcttctggaaatagttagttataagattatcggcgtccaccaagaagacgagctgctcgaatgcttgtctccagcgacttctcggacctttcggatcgaagagattcccctggaccaggtggatattgataaagagaatgaaatgttggtgactgtcgctcactttcacaaggaggtttttggaacctttggtatcccattcttactgagaatccatcagggggagcacttccgtgaggtcatgaaaaggatccaaagtctactcgatatccaggaaaaggaatttgaaaagtttaaattcgccatcgtgatgatggggcgccatcagtacattaacgaggatgagtacgaagtgaacctgaaggactttgagcctcagcccgggaacatgagtcacccgaggccttggctgggactggaccactttaataaggcccccaagcgtagccggtatacctacctcgaaaaagccatcaagattcacaactag

SEQ ID NO: 210618 - DNA, 1530 bp, synthetic construct
  misc_feature 1..1530: note = Description of Artificial Sequence: Synthetic coding sequence
  source 1..1530: mol_type = other DNA
atggaggacgacaccagctggcggagcgaggccaccttccagttcactgtcgagcgctttagtagactcagtgagtctgttctgagtcccccctgttttgtccggaatctcccctggaaaatcatggtgatgccccggttctaccctgaccggccgcaccagaagtctgtaggctttttcctgcagtgtaatgccgaatcagacagcacatcgtggtcctgtcatgctcaggcagtgctcaaaattattaattatcgggatgatgagaaatctttctctagacgcataagtcatttatttttccacaaagagaatgactggggattctcaaatttcatggcttggtcggaggtgacggacccagagaaaggcttcatagatgacgacaaggtgaccttcgaggtctttgtccaagcagatgcgccacacggcgtggcctgggactcaaaaaaacacacaggctacgtgggtcttaagaaccagggagcaacatgctacatgaattccctgctacagactcttttttttactaatcagcttcgaaaggctgtctatatgatgccgaccgaaggagatgactcttccaagtctgttcctctggctcttcagcgggtgttctacgagctacagcacagcgataagccggtgggtacaaaaaagctaaccaagtcttttgggtgggaaacacttgactcctttatgcagcacgatgttcaggagctctgccgcgtcctgttggacaacgtggagaacaaaatgaaggggacctgtgtcgagggaactatcccaaaactgtttagggggaagatggtcagctacattcagtgcaaggaagtggattatcgcagtgatcggcgggaggactactatgatatacagctgagcatcaagggtaaaaaaaatatttttgagtccttcgtggactatgtggccgtggagcagttagatggagataacaagtacgacgccggcgagcacggcttacaggaagcagagaagggggtcaagtttctgacacttccgcctgtcttacatctgcagctgatgagatttatgtacgaccctcaaacagaccagaacatcaagattaacgaccgattcgaattccccgaacaattacctctggacgaatttctacagaaaaccgatccaaaggatcccgccaactacatcctgcacgcagtcttggtgcacagtggcgacaatcatgggggccactacgtggtgtacctgaacccaaagggtgatggaaagtggtgcaaattcgacgacgacgtcgtcagcagatgtacaaaggaagaggccatcgagcacaactatggaggccacgatgacgacctgtctgtgagacattgcactaacgcatatatgttggtgtatatccgggaaagcaagctgaccgtaggtggtgcaatcacccgcagggaaaaggatcggggctctgaggccgaaggcgcagcggggtccccaagtttgtacgcatcagcggatagtagacgcggccctgtgctttggccgcctcgtgaatag

SEQ ID NO: 210619 - DNA, 7713 bp, synthetic construct
  misc_feature 1..7713: note = Description of Artificial Sequence: Synthetic coding sequence
  source 1..7713: mol_type = other DNA
atgaccgccaccacccggggcagccccgtgggcggcaacgacaaccagggtcaggcccccgacggccagagccagcccccgctccagcagaaccagacctctagccccgattcatccaatgagaattcccccgccacgcccccagacgaacagggacagggggacgcacctccacagctggaagacgaggaaccggccttcccacacacggacctcgctaaactcgacgacatgataaatagaccaagatgggtggtgccagttctgcccaaaggagaactcgaagtgctgctggaggctgccatcgatctctcaaagaaaggactggatgtcaagagcgaagcatgccaacgtttctttcgagacgggctaactatctcttttacaaaaatcctgacagacgaagcagtgtccggctggaagtttgagatccacaggtgtattatcaataatacccataggttggtcgaattatgcgtcgccaaactatctcaggactggttccccctgctggagctgctggctatggctttaaatcctcactgtaagttccatatttacaacgggacccgtccatgcgaatcagtatcatcaagcgtccaactccctgaagatgagctttttgctagatcccctgatccccgaagtccaaaaggatggcttgtggacctactcaacaaatttggcaccttgaacggcttccaaattctccatgatcggtttatcaatggaagcgccctgaatgtacaaatcatagcagcccttattaagccgttcgggcagtgctacgagtttctcacactgcacactgtcaagaaatactttctgcccatcatagaaatggtcccccagttcctggagaacctcaccgacgaggagttgaaaaaggaagccaaaaatgaggcaaagaacgacgcacttagtatgataataaagtcactcaagaacctcgcatccagagtcccggggcaagaggaaacagtcaagaatttggagatctttcgcctgaagatgattctacgtctgctgcagatctccagttttaacggcaaaatgaatgcattaaatgaagtcaataaagtcatctcatcggtgagctattacacacatcgccacgggaaccccgaagaggaggaatggctgaccgcggaacggatggccgagtggattcagcagaataatatcctgagcatcgtcttgcgcgactccctacatcaaccccagtatgtggaaaaactggagaaaatcctcaggttcgtaattaaagagaaggccctgactttgcaagatctcgataacatttgggcagcccaggctggcaagcacgaggccatcgtgaaaaatgtgcacgacctcctagcaaaattagcatgggatttcagtcctgaacaactggaccacctgtttgattgctttaaggcaagttggaccaacgcttctaagaagcagcgtgaaaagcttctggagttgatccgcagattagctgaggacgataaggatggggtcatggctcacaaagtactcaacttgctgtggaacctggcccattctgatgatgtcccggtagacataatggacctggcgctgagcgctcatataaagatcttggattattcctgctcgcaggacagggatactcagaagatccagtggatagataggtttatagaggaattacgcactaacgataagtgggtgatcccggcactcaagcagattcgcgaaatttgtagcctgttcggagaagcaccccaaaatctgtctcagacccagcgcagtcctcatgtattttacaggcatgaccttattaaccagctccaacacaatcacgcacttgtgacgctcgtagcagagaacctggcgacatacatggagtccatgcggttgtatgcccgggaccatgaggattacgacccccagacggtacgcctgggatctaggtacagtcacgtacaagaggtccaggagaggctgaattttctgaggtttttgctaaaagatggtcaactatggctgtgcgcaccacaggcaaagcagatttggaagtgcttagctgaaaatgccgtgtacttgtgtgacagagaagcctgttttaaatggtatagcaagctcatgggagatgagcccgatctggaccctgacataaacaaagacttcttcgagagcaacgtgttgcagctggatccaagtttgttaacggagaacggaatgaagtgttttgagagattctttaaagctgtgaactgcagggagggtaaactagtggctaagcgtcgggcatacatgatggacgatctggagctgattggcctcgattatctctggcgagtcgtgattcagtcaaacgacgacatcgcctctagggccatagatctgttaaaggagatctatactaacctgggacctagactgcaggtgaaccaggtggtaattcatgaggatttcattcaaagctgtttcgacagactgaaagcaagctacgacacactttgtgtcttagacggcgataaagactccgttaactgcgccaggcaggaggctgtgcgcatggtgcgcgttcttacagtgctgcgtgaatacattaacgaatgtgacagtgattatcatgaggagcgaactattctccctatgagcagggcattccggggtaagcacctctcgtttgtcgtgaggttccctaaccaggggcgacaggttgatgacctcgaggtatggagccacacaaatgacaccattggttccgtccgccggtgtatcctgaatcgcataaaggccaacgtggcccacaccaagattgaactgtttgtgggcggtgagcttattgaccccgcagacgacaggaagctcataggccagctcaacctgaaggacaagagtctgattacggctaagttgacacagatctctagcaatatgccttcttctcctgacagctcatcagattcgtctaccggcagtccaggtaaccacggaaaccattactccgatggccctaatcccgaggtcgagtcatgcctgcctggagtgattatgagtctacacccccgctacatcagctttctctggcaggtggcagatctaggcagcagtttgaacatgccccccctgagagatggagcacgcgtgctaatgaaactaatgccacctgacagtaccaccatcgagaagctccgtgctatttgcctcgaccatgcgaaactcggcgagagtagcttgtcccctagcctggatagtttgttctttggcccctcagcatctcaggtgctctatcttactgaggtggtttatgctctcttaatgcctgcaggggcccccctggctgatgattcgtccgactttcagttccacttcctgaagtcaggggggctgcccctggtcctgagtatgctcacaaggaacaactttctcccaaatgctgacatggagactagaagaggtgcctaccttaacgccctaaaaattgccaagctgctgctgacagctatcgggtatggccacgtgcgggccgtggccgaagcttgtcagcccggtgtggagggcgtcaaccctatgacccagataaaccaagtgacccacgaccaggctgtcgttcttcagagcgccctacagagtataccaaatccttcaagcgaatgcatgctgaggaacgtgagcgtgcggttggcccagcagatctctgacgaggctagtcgatatatgccagacatctgcgtgattcgggccattcagaagattatttgggcttctggctgcggttctctgcagctggtgttctcccccaatgaggagattacaaagatctacgagaaaacaaatgccggaaacgaaccggacctcgaggatgagcaagtttgttgtgaggccctggaagtcatgactctgtgttttgccttaatccccaccgcgctagacgctttatcaaaagagaaagcttggcagaccttcatcattgatctcttgctgcattgtcatagcaagaccgtgaggcaggttgcccaggagcagttttttctcatgtgcactcggtgctgcatgggacaccgacccctgcttttttttatcactctgttattcactgtgttggggtctaccgctcgcgagagggcaaaacattccggtgactatttcactttgctaaggcacctgctgaattacgcatacaattccaacatcaatgtgcctaatgccgaagttctgctgaacaatgaaatcgattggttgaagcgcataagagacgacgtgaagcgcactggtgagactgggatagaagaaacaatactggaagggcacctgggcgtgacaaaagaactgttagcgtttcagacctcagagaaaaaatttcatatcggatgtgaaaaaggcggagccaaccttatcaaagagctgattgacgattttatcttcccagcttccaacgtttatcttcaatacatgcgaaacggagagctaccggccgaacaggctataccagtctgcggaagtcccccgaccatcaatgccggcttcgaactgttggtggcgctggctgtgggatgtgtcaggaatctgaagcagatagtggacagtctaactgagatgtattacattggcacagctatcactacctgcgaagcgctaacagaatgggagtacctcccgccggtgggccctcgtccacccaagggcttcgtgggactgaaaaacgcaggggcaacctgttacatgaattccgttattcagcagttgtatatgattccaagcatccggaatggaattcttgccatagaaggaaccgggtcagacgtggacgacgatatgtcgggagacgagaagcaggacaatgagagtaatgtggaccctagggacgatgtttttggatatcctcagcaatttgaagacaagccagccctatcaaagaccgaagacaggaaagaatataacattggggtgctgcggcatctgcaggtcattttcggccacttggcagcatctcgcttgcagtattacgttccaaggggcttctggaagcaatttagactgtggggagagccagttaacttacgggaacaacatgatgccctcgaattttttaactcactggttgatagtcttgacgaggcattaaaggcactggggcatcccgccatgctgtctaaggtgctcggggggagcttcgcagatcaaaagatttgtcaaggctgcccccaccgctacgaatgcgaggagtccttcacgaccctgaatgtcgatatacgcaatcatcagaatttgctggatagtctggaacaatatgtgaaaggcgatctcttagagggtgccaatgcctaccactgcgagaagtgcaacaaaaaagttgatactgtgaaacgacttctgatcaaaaagctccctcctgttttagcaatacagttgaagcggttcgattacgactgggaaagagagtgtgctatcaagtttaatgattactttgagttcccccgagaactggatatggaaccatacacggtggccggcgtggccaagctcgagggagacaacgttaaccctgaatcacagctcatccagcagtctgagcaatcggaatctgaaacagctggttctacgaagtaccggttagtcggtgtgctcgtccactccgggcaggcctcaggcggacactattacagctatatcattcaacgcaatggcggtgacggagagcgtaatagatggtataaattcgacgacggagatgtgaccgaatgtaaaatggatgatgatgaagagatgaagaaccaatgctttggaggtgagtacatgggggaggtgttcgaccatatgatgaagcgtatgagctatagaaggcagaaaagatggtggaatgcttacattctcttttacgagcgcatggataccattgatcaggatgacgaactgattaggtacatctcggaactagctataacgactaggccccaccagataataatgccttctgctatcgagcggagcgtgcgcaaacaaaatgttcagtttatgcacaaccgcatgcagtattccatggagtactttcaatttatgaaaaagctgctcacctgcaatggtgtgtacctgaatccaccacctggacaggatcatttgctcccagaggcggaagagatcacaatgatatccattcagttggctgctcggtttctgttcaccacagggttccacactaagaaagtggtacgcggaagtgcatctgattggtacgatgccctgtgcatcctactgcgtcattcaaagaacgtgcggttttggttcgcacataatgttctgtttaacgtgagcaatcggttcagcgaatacctgctggagtgtccctccgccgaagtcaggggcgcatttgcaaaactgatagtgtttattgcccatttcagtttgcaggacggcccatgtccttccccatttgcctcccctggcccttcgagccaagcatatgataatctgtctctgagtgatcacctactgagggcagttctgaatttgctacggcgggaggtaagtgaacacggacggcaccttcagcaatatttcaatctttttgtgatgtacgcgaatctgggcgtagcagagaagacacaacttttgaagctgtcagttcccgcaactttcatgctggtgtctttagatgagggcccaggtccaccgattaagtaccaatacgctgagctggggaagctctacagtgtcgttagccagctgatcaggtgctgcaacgtaagcagcagaatgcaaagttccattaacggaaaccctcctctgcccaatccctttggggaccccaatctctcccaacccatcatgcctatccaacagaatgtcgcagacatactctttgttagaacatcatacgtgaaaaagattatagaggactgttccaattcggaggagaccgtaaaactgctcaggttctgttgctgggagaatccgcaattttcctcgacagtgcttagtgaactcctgtggcaggtcgcctatagctatacctacgagcttagaccttatcttgatctgctgctacaaatattactgatcgaagactcttggcaaacacaccgtattcacaacgcactcaagggtatccccgacgatagggacggacttttcgataccatacagcgctcaaaaaatcactatcaaaaacgggcttatcagtgtattaagtgtatggtcgcacttttttctaactgtcccgtggcataccagatcctccagggaaatggtgatttgaaaaggaagtggacttgggcggtcgagtggctgggtgatgaactagagagaagaccttatacgggaaaccctcagtacacctacaacaactggagccccccagtgcagagcaatgagactagtaatgggtacttccttgaaaggtctcactctgccagaatgactcttgccaaggcttgcgagctctgtcctgaagaagtaaagaaggccacatctgttcagcaaatcgaaatggaggagtctaaggaacccgatgatcaggacgcaccagacgagcacgagtcgccaccccctgaagacgctcctctgtatccccactccccagggtctcagtatcagcagaacaatcacgtgcatggtcagccttacacggggcctgccgcgcatcacatgaacaacccccagcgtacaggccagcgcgcccaggagaattatgaaggctctgaggaggtttctcctccacagacaaaggaccaatag

SEQ ID NO: 210620 - DNA, 7665 bp, synthetic construct
  misc_feature 1..7665: note = Description of Artificial Sequence: Synthetic coding sequence
  source 1..7665: mol_type = other DNA
atgaccgccaccacccggggcagccccgtgggcggcaacgacaaccaaggccaggcaccagacggccagtcgcaacccccccttcagcagaatcagactagctctccagacagttcaaatgaaaattctccagcaacaccgccagatgagcagggccagggcgacgcgcctccgcagcttgaagacgaagaacctgcatttccccataccgatctggcgaaactggacgacatgattaaccggccgaggtgggtagtgcctgtgctgccaaagggcgagctggaagtactgcttgaagccgctattgacctgtcgaaaaaggggctggacgtgaagtctgaggcttgtcaacgcttcttccgggacggactgaccatcagcttcaccaagatcctgacggacgaagcagttagcgggtggaaattcgaaattcacaggtgcatcataaacaatacgcaccgactcgtcgaattatgcgtggccaagctttcacaggattggtttccacttcttgaactgctggccatggcccttaacccacactgcaagtttcacatttataacggaacaagaccttgcgaatcagtgagttcttctgtgcaattgccagaggacgaactcttcgctcgcagtccggacccgcgttctcccaaaggatggttagtagatctgctcaataaattcggcacactcaacgggtttcagatccttcacgataggtttatcaacggctcagcgcttaacgtgcagataatcgctgctctgatcaagccttttggccagtgctatgagttccttaccctgcacacagtgaaaaagtactttcttcccatcatcgaaatggtgccccaatttctggagaacctgactgacgaagagctcaagaaggaggccaaaaacgaagcaaagaacgatgccctctccatgatcataaaatcactcaaaaatctcgcatcacgcgtccccggacaggaagaaaccgtcaaaaatcttgagatttttcgcctgaagatgatacttcgactgctccagatttcaagctttaacggaaagatgaatgccctaaacgaggttaataaggtgatcagctccgtgagctactatacacatcggcatgggaacccagaggaggaggagtggctcaccgcagagcggatggctgaatggatccagcagaacaacatcttatcaatcgtattacgggattctcttcaccaaccgcagtatgtggagaaactagagaaaatcttgaggtttgtaattaaggagaaggctctcaccttgcaggatttagataatatttgggccgcccaagccggaaagcacgaagctatcgttaagaacgtccacgacctgctggctaagttggcatgggatttctcccctgaacagttggatcatttgttcgattgcttcaaggcttcttggaccaatgcctccaagaagcagagagaaaaactgttagagcttatccgacgtctcgccgaagatgataaagacggagttatggcacacaaagtgcttaatctgttgtggaacttagcacacagcgacgacgttcccgtggacatcatggacttagcactctccgctcatattaaaattctagattacagttgttcacaggacagagacacccagaagattcagtggatagacaggtttatcgaggaattgcggacaaacgataagtgggtgattccagctctgaaacaaatcagagagatctgtagtctattcggggaggccccgcagaatctgtcccagacccagaggagtccacacgttttttatcggcacgacctgatcaatcagcttcagcacaatcacgctctcgtcacactcgttgctgagaacctggccacatacatggaatctatgcggttgtacgctagggatcatgaggattatgatccgcagaccgtcagactcggtagtcgctactcgcatgtccaggaggtgcaagagcgcctgaatttcctgcgcttcttgctgaaagacggacagctgtggttatgcgcgcctcaggcgaaacagatctggaaatgcctggccgagaatgccgtatatctgtgcgacagggaagcttgctttaaatggtattcgaaactgatgggggacgagcctgatttggatcctgacattaataaggatttttttgagagtaacgtactgcagcttgacccatctctcctcactgagaatggcatgaaatgcttcgagaggttctttaaagcagttaattgtcgagaaggtaagttagtagctaagcggcgcgcttatatgatggatgacctggagttaattggactggactacttgtggagggtggtgatccagtccaatgatgacatcgcctcacgtgcaatcgacctgctcaaagaaatctatactaatctgggccctcggttgcaggtgaaccaggtagtgattcatgaagactttatccaaagttgcttcgaccggttgaaggctagctacgatacactgtgtgtgctggacggcgacaaagacagtgtgaattgcgcccggcaggaggctgtcaggatggtacgagtgctgaccgtcctgagagagtatataaatgagtgtgacagtgactatcacgaggagagaaccattctgccgatgtcaagggccttccgaggcaagcacctgtcttttgttgttcgctttccaaatcaggggaggcaggtcgacgatttggaggtgtggtcccatacgaatgatacaatcgggagcgtcaggcgctgtatcttgaataggattaaggccaatgttgcccatacgaaaatagagctatttgtcggtggcgagctcattgaccctgccgatgacagaaaactgatcgggcagctgaacctcaaggacaagtcactgattacggcgaaacttacacagatttcttccaacatgcctagctcacccgactctagctccgactccagcacagggagcccaggaaatcatggaaatcactacagtgacggcccaaaccctgaggttgagtcctgcttgcctggggttataatgtctttgcacccgaggtacatttcatttctgtggcaagtagcggacctgggctcaagcctcaacatgcccccgcttcgagatggcgccagggtgctcatgaagctgatgccacctgacagtactaccattgagaaactgagggcaatttgtcttgatcacgcgaaacttggtgagagctccctgagtccctctttagacagcctgttctttggcccaagtgcctctcaggtactgtacctcactgaggtggtttacgcgctgttaatgcccgctggagctcctttggcagatgactcctccgactttcagtttcattttctgaagtcaggaggtttgccactggtgctgtccatgctcacgcgaaataatttcctgcccaatgctgacatggagacccgaagaggagcctatcttaatgccctaaaaatcgccaagctcctgttgaccgctataggctacggccatgtgcgcgccgttgcagaggcatgtcaacctggcgtggagggtgtcaaccccatgactcagatcaatcaggtgacccatgatcaggccgtcgtactgcagtctgcacttcagtctattcccaacccatccagcgagtgtatgctgcgcaacgtttctgttcgcttagcccagcagatctctgacgaagcttctagatacatgccagatatttgtgtgattcgagccatccagaaaattatttgggcttctggatgtgggtcacttcagctggttttctcccccaacgaagagattaccaaaatctacgagaagacaaatgccggcaatgagcccgacctcgaggacgaacaggtttgttgtgaagcactggaagtgatgaccctgtgctttgcactcatccccaccgccctggatgccctttcaaaggagaaagcatggcagacattcatcatagatctcctgttgcactgccattcaaaaaccgtgcggcaggtggcccaggagcagttcttcctcatgtgtacaagatgctgtatgggccaccggcctctccttttctttattactttgctgttcactgtcctcggctccacagcccgggagcgcgctaagcattccggcgactacttcaccttgcttcggcaccttcttaactacgcctacaactcgaatatcaacgttcctaatgcggaagtgctcctgaacaatgagatcgattggttgaaaaggatcagagacgacgtaaagcggaccggggaaaccggtatagaggaaacaattcttgagggccacctcggagtgactaaagagctgctggctttccaaacgagtgagaagaagttccatatcggctgcgagaaggggggtgccaatctgattaaggagttgattgatgactttatcttcccggcttcaaatgtatacctacaatacatgagaaacggcgagcttcctgccgagcaagccattccggtatgcggctctcccccgaccattaatgccggcttcgagctcttggtcgctctggctgtaggctgtgtcaggaacctgaaacaaatcgtcgattcacttactgaaatgtattacatcgggacagccataacgacttgtgaagccttaacagaatgggagtatttaccaccagtggggcccagaccgccgaagggcttcgtgggactgaagaacgcaggcgcgacttgctatatgaactctgtaatccagcaactgtacatgatccctagtatacggaacggaatcttggctatcgaagggactggcagcgatgtggatgatgacatgtcaggggacgaaaagcaggataatgaaagtaacgtggaccctagagacgatgtctttggatatcctcagcagttcgaagacaaacccgccttgtccaaaaccgaggaccggaaggagtacaatatcggcgtgctgaggcacctgcaggttatattcggccatcttgccgcatcaaggctgcagtactacgtgcctcgcggattttggaagcagtttcgcctctggggagaacctgtcaatttgcgtgaacagcatgatgcactcgagttttttaattctctagtggacagcctggacgaggccctcaaagcactgggccaccccgcgatgctgagcaaggttctgggcgggtcattcgccgatcaaaaaatctgccaaggctgtccacaccgttatgagtgcgaggagtcttttacgacgctcaatgtggacatacgtaaccatcagaatcttctcgattcacttgagcagtatgttaaaggagacctacttgagggcgccaacgcctatcactgtgaaaagtgcaacaaaaaggttgacactgtgaagagacttctcatcaagaagctgccccctgtgctggcaatacagctcaagagatttgattatgattgggaaagagagtgcgcaattaaattcaatgattattttgagttcccccgcgagctggacatggaaccttacactgttgccggggtcgctaagctggagggcgacaatgtcaaccccgagtcccaattgatccagcaatctgaacagtcagaatccgagacagcagggagtacgaagtacaggttggtgggcgtactcgtgcactccgggcaggcctccggcgggcactattactcctacattattcagagaaacgggggggacggcgagcggaatagatggtataagtttgatgacggcgatgtgactgaatgtaagatggatgatgatgaagaaatgaagaatcaatgctttggaggggaatacatgggggaggtgttcgatcacatgatgaagcggatgtcctatcggcgccagaagagatggtggaacgcctacatcctcttttatgaaagaatggacacaatcgaccaggatgatgagttaatccgatatatctccgagcttgccattacaacgcggccccaccagattataatgccaagtgccattgaacgcagtgtcagaaaacaaaacgtgcaatttatgcataaccgaatgcaatactccatggagtattttcaattcatgaagaagctgctgacatgtaatggcgtgtatcttaacccacccccagggcaggatcacctactccctgaggccgaagagatcaccatgatctctattcagctggccgctagattcctgttcacaacaggttttcacaccaaaaaagttgtgcggggatcagcgtccgactggtacgatgccttatgtatcctgctcaggcatagcaagaacgtccggttctggttcgctcataatgttctttttaacgtgtccaacagattctcggaatatcttctggagtgtcccagcgccgaagttcgcggcgctttcgcaaagcttattgtcttcattgcacatttcagcttgcaagacgggccatgccccagcccattcgcctccccaggtccttcgagtcaggcctacgataacttgtctctctctgaccatctgctccgtgccgtactgaatttacttagacgagaggtgtccgaacacgggcggcacctgcagcaatatttcaatcttttcgtaatgtatgcgaacctcggggttgctgaaaagacacagctcctgaagctatccgtgcctgcaacctttatgcttgtgtcccttgacgaggggcctggcccgcccatcaagtaccagtacgcggaactgggaaagttatattctgtggtgtcacagctcatccggtgttgcaatgttagtagcagaatgcagtctagtattaacggtaacccacccttaccgaatcctttcggcgaccctaatcttagccagccgataatgcccattcagcaaaacgtggctgacattctgtttgttcgaacaagctatgtgaagaagataatagaggactgctcaaattcagaggagaccgtgaagttactgcgcttttgttgctgggagaatcctcaatttagcagtaccgtcctgtccgaactcctgtggcaggtcgcctacagctatacatacgagcttaggccgtatctggacctgctgctgcaaatcttgctcatagaggatagctggcagacgcacaggatccacaacgcactcaagggaatccctgatgatcgcgatggactatttgatactattcagcggtcaaaaaaccactatcagaagagagcctatcagtgtataaagtgcatggtggcactgttctctaactgccccgtagcctatcagatcttgcagggaaatggtgatctcaaacgcaagtggacatgggcagtagaatggttgggcgacgagctcgaacgcagaccctacacagggaatcctcagtacacttacaacaactggtcccctcccgtgcagtccaacgaaacaagtaatggttacttcctggaacggtctcactcggccaggatgacactggccaaggcttgtgaactttgtccagaggaagaacccgacgatcaagacgcgcccgatgagcatgagtcgccacctccagaagacgcgcccctttatccccatagtccaggctcacagtatcagcaaaacaatcacgttcacgggcagccctacactggccccgcagcccatcatatgaacaacccacaaagaaccgggcaacgagcacaggagaactatgaaggctcggaagaggtttccccacctcaaacaaaggaccagtag

SEQ ID NO: 210621 - DNA, 7668 bp, synthetic construct
  misc_feature 1..7668: note = Description of Artificial Sequence: Synthetic coding sequence
  source 1..7668: mol_type = other DNA
atgaccgccatcacccacggcagccccgtgggcggcaacgacagccagggacaagtgctggacggtcaatcgcagcacctgtttcagcagaaccaaacctcgtcccccgactcttcaaacgagaattccgttgctacaccaccccccgaggagcagggccagggcgacgctcctcctcagcacgaggacgaggaacctgccttcccccacaccgaactggccaatctggatgatatgatcaatcgcccacggtgggtggtgcctgtactcccgaaaggtgagcttgaggtgctattagaggcagccatcgacttgtctgtgaaaggccttgatgtgaagagtgaagcctgtcagcgattttttagagatgggctcactattagtttcacaaagattctgatggatgaggcagtgtccggttggaagttcgaaatccatcgctgcatcattaataatactcacagacttgtggagctttgtgtagctaagctgtcgcaggactggttccctctcctagagctgcttgcgatggcactcaatccacactgtaagtttcacatctacaacggtacaagaccatgtgagcttatctcttctaacgcacagctgccagaggatgagctgtttgcccgcagctctgatccgaggtcacccaagggttggctagtggatctcatcaataagttcggtacattgaatgggtttcagatcctccatgatcgcttcttcaatggtagcgcactgaacatacagatcatagccgccttgataaagcccttcggacagtgttacgaattcctgtcccaacatacactgaaaaaatatttcatcccggtgattgaaattgtaccccatcttctggagaacctgaccgacgaggagctgaagaaagaagctaagaatgaagctaagaacgatgctctctcgatgattatcaagagcctgaagaatctggctagccgcatctctggacaggatgaaacaattaagaatctggagatcttccggcttaagatgatcctccgacttctgcagatttcctccttcaacgggaagatgaatgcgcttaacgagataaataaggttatctccagtgtatcttactacacccaccgccactccaaccctgaagaggaggagtggctaaccgccgagagaatggcagaatggatacagcaaaataacatcctttccatcgtgctgcaggacagcctacaccagcctcagtatgtagagaaattggagaaaatactgagatttgtcatcaaagagaaggctttgaccctgcaggacctggacaacatctgggcagctcaggcaggaaagcacgaggccattgtgaagaacgtccatgatcttcttgctaagctggcctgggacttctctccagggcagcttgaccatctcttcgattgcttcaaagcctcttggactaatgcttccaagaaacaaagagaaaagttactggaacttatcaggcgactcgccgaggacgataaggacggcgtgatggctcataaggttctgaacttgctttggaacctcgctcagtccgacgacgtgccagtggacattatggacctcgccttgtccgctcatataaagattttagattactcctgttcccaggaccgggatgcacagaagattcaatggatcgaccacttcatcgaagagctcagaaccaacgacaagtgggtaatcccagctctgaagcagatacgagaaatctgtagcctttttggcgaagcttcccagaacctgtctcagacccaacggtctccacacatcttttacagacatgaccttataaaccagctgcaacagaaccacgccttggtgaccttggtggctgagaacctggccacgtacatgaacagtatcagactctacgcgggagatcacgaggactatgatccacagacagtgaggctgggatccaggtatagccacgtgcaagaggtccaagagcggctgaactttctcagatttctcctgaaggacggccagctctggctatgcgcgccacaggcaaagcaaatctggaagtgccttgcagagaatgcggtctatctgtgtgatcgcgaggcttgctttaaatggtactcaaagcttatgggcgacgagccggatctggatccagatatcaataaagacttcttcgaatcgaacgtactccagttagacccctcgttactgacggagaacgggatgaagtgttttgaaagatttttcaaagccgttaactgtagggaaagaaagctgatagctaagaggcgaagttatatgatggatgatcttgaactgatcggacttgactacctgtggcgcgtcgttattcagtcaagtgacgaaattgctaacagagctattgacttgctcaaggaaatttatactaatctcggacctaggctgaaggcaaaccaagtggtgattcatgaagattttattcagtcttgctttgaccgactaaaggcctcttacgataccctgtgtgtttttgacggagacaaaaactcaatcaattgcgcacggcaagaagcgataaggatggtgagggtccttacagttatcaaggaatatattaatgagtgtgattccgactatcacaaagagcggatgattttaccaatgtcaagggcatttcgggggaagcatttgtctttgatcgttcgctttccgaaccaggggcggcaagtggatgagctggacatttggtcacatacaaatgataccatcggaagtgttcggcggtgtattgtgaacagaataaaggcaaacgttgcacataagaaaattgaactgtttgtgggtggagagctaattgattccgaggacgatcgcaagctcataggtcagttaaatctgaaggacaaatcactgatcacggcaaagttgacacagatcaatttcaatatgccctcgagcccggactcttcatcagactccagcacggctagcccaggcaaccacagaaaccactataatgacgggcccaatctggaggtagaaagttgccttcctggagtgatcatgtctgtacatcctaggtacatctcttttctctggcaggttgccgatctgggttcaaatctgaacatgcctcccttaagggacggggccagggttttaatgaagttaatgcccccggaccgtactgctgtagaaaagttgcgtgccgtctgtctagatcacgccaaactaggagaaggcaaactgtcccccccactggattctttgttttttggccccagtgccagccaggttttatacctgactgaggtggtctacgctcttcttatgcccgcaggagtgccattgacagatggatcttcggacttccaggtgcacttcctcaagtccgggggactccccctcgttctctctatgctgataaggaacaactttcttccgaacactgacatggagacaaggaggggcgcttacctgaacgccctgaagattgccaagctactgctcaccgccatcggctatggacatgtgcgcgctgtagctgaggcttgccagccggtcgtcgacgggactgaccccattacccagatcaaccaggtaacccatgatcaggcagttgttcttcagagtgctctccagtccatccccaatccaagctccgagtgcgttctcagaaacgagagtattttgctggcgcaggagatcagtaatgaggcaagtagatatatgcctgacatctgtgttattcgtgccatacagaagatcatctgggcctccgcttgcggagcacttggcctggtgttctcccccaatgaggagatcacaaaaatctaccagatgaccacaaacgggtccaacaaactggaagtcgaggatgaacaggtttgttgtgaagctctggaagttatgaccttgtgctttgcccttctgccgaccgccctagacgccctgtccaaagaaaaggcctggcagacttttatcatcgatctgttactgcactgcccctccaaaacggttcggcagttggcacaagagcagttctttttgatgtgtactagatgttgtatgggccacagacctctcttgttctttataactttgcttttcaccatccttgggagtacagcgcgtgaaaaaggcaagtactcgggcgactactttaccctcctgcgccatttgctgaattacgcttacaacggcaatattaacatccccaacgccgaggtgctactggttagcgagatcgactggctgaaaaggattcgcgataatgtgaaaaatactggagagactggcgtcgaagaacccattctagaaggacacctcggggttacgaaagaactcctggccttccagacatctgaaaaaaaataccatttcgggtgcgaaaaaggcggggctaacctgatcaaggagctgattgatgatttcattttccctgcctccaaggtatatctgcaatatctgcggtctggagaactgcctgcggagcaggcgatccccgtgtgtagctctcctgttacgatcaacgccgggtttgagctgctggtcgcattggcaattggatgcgtcagaaacctcaaacagatcgttgattgtctgacagaaatgtactacatgggaaccgctatcaccacctgtgaagctctgactgagtgggagtatttgccgccagtcgggcccaggccacccaaaggcttcgtaggcttgaagaacgcaggcgcaacatgttacatgaattcagtgattcagcaactttatatgattccatctatccggaattcaattctggccatcgagggtactggcagcgacctccatgatgatatgtttggcgatgagaagcaggatagcgagtcaaatgtggacccacgcgacgacgtgttcggctatccacatcagttcgaggacaagccagctctgtctaaaacggaggaccggaaagagtacaatatcggggtgttacgacacctgcaggtcatctttgggcacctcgcagccagccagttgcagtattacgtgcctcggggtttctggaagcaatttagattgtggggggaaccggtgaatctgcgggaacagcatgatgcgcttgagttctttaattctctggtggacagcctggatgaagccttgaaggcgttggggcacccggccatcttgtcgaaggtgctcggcggctcatttgccgaccagaagatttgccaaggatgccctcacagatatgagtgtgaggagtccttcactacactcaacgtagacattagaaaccaccagaacctcctggacagcctcgagcagtacatcaagggggatctgttggagggtgcaaacgcctaccactgtgaaaaatgcgacaaaaaagtggatactgttaagagactgctcattaaaaaattacccagagttttagcaattcagctgaagcgatttgactacgattgggagcgggagtgcgccattaaattcaatgactacttcgaattccctcgcgagctcgacatgggaccatataccgttgcgggggtcgctaatctcgagcgagacaacgtgaatagtgagaacgaactgatcgaacagaaggagcagagcgataacgaaactgccgggggcacgaagtatcgcttagtcggcgtcctggtgcactcggggcaggccagcggcgggcattactattcttatattatacaacgcaacggaaaggatgaccagactgaccactggtataagtttgacgacggcgacgtgaccgaatgtaaaatggacgacgatgaggaaatgaagaaccagtgtttcggcggggagtacatgggagaagtgtttgatcatatgatgaaaaggatgtcttacaggcgccaaaagcgctggtggaacgcttacattctgttctacgagcagatggatatgattgatgaggatgatgaaatgataaggtatatttccgaattgaccattgcaaggccccaccagatcattatgtctcccgccatcgagcggagcgtccggaagcagaatgtcaaatttatgcacaaccggctacagtacagtctagaatacttccagttcgtgaaaaaactgctcacctgcaacggcgtctatctgaaccccgcccccggccaagactacctcctacctgaggctgaggagatcaccatgatctctatccaattagccgcccgattcctgttcactactgggttccacaccaaaaaaattgtgaggggacctgcttctgactggtacgacgctttgtgcgtcctgcttcgtcacagcaagaatgtgcggttttggttcacccacaacgtcctgtttaacgtgtcaaaccggttctcagagtatctgctagagtgtccatcggctgaggtccgaggagccttcgctaagctgatcgtgttcatcgcccacttttccctgcaagatggatcatgccccagtccgttcgcttctcctggcccctcttcccaagcctgcgacaatttgtctctgtctgaccacctgctcagggctacactgaacctgctgagaagggaggtctcagagcacggccaccacctccagcagtactttaacctctttgttatgtatgctaatctcggggtcgctgagaagactcagctcctcaagctgaacgtgcctgctactttcatgctcgtgagcctcgatgagggacccggaccgcctataaaataccagtacgctgagctcgggaaactctactcggtcgtaagtcaactgatcaggtgttgcaacgtgtcttccacaatgcaaagtagcattaatgggaatcctcccctgcccaatccattcggagatcttaatctgagtcaacctatcatgcccatacagcagaatgtgctggacattctctttgtgaggactagctatgtcaaaaaaataatcgaagactgctcgaactctgaggatacaatcaaactgctacggttttgttcctgggaaaacccccagtttagctcaaccgtcctatccgagctactgtggcaggtggcctactcatatacctatgaactgcgtccctacctggatctgttgttccaaattttactgatagaggacagttggcaaacccaccggattcacaatgccctcaaggggattcccgacgatcgggatggactgttcgacactatacaacggagtaaaaaccactatcagaagagggcatatcagtgcataaagtgcatggtcgccttgttttcctcctgtccggttgcctaccagattctgcagggaaacggggacctaaaacgcaaatggacctgggcagtagagtggttgggggatgaactggaaagacgaccatacacagggaacccccagtactcctataacaactggtcacctcctgttcagagcaacgagacagcaaacggctacttcctggagcggtcccactcggccaggatgacacttgcgaaagcttgcgaattgtgtccagaagaggagccagacgatcaagacgccccagatgaacacgaacccagcccctctgaggacgcccccctgtacccccactccccagcatcacaataccaacagaacaaccacgtgcacgggcagccttataccggacccgctgcccaccatctgaacaacccacaaaaaaccggccagaggacacaagagaactatgaggggaatgaagaggtcagctctccccagatgaaagaccagtag

SEQ ID NO: 210622 - DNA, 714 bp, synthetic construct
  misc_feature 1..714: note = Description of Artificial Sequence: Synthetic coding sequence
  source 1..714: mol_type = other DNA
tgactgctgaagaccgccgtgacccagcggatccccagcaactactttgcctttgctctgggcagaattttaagcagtcatttgctgtcctccgccaacttcagcggccgcatccacaacgctctcaagggcattccagatgaccgtgatggcctgttcgatacaattcagaggagcaagaatcactatcagaagagagcctaccagtgcatcaagtgtatggtcgcccttttctcatcttgcccagtagcatatcagatcttgcaaggtaacggagatctgaagaggaaatggacgtgggcggtggaatggctgggggacgagctggaaagaaggccctacacaggcaacccccaatacagctacaataattggagtcccccagtgcagagcaatgagacagctaatggatattttctggagcgctcccacagtgcccggatgactctggccaaagcgtgtgaactctgtcccgaggaggagccagacgatcaggatgctcctgacgaacacgaacctagcccaagcgaggatgcacctctctatcctcatagtccagcttcccagtaccagcagaataaccacgttcacggtcagccttatacaggaccagcggcacaccacctcaacaatccacagaagaccgggcagaggacacaagagaactacgaaggcaacgaggaggtttccagcccacagatgaaagaccagtag

SEQ ID NO: 210623 - DNA, 3201 bp, synthetic construct
  misc_feature 1..3201: note = Description of Artificial Sequence: Synthetic coding sequence
  source 1..3201: mol_type = other DNA
atgaccgaccaggagaacaacaacaacatcagcagcaaccccttcgcggctctgtttggctcccttgcagatgctaagcagtttgcagccattcagaaggaacagttgaagcaacaatctgatgagctgcccgcctcgcctgacgatagtgacaatagcgtctcagagagcttagatgaatttgactatagtgtagccgaaatctccaggtccttccgtagccaacaggagatttgtgagcagttgaacattaaccacatgatccagcgcatttttcttatcaccctcgataacagcgacccatccctcaaaagcggaaacgggataccaagcaggtgcgtctacctggaggagatggccgtagaactcgaagatcaggattggctggacatgtcgaacgttgagcaggcactatttgcgcgcttactgcttcaggatccaggaaatcatctgatcaacatgacttcctcaaccactttgaatctaagtgctgacagggacgcaggagagcgtcacatcttctgctacctgtactcctgttttcagcgggccaaggaggagatcacaaaggttccagaaaacctcctcccattcgcggtgcagtgcagaaacctcacagtttcaaacacccgcaccgtcctccttacccccgagatttatgtcgaccagaatattcatgagcagcttgtcgatctgatgttagaggcaatacaaggcgcccattttgaagacgtaaccgaatttctggaggaggttatagaggcattaatcttagacgaggaagtgcgtacgttcccagaggtaatgattcctgtgtttgacattcttctggggcgcatcaaagatctcgaactgtgccaaatcctgctttacgcgtacttggacatactgctttatttcaccagacagaaggatatggcaaaggtctttgttgaatatattcagccaaaagacccaaccaacgggcagatgtaccaaaaaacactacttggggtgatactgagcatcagctgtttactcaaaacaccaggggtcgtggaaaatcacgggtattttctgaatcctagcaggagcagtccccaggagatcaaggttcaagaggccaacatccaccagtttatggcacaatttcatgaaaagatatatcagatgcttaagaacctgttacaattgtcgcccgagactaagcattgcattctgagctggctcgggaattgtctacatgccaacgcggggcgtacgaagatatgggcaaatcagatgcccgaaattttctttcaaatgtacgcgtccgacgcgttctttctcaacctgggggctgcactactgaaattgtgccagccgttctgtaaacctagaagcagcagacttctaacctttaaccctacgtactgtgcactcaaagaactgaatgatgaggagcggaagatcaaaaacgtccacatgagggggctagataaggagacatgcctcatccctgcagtgcaagagcctaaattcccacagaattacaacctggtgaccgaaaatttagcactcactgaatacaccttatatttaggcttccataggctccatgaccagatggtcaaaattaaccaaaacttgcatcgcctccaggtggcctggagagatgcgcagcaatctagctctcctgcagcagacaacctgagagagcagtttgaacgtctgatgacaatttacttatctaccaaaactgcaatgactgagcctcaaatgctgcaaaactgcttgaacttacaggtctccatggccgtgctgctcgtacaactggccataggtaacgaaggcagccagcctatcgagctcacctttcctctcccagacggctactcatcactagcctacgtgccagagttctttgcagacaacttgggcgacttcttgatcttcctgcgccgctttgccgacgacatattggagacgagcgccgactccctagaacacgttttacatttcattactatttttaccggctctatagaaaggatgaaaaaccctcacctccgggctaagctggcagaggtgctggaggccgttatgccccatctggatcaaacccctaatccactggtaagttcagtgttccatagaaagagggtcttctgcaatttccagtatgcccctcagctggcggaggctcttataaaagtattcgtcgatatcgaatttactggcgaccctcatcagtttgaacagaaattcaactatcgtaggccaatgtatcctatactccgttacatgtgggggaccgacacttaccgtgaatctattaaagatttagcagactacgcaagcaagaaccttgaggctatgaatccgccccttttcttgagattcctgaacctgctcatgaacgatgctattttcctactggacgaggccattcagtacttgtctaagattaagattcaacagatcgagaaggacagaggcgaatgggacagtctaaccccagaggcgagaagggagaaggaggccggccttcagatgtttggccagctggctcggttccacaacatcatgtcaaatgagactatcggaacactcgccttcctcacaagcgaaattaaatcccttttcgtgcacccatttctggccgagcggattatcagtatgctcaattacttcctacagcacctggtaggacctaagatgggtgcccttaaagtgaaagacttcagcgagtttgactttaagcctcagcagctggttagcgacatctgtaccatctatctcaatctgggggatgaggaaaacttctgtgctaccgtgcccaaggatgggagaagctactcacctactttatttgcgcagaccgtcagggtgcttaagaaaatcaacaagcctgggaacatgattatggcattctctaatctggcagagcgaatcaagtcgctggcggatctgcagcagcaagaagaggagacctacgctgatgcctgcgatgaattcctcgaccccattatgtctaccctgatgtgcgatccagtcgtgctgccaagctcacgagtgacggtggaccgttctaccatcgccagacacctgttgtctgaccaaaccgacccattcaaccgttcgccactgacaatggaccaaatacgcccgaacacagagctgaaggaaaaaattcagcggtggctggccgagcgaaaacagcagaaagagcaactcgagtag

SEQ ID NO: 210624 - DNA, 3222 bp, synthetic construct
  misc_feature 1..3222: note = Description of Artificial Sequence: Synthetic coding sequence
  source 1..3222: mol_type = other DNA
atgaccgaccaggagaacaacaacaacatcagcagcaaccccttcgctgcgttgttcggctctctggcagacgcaaagcagttcgcagccattcagaaggagcagttaaagcagcaatccgacgaactgccggcaagccccgatgacagtgataacagtgttagcgagagccttgacgagtttgattatagtgtggccgagatctcccgatcgtttaggtcgcagcaggagatctgcgagcaactcaacatcaatcatatgatccagagaatttttctgatcacactggataactcagacccatccttgaaatcaggtaacggcattccatctcggtgtgtttatctggaagaaatggccgttgaactagaagaccaggattggttggacatgtcaaacgtcgagcaggccctttttgcccggcttttgctgcaggaccccgggaatcacctgatcaacatgacatccagcactacactcaacctctccgcagaccgagacgccggggaacggcacatcttctgttacttatactcctgctttcagagagcaaaggaagaaatcacaaaagttcctgagaacctcctgccattcgctgtgcagtgcaggaatctgacagtgagcaacactagaacggtactgctgaccccagagatttatgtggatcagaatattcatgagcagctggtagacttaatgcttgaggccatccagggtgcacgtgagtacatgaataagatctatttcgaggacgtcaccgagtttctcgaggaagtgatcgaggctctgatccttgatgaagaggtccgcacatttcccgaggtgatgatcccagtgttcgacatcttgctgggaagaattaaggacttggaactctgtcagatactcctctacgcttatctggacatcttgttgtatttcacccggcagaaggacatggccaaggtcttcgtggagtatatccagccaaaggatcccacaaacggccagatgtatcaaaagacactgctaggcgtgattctctcgatttcgtgtttgcttaaaaccccaggggtggtggagaaccatggctactttctgaaccctagtaggtccagcccacaagaaattaaggttcaggaagccaacattcaccagtttatggcccagttccacgaaaagatctatcagatgctcaaaaatctcctgcagctgtccccagaaaccaaacactgcatcctctcctggttgggtaattgtttgcatgcaaacgcaggcagaaccaaaatctgggcaaatcagatgccggagatcttcttccagatgtatgcttcggacgctttttttttgaatctgggagccgcactgttgaagctttgccaaccattctgtaagccacggagtagtcggctcctcacctttaatccaacctattgcgccttgaaagaactgaatgatgaagagcgaaagataaagaatgtccatatgcgggggctggataaagagacgtgcctgatcccagcagttcaggagcctaagtttcctcagaattacaacctggtcacagaaaatctggcgctaaccgagtataccctgtacctgggcttccatcgattgcatgaccagatggttaagatcaaccagaacctacaccggttgcaggtggcatggagagacgcccagcagtcatcctcgcctgcggctgacaatctgcgggagcagtttgaaaggctgatgacaatttatctcagcaccaaaactgccatgaccgagccccaaatgctgcagaactgtctgaatctacaggtgagcatggccgtgctgcttgtccaattagccatcgggaatgagggctcccagcctattgaacttacatttcccttaccagacggctactcgagcctggcgtacgtaccagagttttttgccgataacctcggcgattttctcatatttttgcgtcgtttcgccgatgacatcctcgaaacatccgccgattctcttgagcacgtgctgcacttcatcaccatctttaccgggtctatcgaacggatgaagaacccacaccttagagccaagttggctgaagtgctagaggccgtgatgcctcacctcgatcagacccccaatcccctggtgtcctcagtcttccaccgcaagcgggttttctgcaacttccaatacgcaccgcagctagctgaggcattaattaaggtgttcgtggatattgaatttactggcgaccctcatcaattcgaacagaaatttaactatcgccggccaatgtaccctatccttcgatatatgtgggggactgacacctatagagaaagtattaaggacctcgccgattacgccagtaaaaatcttgaggccatgaacccccccctctttttgcgttttctgaacctcctgatgaatgatgctatctttctgctggacgaagccatacagtatcttagcaaaatcaagatacagcaaatcgaaaaggatcgcggcgaatgggatagcctgactcctgaggcccgccgtgagaaggaggccggactgcagatgttcggccagttggcgcgttttcataatatcatgtctaacgagactatcggaaccctcgcgttcttgacctcagagatcaaaagtctgttcgtgcatccgttcctggcagagcgtataatctctatgctgaactacttcttgcagcacttagttggcccaaagatgggcgccttgaaggttaaggacttcagtgaatttgactttaagcctcagcagctggtcagtgacatatgtacaatttatcttaatctgggtgatgaagagaatttctgcgctacagtgcctaaggacggacggagctactcacctactctgtttgcccagacagtgcgggtacttaagaagataaataaaccggggaatatgataatggctttttcaaatctagcggagcgcattaaatcgctagctgatctccaacagcaggaagaggaaacttacgccgatgcgtgcgacgagttcctagatccaattatgtcgaccctgatgtgcgatcccgtcgtccttccaagctcccgcgtgacggtggatagaagcaccattgcccgacacctcctgagcgaccagacggacccattcaatagatcccctctcactatggaccagatccgaccaaacactgagttgaaagaaaagatccagcggtggctggcagagcggaagcagcagaaagaacagctcgagtag

SEQ ID NO: 210625 - DNA, 1617 bp, synthetic construct
  misc_feature 1..1617: note = Description of Artificial Sequence: Synthetic coding sequence
  source 1..1617: mol_type = other DNA
atggtgaagatcaaccagaacctgcaccggctgcaggtggcctggagagatgcccagcagagctcaagccctgccgccgacaatctacgtgagcagttcgagcgactgatgactatctatttgtcaactaaaaccgccatgactgaaccacaaatgttgcagaattgtctgaatttgcaggtgagtatggcagttctgctggtccagctggccattggtaacgagggatcccagccaatcgagctgaccttcccactgccagacggttattcatcactggcctacgttcctgagttctttgccgataatcttggcgactttctgattttcctgagaaggttcgcagacgatatcttggagactagtgcagactcactagaacatgtgttacacttcataaccatttttacaggatctattgaacggatgaagaatccacatctgagagctaagctggctgaggtgctggaggccgttatgccccacctagaccagactccaaatcctctagtctcaagtgtattccaccgcaaaagggtgttttgcaactttcagtatgccccccagctcgccgaggctttgatcaaagtgtttgtggatattgagttcaccggcgatcctcaccagtttgagcagaaatttaattaccggcggcctatgtacccaatcctacgatatatgtggggcactgacacctatcgcgagtccatcaaagaccttgcggattatgcctcgaagaacctcgaggcaatgaatccaccccttttccttagattcctgaatctgttaatgaacgatgctatctttctgctggatgaggcaattcagtacttaagtaagatcaaaatccaacagatcgaaaaggatcggggagagtgggacagcctcacgccagaagctcgacgggagaaggaagcaggcctgcaaatgtttggacagctggcgcgcttccacaacattatgtctaacgagacaatcggaaccttagctttcctgacctccgagataaagagtctcttcgtgcacccatttcttgccgagagaattatttccatgctgaactacttcctccagcacctggtgggcccaaagatgggagctctgaaagttaaagacttctcagagttcgacttcaagccacaacagctggtatcagacatctgtactatatacctgaacctgggtgatgaagagaacttctgtgccaccgtgcccaaagacggaaggtcgtacagtcccacacttttcgcgcaaaccgtgcgggtgctgaagaagataaacaagccgggaaacatgataatggccttcagtaatctagccgagaggattaagagccttgctgatctacagcagcaagaagaagagacctatgcagacgcctgcgatgagtttctggaccccattatgtctacattaatgtgtgaccccgtcgtattgccctcctcgagggtgacagtcgatcgttcaacaattgctagacacctgttaagtgaccaaaccgacccattcaatagatcaccgctgactatggaccagatacgaccaaacaccgagctgaaagagaaaatccaaaggtggctagcggaaaggaaacagcagaaggaacagctggagtag

SEQ ID NO: 210626 - DNA, 3522 bp, synthetic construct
  misc_feature 1..3522: note = Description of Artificial Sequence: Synthetic coding sequence
  source 1..3522: mol_type = other DNA
atggaggagctgagcgccgacgagatccggcggcggcggctggccagacttgcagggggacagacttcgcagcctactacacccctgacgagcccccagcgcgagaatcctcccgggccaccaatagccgcgtcagcacccggccccagccagagcctggggctgaatgtgcacaatatgactcctgccacgtccccgatcggagccagtggcgttgctcataggtcgcagagctctgagggcgtttcctccttgtcctcttcccctagtaactccctggagacccagtctcagtctctctcccgatcccaatcaatggacattgacggcgtgtcttgcgagaaatcgatgtctcaggtggatgtggatagtggcatcgagaacatggaagttgacgagaatgaccgccgggaaaaaagatcactctcagacaaagaaccatccagcggaccggaagtatctgaggaacaggcgttacagctcgtgtgtaagatcttcagagtctcctggaaggaccgggatagagacgtaatcttcctgagctctctctctgcacaattcaaacaaaacccaaaggaggtgttctctgacttcaaggacctaattggacagattttgatggaagtgctcatgatgtctactcagacacgggacgaaaatcctttcgcaagcctgactgcaactagccaacctatcgccgccgcagctcggtctcctgatcggaaccttctattgaacacaggtagtaatccaggtacgtcccccatgttttgtagtgtggcttcctttggtgcctccagcctgtcctctctgggagcaagcggcggtgctagcaattgggattcgtacagtgatcacttcactatcgagacatgcaaggaaacagatatgcttaattacttaatcgagtgtttcgatagagtgggcattgaagagaaaaaagcccctaaaatgtgcagtcagccagcagtttcacaactgttgtccaatatccgatcgcagtgtattagccacacagccctcgtgctgcaaggatcgctgacgcagcctcgctctctgcagcaaccctccttcttggtgccatatatgttgtgcagaaaccttccgtatgggttcatccaagagctggtaaggaccacacaccaagatgaagaagtgttcaagcagatcttcatcccgattctgcagggcctcgctctcgctgccaaagagtgttccttggattcagattacttcaagtacccgctgatggctctcggagagttgtgcgagacaaagttcggaaagacacaccctgtttgcaacctggtggcctcactgcggctgtggcttccgaaatcactttcccccggatgcggaagagagctccagagattgagctatctaggtgctttcttttccttctcagtattcgccgaggacgatgtaaaggtggtggagaagtacttctccggacccgcaatcacactggagaacacgcgcgtggtgtcccaatcacttcagcactacctcgagctgggcagacaggaactgttcaaaatacttcatagcattctcctcaacggcgagacccgagaggctgcgttgagttatatggcagcagtggtgaatgcaaacatgaaaaaggcccagatgcagacggatgaccgactggtgtctaccgacggtttcatgctgaacttcctctgggtgctgcagcaactttcgaccaaaatcaagctggaaactgtggatcctacttacatcttccatccccgctgcagaatcaccttacctaatgatgagactagagtcaacgcgaccatggaagacgtgaatgattggctgaccgaactttatggtgaccagcctcccttttcagagcctaagtttccgaccgaatgcttttttctgactcttcacgcacatcacctaagcatcttgccaagttgtaggcggtatattcggcggttacgggctattagagagctgaaccggaccgtagaggatctgaagaacaatgagtcacagtggaaagatagtcctctggccacccgtcaccgcgagatgttgaagcgctgcaaaacgcaattgaaaaaattagtgcgctgtaaggcttgtgccgatgctggtctcctggatgaaagcttcctcagacgctgccttaacttttatggcctgttaatccagcttctcctgcgtatcttagacccagcctacccggacatcacgctcccactgaactctgacgtaccaaaggtgtttgcggcattaccagaattctacgttgaggacgtggcagagttcctgtttttcatcgtgcagtatagtccgcaggcattatacgagccctgtacacaagacattgtgatgttcttggtggttatgctgtgcaatcagaattatattcggaatccgtaccttgtcgccaaactcgtggaagttatgttcatgactaaccccgccgtgcagccgcgaacccaaaagttcttcgaaatgattgagaatcacccgctcagtaccaagttgctggtgccgagccttatgaagttttacaccgatgtagaacataccggcgcaactagtgaattttacgataaatttactatacgatatcatattagtacaatctttaagagcctttggcagaacatagcccatcatggcaccttcatggaagaattcaactctggaaaacaatttgtgcggtacattaacatgctcattaatgatacaactttcctgctggatgagagcctggagtcactgaaaaggatccacgaggtacaggaggaaatgaagaataaagagcagtgggatcagctaccacgggatcaacagcaagcgcgccagtctcaattggcccaggatgaaagagtgagcaggtcctatctcgctctggccactgagacagttgacatgtttcacatcttaaccaagcaagtccaaaagccgttcctccgccccgagctcgggccccgactagccgccatgctcaactttaacttacagcagctttgcggcccgaagtgcagagacctcaaagttgaaaaccctgaaaaatacggttttgagccaaaaaagctgcttgatcagttaactgatatatacctccagctggactgcgcacgatttgccaaggcgatcgctgacgatcagcgctcctatagtaaagaactattcgaggaagtgatctctaagatgcggaaagccggcatcaaaagcaccattgcgatcgagaaatttaaacttctggcagagaaagtcgaggaaattgtggcaaagaacgcccgagcggaaatcgattattctgatgcacccgatgaattccgggaccccctcatggatacactgatgacagacccagtgcgattgcccagtggaacgataatggataggtccattattctccgccacttgctcaactctcctacggacccgtttaacaggcagactttgacagaatcaatgttggagccagtacccgaacttaaagagcaaatccaggcctggatgcgcgagaagcagaacagcgaccattag

SEQ ID NO: 210627 - DNA, 3909 bp, synthetic construct
  misc_feature 1..3909: note = Description of Artificial Sequence: Synthetic coding sequence
  source 1..3909: mol_type = other DNA
atggaggagctgagcgccgacgagatccggcggcggcggctggcccgcctcgccggtggccagacttctcagcccactacgcccctcactagcccccagcgcgaaaacccaccaggcccacccatcgcagcatcagctccagggccttcccagagcttaggcttaaatgttcacaacatgactcctgccacatctcccatcggggcctccggcgtggctcatcggagccaatcctcagaaggagtgtcgtccctcagttcaagcccttccaatagcctcgaaactcagagccagtccctttctcgaagccaaagcatggatatagacggagtttcatgcgagaaaagtatgagccaggtggatgtggatagtgggatcgaaaatatggaggtagacgaaaatgacaggcgcgaaaagcgatcattgagcgataaggaacccagcagcgggcccgaggtatctgaggaacaagctctgcagctggtctgtaagattttccgcgtgagctggaaggacagggatcgggatgtgatatttttgagtagtctcagtgcgcaattcaagcagaatccaaaggaagtgttttctgattttaaggacctcatcgggcagatcctgatggaagttctcatgatgagcacacagactagggatgaaaacccattcgccagcctgacagctacatcacagcctatcgctgccgccgccaggtcccctgatcgaaacctcctgctcaataccggttctaatccaggaacctctccaatgttctgttccgtagcaagctttggcgccagcagtttgagcagtctgtacgagtcaagccctgcgcctactccatccttctggagttcagtgcccgtcatgggcccatcactcgctagtccatctcgtgctgccagccagctggctgtgccctctacccccctgtccccacactccgccgcttcagggactgccgctggctcgcagccttcctcccctcgctataggccttacacagtcactcacccttgggccagcagcggcgtttccattttaagcagttctccatctcctccagctctggcctcctctccacaagccgtgcctgcctcttcatctcgacagcggccatcctccaccgggccaccactgcccccggcgtccccctccgcaactagtcggcgccctagctctttacggattagcccaagtctgggcgcctcagggggtgctagcaactgggactcctactccgaccacttcacaatcgaaacatgcaaggagaccgacatgctcaactatctcatcgagtgcttcgaccgggtcgggatcgaggaaaaaaaggcgcccaagatgtgttctcagcctgctgtcagccaattgctctctaatattcggtctcagtgtatttcccacactgcactcgtcctgcagggttcccttacccagccgagatccctgcagcagccttcttttttggtaccctacatgttatgccgtaacctgccatatggctttattcaggagttggtcaggacaacccatcaggacgaagaggtcttcaagcagattttcatccctatcctccagggtctagctctggctgccaaggaatgtagtttagacagcgattatttcaaatatccattaatggcactgggcgagctgtgcgaaactaagttcgggaagacacatccagtatgtaacctcgttgcatctctcaggctgtggttgccaaaaagcctgtcccctggctgcggacgggaactgcagaggctttcttacctgggggcatttttcagtttttccgtattcgctgaagacgatgtcaaagtcgtcgaaaaatattttagtggccctgccattaccctggaaaacacaagggtggtttcccagtctctgcagcactacttggagttaggccgccaagagctttttaagattctgcattctatactgttgaacggagagactagagaggctgcactgtcatatatggctgcggttgttaatgctaacatgaaaaaagcccagatgcaaaccgatgaccggctggtctccacagacggttttatgttgaacttcctttgggtactgcagcagttgtctacaaagatcaagctagagacggttgatcctacttatatcttccatccccgctgcaggattaccttgcctaacgatgaaacaagggtcaatgcaaccatggaggacgtgaatgactggctcaccgaactatatggggaccaaccacctttttcagagcctaagttccccacagagtgtttttttttgactctgcatgctcatcatctgtcaattctaccatcttgcagaaggtacattcgccgcctccgggccattagggaattgaaccggaccgtggaagatctgaaaaataatgagtcccagtggaaggacagtcctttagccacacgccatagagaaatgctgaaaaggtgtaaaacgcaactgaagaagctcgttcggtgtaaggcctgcgcagatgctggtctgttagacgaatccttcttgaggagatgcttgaatttttatgggcttcttattcagctcttgctgcgaatactggatccagcctatccagacattactcttcctctgaactccgacgttcccaaggtcttcgctgctctgcctgagttttacgttgaagatgtcgcggaatttttattcttcatcgtccagtattctcctcaagccttgtatgaaccatgcactcaggacatagtcatgtttctggttgtcatgctctgcaatcaaaactacatccgaaatccctacttggtggctaagctcgttgaagtgatgttcatgactaaccccgccgttcagcccagaacccaaaagttctttgagatgatcgaaaaccacccgttgtccactaagctccttgtcccaagtctcatgaaattttacactgatgtggaacacaccggagccacctccgagttctatgacaagttcactataaggtaccacataagtacaatattcaaatccctgtggcagaacatagcacaccacggcaccttcatggaggaattcaactctgggaagcagttcgtgaggtacattaatatgctgatcaacgatacgacatttctgctagatgaatctctcgagtccttaaagagaattcacgaagtccaagaggagatgaaaaacaaggaacagtgggaccagctgccgcgtgaccagcaacaagctcgccagagtcagctggctcaggacgagcgcgttagccgcagctacctggcactcgccacagagaccgttgatatgttccacatcttgacaaaacaggtgcagaagccattcctgcgcccagaactgggcccacgcctcgcagcgatgctgaattttaatcttcaacagttatgcgggccgaaatgtagggatctaaaagtggaaaatccggagaagtatggatttgaaccaaagaagctgctggatcaactgaccgacatctacctgcagctggactgcgctaggtttgccaaagctatcgccgacgaccaacgtagctacagcaaggagctctttgaagaagttatctccaaaatgcgtaaggcagggattaagtctactatcgctatcgaaaaattcaaactcctggccgagaaggttgaggaaatcgtggctaagaacgcacgcgcagagatagattattccgacgcgccggacgaattcagggatccactgatggatacacttatgacagacccagttcgcttaccgtctggcacaataatggacagatccattatcttgaggcacctgttgaattcccccacggatccctttaaccggcaaacccttacagaatcaatgctcgagcctgttcccgaattgaaggagcaaatccaagcgtggatgcgggaaaagcagaatagcgatcactag

SEQ ID NO: 210628 - DNA, 303 bp, synthetic construct
  misc_feature 1..303: note = Description of Artificial Sequence: Synthetic coding sequence
  source 1..303: mol_type = other DNA
atggaggagctgagcgccgacgagatccggcggcggcggctggcccgtcttgctggcggccagactagtcagcctaccactcccctgacctctccacaacgggaaaacccccctggtcctccgatcgctgcatccgcacccgggccctcgcagagtctcgggttaaacgtgcataacatgactccggcgacgtcccctatcggcgccagtggactggggataattagtgacgacaagatgataaaaacagagttcggttcagccgatttcatgaatctcgttgatggcttcaagatcaagtag

SEQ ID NO: 210629 - DNA, 3186 bp, synthetic construct
  misc_feature 1..3186: note = Description of Artificial Sequence: Synthetic coding sequence
  source 1..3186: mol_type = other DNA
atgagccaggtggacgtggacagcggcatcgagaacatggaggtggatgaaaacgatcgcagggaaaaacgctctctgtccgataaggaaccatcatctgggccagaggtgagcgaggagcaagcactgcagctggtgtgtaagattttcagggttagttggaaggaccgggaccgtgacgtgattttcctatcctccctcagtgctcagtttaagcaaaatcccaaagaagttttcagtgattttaaggatctgatcggccagatcctcatggaagttctgatgatgtccacccagacacgtgacgaaaatccttttgcctcactcacagcaacatcgcagcctatcgcagcagctgcgaggtctccagaccgaaatttacttcttaacaccggtagcaaccccggcacatcccctatgttttgttcagtggcttcgtttggggcttcttcactgtctagtcttggtgcttcgggcggcgcttcaaactgggactcctattccgaccacttcacaatagagacttgtaaggagaccgatatgctaaattatctcattgaatgctttgatcgcgtgggcatcgaagaaaaaaaggcccctaaaatgtgttcacaacccgctgtatctcagctgttgtctaacattcggagtcaatgcatatctcataccgctctcgtactccaggggtcactgacacaaccacgctcacttcaacagccatcctttctggttccttatatgctctgtcgaaaccttccttacggatttatccaggaactggtgcggacaacacaccaggacgaggaagtatttaaacaaatatttattccgattctacagggactggccctggcggccaaggaatgctccttagattctgactactttaagtaccctttgatggcgctaggagaattatgtgagacaaagttcggaaagactcaccctgtgtgcaatcttgtggcatctctgagactttggctgccaaagtctctgagccccggctgcggacgcgagctccagaggttgtcctacctgggagctttttttagttttagcgtcttcgctgaggatgatgtaaaggtggtggagaagtacttcagcggacccgccatcacactcgagaacactcgcgttgtgtcccagtcattgcaacattacctcgagttgggtcgccaggaactctttaagattctgcattcaatccttctgaatggcgagaccagggaagcagcactgagctacatggccgcggttgtgaacgctaacatgaaaaaagcgcagatgcaaacggacgaccgactggtttcaaccgacggcttcatgttaaattttctgtgggtactacaacagctgagcactaaaattaagctagagaccgtcgatccaacctatatttttcatcctcgctgtaggattactctcccaaacgacgagacccgggtgaacgccaccatggaggacgttaatgattggttgactgaattgtacggcgatcagcctcccttctcagagcccaaattccccaccgagtgcttcttcttgacactgcacgcccaccacctctctatcctgccatcatgtcgacggtatattcgtagattgagagctatccgggaattgaaccgcaccgtggaagatctgaagaataatgaatcacaatggaaggatagccccctggccactaggcacagggaaatgctgaagaggtgcaaaacacagttgaagaagctagtccggtgtaaagcctgtgcagacgccggtctgttggatgaatcatttttgaggaggtgtttgaatttctacggtcttcttatccaactgctcttgagaattctggatccagcttacccagacataaccctgcccctcaactctgatgttcccaaggtgttcgccgctctccccgaattctacgtggaggatgttgctgagtttctttttttcattgtccagtactcaccccaagcgttgtatgagccttgcacgcaggatatcgtaatgttccttgttgttatgttatgcaatcagaattacataagaaatccatacttggtggccaaacttgtcgaggtgatgtttatgacaaaccctgctgtgcagccaagaacccagaagtttttcgaaatgatcgaaaaccatcccttatccacaaagttgctggtgccatcactcatgaaattctacaccgacgtggaacatacgggagcaacaagcgagttctatgacaagttcactataaggtaccatatcagtacaatcttcaagtccctgtggcagaacatagcccatcatggtacattcatggaagagttcaacagtgggaaacaattcgtgaggtacatcaatatgctgattaacgacaccaccttcctacttgacgagagtctggaaagtctgaaaagaatccacgaggtgcaggaagagatgaagaacaaggaacagtgggaccagttacctcgcgaccagcagcaggccaggcagtcccagctggcccaggatgagcgcgtgagtagaagctacctcgcccttgctaccgaaacagtggacatgtttcacatcctgaccaaacaggtccagaaaccttttttgagaccggagttgggtcccagactggccgctatgctgaacttcaacctgcagcaactgtgtggtcctaaatgtagggacctgaaagtcgaaaaccctgaaaagtacggattcgagcctaagaaattgctagaccagctcactgacatttatctgcagctcgactgtgcacggtttgctaaggccatcgccgacgatcagaggtcatactcgaaagagctcttcgaagaggtgatctccaagatgcggaaggctggaattaaatcaaccattgcaatagaaaagttcaagttactggccgagaaagtggaggagatcgtcgccaaaaatgccagagccgagatagactactcagatgctcctgacgagtttcgcgggaaatggacccacccattaatggatacgcttatgactgacccagtgaggctgcctagcgggacgatcatggatcggtccataattctcagacatctgctgaactctccgaccgatccgtttaacaggcagactcttacagaatcaatgctcgagccagtacctgagttaaaggagcagattcaagcctggatgagggagaaacagaacagtgaccattag

SEQ ID NO: 210630 - DNA, 513 bp, synthetic construct
  misc_feature 1..513: note = Description of Artificial Sequence: Synthetic coding sequence
  source 1..513: mol_type = other DNA
atgcccggcgaggtgcaggccagctacctgaagagccagagcaagctgtctgacgagggacggctggaaccccggaagttccactgtaaaggggttaaggtgcctcggaacttcagactgctagaagaactggaggagggtcagaagggcgtcggcgatgggacagtcagttgggggcttgaggatgacgaggacatgacgcttacacgttggaccggcatgattatcggcccaccgcggacaatttatgagaataggatatattccctgaagatagagtgtggcccgaagtatccagaggccccaccctttgtgaggttcgtcaccaagattaacatgaacggggtaaactccagcaacggagtggtggacccaagagccattagcgtcctggctaagtggcagaactcttactccatcaaggtggtgcttcaggagctcagaaggcttatgatgagtaaagagaatatgaaacttcctcagccccccgaaggccaatgctatagtaattag

SEQ ID NO: 210631 - DNA, 312 bp, synthetic construct
  misc_feature 1..312: note = Description of Artificial Sequence: Synthetic coding sequence
  source 1..312: mol_type = other DNA
atggagaagggcctgaacaccaagaacttcaccgagcagaccatctacgaaaataggatctacagcttgaaaatcgagtgcggacctaagtatcctgaggcccctcccttcgtgcgtttcgtcaccaagatcaatatgaatggcgttaatagcagcaatggtgtggtagatccaagagccatttcagtactcgcaaaatggcagaactcttattctatcaaggtcgtcctgcaggagctgaggcgactaatgatgtctaaagagaacatgaagttgccccagccccctgagggtcagtgctactctaactag

SEQ ID NO: 210632 - DNA, 444 bp, synthetic construct
  misc_feature 1..444: note = Description of Artificial Sequence: Synthetic coding sequence
  source 1..444: mol_type = other DNA
atggccgccaccaccggcagcggcgtgaaggtgccccggaacttccggctactcgaggagctagaggaaggacaaaagggcgttggcgatggaaccgtgtcctggggcctggaggacgatgaggatatgaccctcacacgctggacaggcatgatcatcgggccacctcggaccatctatgaaaaccggatctactccttgaagatcgagtgcggaccgaaatatccagaagctccaccattcgtgcgcttcgttacaaaaataaacatgaatggcgtcaacagttcgaacggcgtggtcgacccacgcgccattagtgtgttagcaaagtggcaaaattcgtacagcatcaaggtagtgctgcaagagctcaggagactgatgatgtctaaggagaacatgaaattgcctcagcccccagaaggacaatgttactcaaattag

SEQ ID NO: 210633 - DNA, 513 bp, synthetic construct
  misc_feature 1..513: note = Description of Artificial Sequence: Synthetic coding sequence
  source 1..513: mol_type = other DNA
atgcccggcgaggtgcaggccagctacctgaagagccagagcaagctatctgacgaggggcgcctcgaaccgcggaaatttcactgtaagggggttaaagttcctcgtaattttagactgctggaagaacttgaggaaggccagaagggcgtgggcgatggcaccgtaagttggggtttagaggacgatgaagatatgacgctgacacggtggactgggatgataatcgggcccccacgcacaatatacgagaatcgcatctattcactgaagatcgaatgcggtcctaaataccctgaggccccaccattcgtacggtttgtgacgaaaatcaatatgaacggcgtaaatagcagtaacggggtcgttgaccctcgggctatcagtgtcctggcaaagtggcaaaactcttacagcattaaagttgttttacaggagctgcgccgcctcatgatgagcaaggaaaacatgaagttacctcagccaccggagggtcagtgctacagtaactag

SEQ ID NO: 210634 - DNA, 312 bp, synthetic construct
  misc_feature 1..312: note = Description of Artificial Sequence: Synthetic coding sequence
  source 1..312: mol_type = other DNA
atgaaggaggacctgaacctggagaacttcaccgccaagaccatctacgagaaccggatttacagtttgaaaatcgaatgtggccccaagtacccggaagccccaccatttgtccggtttgtgacaaagattaacatgaatggcgtgaattcatcaaacggagtagttgatcccagagctatcagcgttctggcaaagtggcagaactcatacagtatcaaggtggtgttgcaggagctcaggagactgatgatgagcaaggagaatatgaaactcccacagccacctgaaggccagtgctattctaactag

SEQ ID NO: 210635 - DNA, 312 bp, synthetic construct
  misc_feature 1..312: note = Description of Artificial Sequence: Synthetic coding sequence
  source 1..312: mol_type = other DNA
atgaaggaggacctgaacctggagaacttcaccgccaagaccatctacgagaaccggatctatagtctgaagattgagtgcgggcccaagtatccagaggccccacccttcgtccgcttcgttaccaaaattaacatgaacggcgtgaacagcagcaatggtgttgtggatcccagggctattagtgtcctggccaaatggcagaacagctactcgatcaaagtggtgttacaggagctgcggcgtctgatgatgtcgaaagagaacatgaagctgcctcagccacctgaaggccagtgctactcaaactag

SEQ ID NO: 210636 - DNA, 318 bp, synthetic construct
  misc_feature 1..318: note = Description of Artificial Sequence: Synthetic coding sequence
  source 1..318: mol_type = other DNA
atggccgccaccaccggcagcggcgtgaaggtgccccggaacttcaggttgcttgaggagctcgaggaagggcagaaaggagtaggcgacggaaccgtgtcatggggcctggaggatgacgaggatatgactcttaccaggtggacgggcatgattatcggcccaccacgggttgatccacgcgccattagcgtgctggccaagtggcaaaattcttattccattaaggtggttcttcaagagctcagacgcctgatgatgagcaaagagaacatgaaactacctcagccacctgaggggcaatgctacagcaactag

SEQ ID NO: 210637 - DNA, 369 bp, synthetic construct
  misc_feature 1..369: note = Description of Artificial Sequence: Synthetic coding sequence
  source 1..369: mol_type = other DNA
atgagcacccccgcccggcggcggctgatgcgggacttcaagcggctgcaggaggatcccccagcaggggtaagcggcgccccctctgaaaataatatcatggtgtggaatgcggtgatatttggccctgaaggtaccccttttgaggacgtgtatgctgatggcagcatttgcctcgacatattacagaatagatggtcgccaacttatgatgtatccagcatcctaacctcgatccagtcattgctggatgagcctaaccctaactcccctgctaacagtcaggccgcccaactgtatcaagaaaacaaaagggagtatgaaaaaagggtcagtgctattgttgagcagagctggcgcgattgctag

SEQ ID NO: 210638 - DNA, 459 bp, synthetic construct
  misc_feature 1..459: note = Description of Artificial Sequence: Synthetic coding sequence
  source 1..459: mol_type = other DNA
atgagcacccccgcccggcggcggctgatgcgggacttcaagcggctccaggaagaccctccagccggcgtctccggggcacccagcgagaacaacattatggtgtggaacgctgtcatattcggcccggagggcacaccattcgaggatggtaccttcaaactcaccatagagttcacagaggaatatccaaataagcctcccacagtgcggtttgtctctaaaatgttccaccccaatgtatacgcagatggctccatttgcctggacattttgcagaatcgctggagtcccacctacgacgtaagttccattctaaccagtattcagtcactgctcgatgagcccaatcccaacagtcccgcgaacagccaggcagcccagctctaccaagagaacaaaagggaatatgagaaaagagtctcagcaatcgtggagcagagctggagggactgctag

SEQ ID NO: 210639 - DNA, 234 bp, synthetic construct
  misc_feature 1..234: note = Description of Artificial Sequence: Synthetic coding sequence
  source 1..234: mol_type = other DNA
atgttccaccccaacgtgtacgccgacggcagcatctgcctggacatattacagaaccggtggtcacctacctatgatgttagttcaatcctgacgtcaattcagtccttgctcgacgagcctaaccctaactcccctgctaattcacaggctgcacagctgtaccaagaaaataaacgggagtacgagaaacgcgtttccgcaattgtggagcaatcttggcgagattgctag

SEQ ID NO: 210640 - DNA, 459 bp, synthetic construct
  misc_feature 1..459: note = Description of Artificial Sequence: Synthetic coding sequence
  source 1..459: mol_type = other DNA
atgagcacccccgcccggcggcggctgatgcgggacttcaagcggctgcaggaggacccaccggtgggcgtgagcggagctccatcagaaaacaatattatgcagtggaatgccgtcatttttggccccgagggaacaccattcgaggacggtaccttcaagctggtcattgaattctctgaagagtaccctaataagccccctaccgtccggttcctgtctaaaatgttccatccgaatgtgtacgcggacgggtccatttgcttagacatcctgcagaataggtggtccccaacatatgacgttagcagtattcttacttcaatccagtctctgctcgatgaacctaaccctaacagtccagcaaattcacaggccgctcagctgtaccaggaaaataaacgggagtacgaaaagcgggtgagtgctatcgtagaacagtcctggaatgactcgtag

SEQ ID NO: 210641 - DNA, 153 bp, synthetic construct
  misc_feature 1..153: note = Description of Artificial Sequence: Synthetic coding sequence
  source 1..153: mol_type = other DNA
atggccagccagaaccgggaccccgccgccaccagcgtggccgccgctcggaagggagccgaacctagtgggggcgccgcacggggacctgttggaaaaaggcttcaacaggagcttatgacactgatgaacccgactctaatagtaccgtag

SEQ ID NO: 210642 - DNA, 486 bp, synthetic construct
  misc_feature 1..486: note = Description of Artificial Sequence: Synthetic coding sequence
  source 1..486: mol_type = other DNA
atggccagccagaaccgggaccccgccgccaccagcgtggccgccgcccggaagggcgctgaacccagtgggggggccgcgagagggcctgttggcaaaaggttacagcaagagttgatgaccctgatgatgagtggagataaaggaatttccgcttttcctgagagtgataacttgttcaaatgggttggcactatccacggagcggccggcactgccgtagggtccattcgaacttcctcaactgtgtgtctacttagcggaccaagagaaacacaggattccagtaagcccctggtgtggggtctggggtgggacatgagactgctccttgagctgactctccagctgttcctgcaaatgccagaaccgaacatcgactccccactgaatacacacgccgccgaattgtggaagaatcctaccgccttcaagaaatacctgcaggagacatacagtaaacaggtgaccagtcaggagccttag

SEQ ID NO: 210643 - DNA, 453 bp, synthetic construct
  misc_feature 1..453: note = Description of Artificial Sequence: Synthetic coding sequence
  source 1..453: mol_type = other DNA
atggccagccagaaccgggaccccgccgccaccagcgtggccgccgccagaaagggggccgagccatcaggcggcgctgctcgtggcccagtggggaagcggctccagcaggaactgatgactctcatggtctacgaggacctgcgctacaagttgtcattggagtttccgtccgggtatccgtacaacgctcccacagtcaaattcctcacaccctgttaccatccgaacgtggacacccagggaaacatctgcttggacatcctaaaggaaaaatggagtgccctgtacgacgttcgtactatactgctgtctattcagtcattacttggcgaaccaaatatcgattcgcccctgaacactcatgcggccgagttgtggaagaacccaacagccttcaaaaagtatctgcaggaaacatatagtaaacaagtgacttctcaggaaccttag

SEQ ID NO: 210644 - DNA, 540 bp, synthetic construct
  misc_feature 1..540: note = Description of Artificial Sequence: Synthetic coding sequence
  source 1..540: mol_type = other DNA
atggccagccagaaccgggaccccgccgccaccagcgtggccgccgccaggaaaggagcggaaccatcagggggagccgccaggggaccagtcggtaaacggctgcaacaggagctgatgaccctaatgatgagcggagacaaggggataagcgcctttcctgaaagcgataatctgtttaagtgggtaggcacaatccacggtgcggcagggaccgtgtacgaagacttgaggtacaaattgtcccttgagttcccttctggatatccgtataacgcacctacagtcaaattcctgactccctgttaccacccaaacgttgatacacagggcaacatctgccttgacatactcaaagaaaaatggagcgccctgtacgacgtcaggacaattttactgagcatccagtcccttcttggcgagccaaacatcgacagtcccctaaatacccatgcggccgaactctggaagaaccccaccgcttttaaaaaatatttgcaagagacctattccaagcaggttacctcccaggagccatag

SEQ ID NO: 210645 - DNA, 423 bp, synthetic construct
  misc_feature 1..423: note = Description of Artificial Sequence: Synthetic coding sequence
  source 1..423: mol_type = other DNA
atgaccctgatgatgagcggcgacaagggcatcagcgccttccccgagtccgacaacttatttaaatgggtagggactatccatggagcggccgggaccgtgtacgaagacctccgctacaaactgtcactggaattcccttccgggtatccgtacaatgctccgaccgtgaagttcctgactccctgctatcatcccaacgtggatacccagggaaacatctgtctagatatcctgaaagaaaagtggagcgccctgtacgatgtgcggacaatactgctgagtattcagagtctgttaggtgaacctaacatcgattctccccttaatactcacgccgccgaactctggaaaaaccctactgcatttaaaaaatacctgcaggagacttatagcaagcaggtgacaagtcaggagccatag

SEQ ID NO: 210646 - DNA, 423 bp, synthetic construct
  misc_feature 1..423: note = Description of Artificial Sequence: Synthetic coding sequence
  source 1..423: mol_type = other DNA
atgaccctgatgatgagcggcgacaagggcatcagcgccttccccgagtctgataacctattcaaatgggttggtacaatccacggtgctgccgggacagtgtatgaggacctccgatacaagctgagtctggagtttccaagcggctatccctataacgcacccaccgtaaagtttctgaccccctgctatcatcctaacgtagatacgcagggcaacatctgtttagatattctgaaggagaaatggtcagccctttatgatgtgcggacaattctcttatccatacagtccctgctgggggaacccaatatcgacagtcccctgaatacgcacgcggccgagctatggaaaaaccctaccgctttcaaaaagtatcttcaagagacatattcaaaacaggtgaccagccaagagccttag

SEQ ID NO: 210647 - DNA, 114 bp, synthetic construct
  misc_feature 1..114: note = Description of Artificial Sequence: Synthetic coding sequence
  source 1..114: mol_type = other DNA
atggccgccagcgccgccgagacccgggtgttcctggaggtgcggggccagctgcagagcgccttactcatcctgggtgatcgggtctcaccctactgtccctgttggtcgtag

SEQ ID NO: 210648 - DNA, 1170 bp, synthetic construct
  misc_feature 1..1170: note = Description of Artificial Sequence: Synthetic coding sequence
  source 1..1170: mol_type = other DNA
atggccgccagcgccgccgagacccgggtgttcctggaggtgcggggacagctgcagtccgccttgctcatcttgggcgaacccaaagaaggaggtatgccaatgaatatcagcatcatgcctagctcccttcaaatgaaaacaccagaagggtgcacagagattcagcttccagctgaggtcaggctggtaccatcctcatgccgcgggctccagtttgtggttggcgacggactgcacctgagactgcagactcaggcgaagctggggactaaactgattagcatgttcaatcaaagctcacagacacaggaatgttgtaccttctattgtcaaagttgtggagaggttatcattaaagaccggaagttattgcgtgtccttcccttgccctcagagaactggggcgccctggtcggtgagtggtgttgtcaccctgacccattcgctaacaagtctctgcatccccaggaaaatgattgctttattggcgattctttctttttggtgaatttgcggacctcgctgtggcagcagcgacccgagctgagcccagtcgaaatgtgttgtgtgagttccgacaatcattgtaaactggagcccaaggcaaatactaaggtgatttgtaagcgttgtaaagtcatgctcggcgaaaccgttagcagtgagacaaccaaattctatatgacagaaataattatacaaagctccgagcggtcctttcccattatcccccggtcgtggtttgtccagtctgtgatcgcgcagtgccttgtgcagctgtcgtcagcccgctccaccttccgattcacaatccaagggcaagatgacaaagtgtatatactcttgtggttactgaatagcgattccttagtgattgaatcccttcgcaatagcaaatacattaagaaatttcccctcctcgagaacacctttaaggcagatagctcctccgcatggtccgctgtaaaagtcttataccagccatgtattaaatcacggaacgagaagttggtgagcctctgggagtcagacatctccgtgcaccctctcactctccccagcgctacgtgtctggagcttcttctgatactctctaagagcaatgcaaatctgccctctagtctgcgtcgggtgaacagctttcaggtcgctttccttaaaatgtag

SEQ ID NO: 210649 - DNA, 444 bp, synthetic construct
  misc_feature 1..444: note = Description of Artificial Sequence: Synthetic coding sequence
  source 1..444: mol_type = other DNA
atggccctgaagcggatccagaaggagctgagcgacctgcagcgggatccgcccgctcactgctccgcaggccctgtgggagacgatttatttcactggcaggctacaattatgggaccccccgattcagcatatcagggcggcgtcttttttttaacagtccacttcccgacagattacccattcaaaccacctaaaatagccttcaccaccaagatttatcatcccaacataaactcaaatggtagcatatgccttgacatcctcagaagtcagtggtcacctgccttgactgtcagcaaggtcctgttgtccatttgctccctcctctgtgaccccaaccctgatgaccctctggtgcctgatattgcacagatatacaagagcgacaaggagaaatacaaccggcacgcacgagaatggacccaaaagtatgccatgtag

SEQ ID NO: 210650 - DNA, 606 bp, synthetic construct
  misc_feature 1..606: note = Description of Artificial Sequence: Synthetic coding sequence
  source 1..606: mol_type = other DNA
atgagcaccgaggcccagcgggtggacgacagccccagcaccagcggcggatcaagcgacggggaccagagggaatctgtgcagcaggagcccgaacgcgaacaggttcagcccaaaaagaaagaagggaaaatttccagcaaaacggcggcaaagctatccacctcggccaagcggatccagaaagaattagctgagataaccctcgatccccccccgaattgcagcgcgggacccaaaggagataatatctacgagtggcgctctacaattctgggtccaccagggagtgtgtacgaaggtggcgtattttttctggatatcacttttagccccgactacccgttcaaacctccaaaagtcacttttcgcacacgcatctatcactgcaatattaactcccaaggcgtgatttgcttggacatactcaaggacaattggtcccccgctctcacaattagcaaagttctcctgagcatttgcagcctgctgactgactgtaatcctgccgacccccttgtgggaagcattgcgacccaatacatgaccaaccgcgccgaacacgaccgcatggccaggcagtggaccaaaagatatgccacttag

SEQ ID NO: 210651 - DNA, 606 bp, synthetic construct
  misc_feature 1..606: note = Description of Artificial Sequence: Synthetic coding sequence
  source 1..606: mol_type = other DNA
atgagcaccgaggcccagcgggtggacgacagccccagcaccagcggcgggagttctgatggagatcagagagaaagcgtgcagcaggaacccgagcgcgagcaggtgcagcctaagaaaaaggaaggaaaaataagttccaaaaccgcagcaaaactgagcacttcagcgaagcgtatacaaaaggaattggctgagatcaccctagatcccccccctaattgcagtgcaggtccgaagggagataacatttatgaatggagatctaccatcctcgggccccctggttctgtgtatgaaggcggagtcttctttctagatatcaccttcagccccgactacccctttaaaccgccgaaagtcaccttcaggacacgcatctatcattgcaacatcaactcgcaaggagtgatttgcttagatattctcaaggacaactggtcaccagcactaactattagcaaggtgttactgagcatttgctccctactcaccgattgcaacccagctgatccactagtgggttccatagcaacccagtatatgaccaacagggcagagcacgacaggatggcaagacagtggaccaagaggtatgcaacatag

SEQ ID NO: 210652 - DNA, 624 bp, synthetic construct
  misc_feature 1..624: note = Description of Artificial Sequence: Synthetic coding sequence
  source 1..624: mol_type = other DNA
atgagcagcgaccggcagcggagcgacgacgagagccccagcacctcatctggctcctccgatgccgatcaaagggatccggccgcaccggaaccagaggagcaggaagaacgcaaaccgtcggctacccagcagaagaagaataccaagttgagtagcaaaactacggccaagctgagcacatcagcaaaaagaatccagaaagaattagcagagattaccctggaccccccgcctaattgcagcgccgggcctaagggagataatatttatgaatggagaagcaccatcctgggccctcctggcagcgtttacgaggggggggtgttttttcttgatatcacgttttcgtcagactacccattcaagccaccaaaggtgactttccgtacccgcatctaccattgtaatattaatagccagggcgtgatttgcctggacattctgaaagataattggtccccagctctgacgataagcaaggtgttattgagcatctgctcattgctgacagactgtaaccccgcagaccctcttgtcggctctattgcgacacagtacctcactaacagggctgaacatgatcgcatcgccagacaatggactaagcgatatgcgacgtag

SEQ ID NO: 210653 - DNA, 624 bp, synthetic construct
  misc_feature 1..624: note = Description of Artificial Sequence: Synthetic coding sequence
  source 1..624: mol_type = other DNA
atgagcagcgaccggcagcggagcgacgacgagagccccagcaccagctcgggcagctccgatgcggaccagagggatccagccgcacctgaacctgaagaacaagaggagcgcaagccctcagcaactcagcagaagaagaacaccaaactttccagtaaaactaccgccaagctttcaacaagcgccaagcgcatccagaaggaactcgccgagatcacacttgatccaccaccaaattgcagcgccggtcctaaaggagataatatttatgagtggcggtccaccattctagggccccccggatccgtatatgagggcggcgtgttttttctcgatattaccttctcatcggattaccctttcaaacctcctaaagtcaccttcaggactcgaatctaccattgcaacatcaattctcagggggttatctgcctagatatcttaaaggacaactggagcccggcgttgacaattagcaaggtgctcctctccatctgctctttgctgacagattgtaatcccgccgacccgctcgttggaagtatcgccacgcagtacctgaccaatagagcagaacacgatcgaatagcccgacagtggactaagcgctatgccacgtag

SEQ ID NO: 210654 - DNA, 624 bp, synthetic construct
  misc_feature 1..624: note = Description of Artificial Sequence: Synthetic coding sequence
  source 1..624: mol_type = other DNA
atgagcagcgaccggcagcggagcgacgacgagagccccagcacctcctcaggaagtagtgacgcagatcagcgggatcccgctgcccccgaaccagaggagcaagaagagaggaagccgagtgctacacagcagaaaaaaaatacaaaactgtctagcaagacaaccgcaaagctttcgacctctgctaagagaatccagaaggaactggccgaaattacattggacccacccccaaattgcagtgcaggccctaaaggtgataacatctacgagtggcggagcaccattctgggccccccgggatccgtgtatgaaggaggggtttttttcctggacatcaccttctcatcggactacccctttaagccacccaaagtgacgttccgaaccaggatctaccactgtaacattaactcccagggggttatttgcctggatatactgaaggataactggtcgccagcactgaccatttccaaggtcctactcagcatatgctcgctgctgactgattgcaaccctgccgaccccctcgtgggcagtatagctactcagtacctaacaaacagagctgaacacgacaggattgcaagacagtggactaaacggtacgctacttag

SEQ ID NO: 210655 - DNA, 624 bp, synthetic construct
  misc_feature 1..624: note = Description of Artificial Sequence: Synthetic coding sequence
  source 1..624: mol_type = other DNA
atgagcagcgaccggcagcggagcgacgacgagagccccagcaccagttcaggcagttccgatgccgaccagcgagatccagcagctcccgagcctgaggaacaagaggagcgaaaaccaagcgccacacagcaaaagaaaaataccaaactctcctccaaaaccacggcaaagctctcaacttcagccaagaggattcaaaaagaactggctgagatcaccctggacccaccacctaattgttcagcaggccctaaaggcgataacatttacgaatggagaagcaccattctcggtcctccaggctctgtttatgagggaggcgtcttcttcctggatatcaccttcagttccgactatccatttaaaccccctaaggtgacatttaggaccagaatttaccattgcaacattaattcccagggagtcatctgtttggacatactgaaagacaattggtctccagctctcactatcagtaaagtgctcttgtctatctgctcattgctcacagactgcaatccagccgacccgctcgtcggttctatagcaactcaatacttaactaatcgagcagaacacgatagaatagcccgccaatggactaaacgctatgcaacatag

SEQ ID NO: 210656 - DNA, 528 bp, synthetic construct
  misc_feature 1..528: note = Description of Artificial Sequence: Synthetic coding sequence
  source 1..528: mol_type = other DNA
atgagcagcgaccggcagcggagcgacgacgagagccccagcacctctagcggctctagcgatgccgaccagagggacccggcagcacctgaacccgaggagcaggaggagaggaagcccagcgcgacccagcagaagaaaaatactaagctgtcctctaaaaccactgctaagcttagtacttccgcaaagagaattcaaaaggagctggctgagataactttagacccccccccaaattgcagcgctgggccaaagggggataatatttacgaatggaggagtaccattctgggaccacctggcagcgtctacgaaggcggcgtgttcttcctggatatcacattcagctctgattacccctttaagccacctaaagttaccttcaggacccgcatatatcactgcaatattaatagccagggggtaatatgtcttgacatcctaaaggataattggtcacccgctctgacgatcagtaaggtgctgctctcaatctgttctctgctgacagactgcaatccctag

SEQ ID NO: 210657 - DNA, 528 bp, synthetic construct
  misc_feature 1..528: note = Description of Artificial Sequence: Synthetic coding sequence
  source 1..528: mol_type = other DNA
atgagcagcgaccggcagcggagcgacgacgagagccccagcacctcctcgggaagttctgacgctgatcagcgggacccagcagctccagagccagaggaacaggaagaacggaagccaagtgctacccagcaaaagaagaatacaaagttgagctccaagaccaccgcaaagctgtcgacctctgctaaacgcattcaaaaggagctggctgagatcaccctggaccctccacctaattgtagcgctgggcctaagggggataacatctacgaatggcgctctaccattctgggaccgccaggaagtgtctacgagggaggagtatttttcctcgacatcactttttcttccgactatcctttcaaaccccccaaagtgaccttcagaacgcggatttaccattgcaatatcaatagtcagggcgtcatttgtctcgacatccttaaggacaattggtctccagctctcaccatttcgaaagtgctgctgagcatctgttccctgcttacagattgcaatccttag

SEQ ID NO: 210658 - DNA, 528 bp, synthetic construct
  misc_feature 1..528: note = Description of Artificial Sequence: Synthetic coding sequence
  source 1..528: mol_type = other DNA
atgagcagcgaccggcagcggagcgacgacgagagccccagcaccagcagtggctcaagcgacgcagaccaacgggacccggctgcacccgagcccgaggaacaggaggagcggaaacctagcgccacccaacaaaaaaagaatactaaactgagtagcaaaacaaccgccaaactgagcacctcagcaaaacgtatccaaaaagaactcgcagaaataactcttgacccccctcctaactgttccgccggtccaaagggtgataatatctacgagtggcgttctactatcttaggacctccgggctcagtgtatgagggaggtgtatttttcctggatatcacattctcgtctgactacccctttaaacctcccaaggtgacttttcggaccaggatctaccattgtaacattaactcacaaggcgttatctgcttagacattttgaaggacaattggtcacctgccctgactatttccaaggtgttgttatctatctgttcgctgctaactgattgcaacccgtag

SEQ ID NO: 210659 - DNA, 414 bp, synthetic construct
  misc_feature 1..414: note = Description of Artificial Sequence: Synthetic coding sequence
  source 1..414: mol_type = other DNA
atgaacgaggagaacttcttcgagtgggaggccctgatcatgggccctgaggacacatgcttcgagttcggggttttccccgctatcttatctttcccactggactatccgcttagtccacccaagatgcgcttcacctgtgagatgtttcacccaaacatttaccccgacgggagggtctgtatctctattctacacgccccaggagatgaccctatgggctacgaaagctccgccgagcggtggagccctgttcaaagcgtcgaaaagatccttctgtccgtcgtctctatgctcgcagaacccaatgacgagtcaggggcaaacgttgatgcctccaaaatgtggagagacgatagggaacagttttacaaaatcgcaaagcagatcgtgcagaagagcttaggcctttag

SEQ ID NO: 210660 - DNA, 498 bp, synthetic construct
  misc_feature 1..498: note = Description of Artificial Sequence: Synthetic coding sequence
  source 1..498: mol_type = other DNA
atggccggcaccgccctgaagcggctgatggccgagtacaagcagttaactctcaatccccccgaaggaatagtggccggaccaatgaatgaggaaaatttctttgaatgggaggcactgatcatgggcccagaagacacttgtttcgagttcggggtatttcctgctatcttgtcatttcccctggactatccgctgtcccctccgaagatgaggttcacctgcgagatgtttcaccccaacatctaccccgacggtagagtgtgtattagtattctgcatgcccccggcgatgaccccatgggatacgaatctagcgccgaacgctggagtcccgttcagtccgtggagaagatcctcctgtctgtcgtttccatgctggccgagccaaatgatgaatctggtgctaatgtcgatgcttctaagatgtggcgagatgatagggagcagttttacaagatcgcgaagcagatagtgcagaaaagcctcggattgtag

SEQ ID NO: 210661 - DNA, 552 bp, synthetic construct
  misc_feature 1..552: note = Description of Artificial Sequence: Synthetic coding sequence
  source 1..552: mol_type = other DNA
atgagcagccccagccccggcaagcggcggatggacaccgacgtggtgaagctaatcgagtctaagcatgaggtcaccattcttggagggctgaacgagtttgtggtgaaattctatggccctcaaggaacgccttacgagggaggtgtgtggaaagtcagggtggatcttcccgataagtatcccttcaagtcgccttctatagggttcatgaataaaatcttccatcccaatattgacgaagccagcggtaccgtctgtctggatgttataaaccagacatggaccgcactctacgaccttacaaatattttcgagagttttctcccacaacttctggcctatccaaatccaattgatccgttgaacggcgacgccgccgcaatgtacttgcaccgcccggaggaatacaagcaaaagatcaaagaatacatccagaaatacgccaccgaagaagccttgaaggagcaggaggagggtactggcgactcaagcagtgaatcatccatgagtgatttctccgaagacgaagctcaggacatggaactctag

SEQ ID NO: 210662 - DNA, 459 bp, synthetic construct
  misc_feature 1..459: note = Description of Artificial Sequence: Synthetic coding sequence
  source 1..459: mol_type = other DNA
atgagcagccccagccccggcaagcggcggatggacaccgacgtggtgaaactcattgagtctaagcacgaagtcaccatcctcggtggtttgaatgagtttgtcgtaaaattttatggaccgcagggtactccttacgaaggcggagtgtggaaggtaagagtggacctcccggataaatatccctttaaatctccctccattgacctaaccaatatctttgagtccttcctgccgcagctactggcttacccaaatccaatcgatccgctcaatggtgatgccgccgctatgtacctacaccggcccgaggagtacaagcagaaaataaaggagtacattcaaaagtatgctacagaggaagccctcaaggaacaggaagagggcacaggggactcctcgtctgagtctagcatgagtgactttagtgaagatgaggcccaggacatggagctgtag

SEQ ID NO: 210663 - DNA, 477 bp, synthetic construct
  misc_feature 1..477: note = Description of Artificial Sequence: Synthetic coding sequence
  source 1..477: mol_type = other DNA
atgagcggcatcgccctgagccggctggcccaggagcggaaggcctggcgcaaagatcaccctttcggattcgttgccgtgccgacgaaaaatccggacgggacaatgaacctcatgaattgggaatgtgcgatacccggcaagaaaggcacgccctgggagggtgggttgtttaaactgcgaatgctgtttaaagatgattacccctcctctccaccaaaatgcaagttcgaaccccccctgtttcatcccaatgtgtacccatctggcacggtgtgtttgtctatcctggaggaagacaaagattggcggcccgccattacgattaagcagatattgctaggcatccaagagctgctcaacgagcctaatattcaggacccagcccaagctgaggcttacactatatattgtcagaaccgggtggagtacgaaaaacgggtgcgagcccaggctaaaaaattcgcccctagctag

SEQ ID NO: 210664 - DNA, 477 bp, synthetic construct
  misc_feature 1..477: note = Description of Artificial Sequence: Synthetic coding sequence
  source 1..477: mol_type = other DNA
atgagcggcatcgccctgagccggctggcccaggagcggaaggcctggaggaaggaccacccatttggcttcgttgctgttcccaccaaaaatcccgatggcacaatgaacctcatgaactgggagtgcgcaatcccagggaagaagggcacaccatgggagggaggcctgttcaaactaagaatgctgttcaaggatgactacccaagcagtccgccaaagtgcaagttcgaaccgcccttatttcatccaaacgtctacccctctggcaccgtatgtcttagtattttggaggaggacaaggattggagacccgctatcactataaaacagattctgctcgggatccaagaactgttaaatgagccaaacattcaggacccagctcaggcagaagcttatacaatttattgccaaaacagagtggagtatgaaaaacgcgtgcgtgcccaggctaagaaatttgcacctagttag

SEQ ID NO: 210665 - DNA, 477 bp, synthetic construct
  misc_feature 1..477: note = Description of Artificial Sequence: Synthetic coding sequence
  source 1..477: mol_type = other DNA
atgagcggcatcgccctgagccggctggcccaggagcggaaggcctggcgtaaggatcatcccttcggcttcgtggccgtgccaactaaaaacccagatggcactatgaacctgatgaactgggaatgcgcaatcccagggaagaaaggtacgccttgggagggagggctttttaagttaaggatgctgtttaaggatgattatccctcatccccaccaaagtgcaagttcgagcctccattgtttcacccaaacgtgtatccgagtggcacggtgtgcctttcgattcttgaggaggacaaagattggcgacccgcaataactattaagcagatactcttagggatacaagaacttctgaacgaacccaatatacaggaccccgcacaggccgaggcgtatacgatctattgtcagaatcgcgtcgagtacgagaagagagtgcgcgcccaggcgaaaaaatttgcaccatcttag

SEQ ID NO: 210666 - DNA, 477 bp, synthetic construct
  misc_feature 1..477: note = Description of Artificial Sequence: Synthetic coding sequence
  source 1..477: mol_type = other DNA
atgagcggcatcgccctgagccggctggcccaggagcggaaggcctggcggaaggaccatcctttcggctttgtggccgtccctacaaagaatccggacggcacaatgaatctgatgaactgggagtgcgctatccccggcaaaaaaggaacaccatgggaagggggcctgttcaagctcaggatgctatttaaagatgactatccatcgagtccgcctaagtgtaaatttgaaccgccattgtttcaccctaacgtgtacccaagtggaacagtttgcctctccattctcgaagaggacaaagactggcgcccagccattaccataaagcagatactcctgggaatccaggagcttttaaatgagcctaacatacaagatcccgctcaggcggaggcctacacaatatactgccagaacagagtggagtacgagaagagagtccgagctcaggcaaagaagtttgcgcctagttag

SEQ ID NO: 210667 - DNA, 477 bp, synthetic construct
  misc_feature 1..477: note = Description of Artificial Sequence: Synthetic coding sequence
  source 1..477: mol_type = other DNA
atgagcggcatcgccctgagccggctggcccaggagcggaaggcctggaggaaggaccacccctttgggttcgtcgctgtcccgactaaaaacccagatggaactatgaatctaatgaattgggaatgcgctatccccggcaaaaaagggacgccatgggagggagggctgtttaagctgaggatgctcttcaaggacgattacccatcgtcccctcccaagtgcaagttcgagccccccctgtttcaccccaacgtttatccatctggtacggtgtgtctgtcaatcctggaggaggacaaagattggcgccctgcaataactattaaacaaattctattgggtatccaggagctcctgaatgagcccaatatccaagatccagctcaggccgaagcctacaccatctactgccagaaccgtgttgagtatgaaaagcgggtgcgggcgcaagccaagaaattcgcacccagttag

SEQ ID NO: 210668 - DNA, 477 bp, synthetic construct
  misc_feature 1..477: note = Description of Artificial Sequence: Synthetic coding sequence
  source 1..477: mol_type = other DNA
atgagcggcatcgccctgagccggctggcccaggagcggaaggcctggcgcaaggaccacccatttggctttgtggcagtgcccacgaaaaaccccgatgggacaatgaaccttatgaactgggagtgcgccatccctggcaagaaaggaacaccctgggaggggggactatttaaacttaggatgctgtttaaagacgactatccatcctcaccacccaaatgcaaatttgaaccccccctttttcaccctaatgtatacccaagtgggacggtctgcctgtccattcttgaagaagataaagactggcggcccgctattacaattaaacaaatcttgttggggattcaggaattactgaatgaacctaatatccaggatccagcacaggccgaggcgtacactatttactgtcagaaccgagtcgaatatgagaagcgcgtgagggcacaggcaaagaagttcgcaccatcatag

SEQ ID NO: 210669 - DNA, 465 bp, synthetic construct
  misc_feature 1..465: note = Description of Artificial Sequence: Synthetic coding sequence
  source 1..465: mol_type = other DNA
atggccgccagccggcggctgatgaaggagctggaggagatccggaaatgcgggatgaagaattttaggaacatccaagtagacgaggccaacctcttgacctggcaaggattgatagtacccgataatcccccttacgataaaggggcttttaggatagaaatcaactttcccgccgagtatccttttaagccacctaagatcactttcaagaccaaaatctaccatcccaatatcgatgagaaaggtcaggtatgtctgcccgtgatttctgccgaaaattggaaaccagccaccaagacagaccaggtaattcagagcctcatcgccttggttaacgacccccagccagagcaccccctaagggcggacctcgccgaggagtattccaaggatcgaaagaagttttgcaagaatgcggaagagtttacaaagaaatatggagagaagagaccagttgattag

SEQ ID NO: 210670 - DNA, 639 bp, synthetic construct
  misc_feature 1..639: note = Description of Artificial Sequence: Synthetic coding sequence
  source 1..639: mol_type = other DNA
atgcaggtggccgccggcacccggggcgacacccggctgcaggaggttgctctccttccacaactgttcgatctcctggttctcggccaacggagggccaggctgttaagacaggttccctcagccctggccggcaaggacctggctcagttacaagctggtgcaaccctcgccggctacaggcgcgcgcacggcccggaagaactggaagagataagaaaatgcggcatgaagaattttcgaaatatccaggtcgatgaggccaacctccttacttggcagggcctcatcgtccctgataatcccccatatgataaaggggcctttcgaattgagattaacttccccgccgaatatccgtttaaacctccgaagatcactttcaaaacgaagatttaccacccaaatattgacgagaagggccaggtgtgccttccagtcattagcgccgagaattggaagccagctacgaagactgaccaggtgatccagtcccttatcgctctggtaaacgatccccagcccgaacatccgctgcgcgccgacctcgccgaggaatactcaaaggatcgcaagaaattctgtaaaaacgccgaggagttcaccaagaagtatggcgaaaagcgcccagtggattag

SEQ ID NO: 210671 - DNA, 369 bp, synthetic construct
  misc_feature 1..369: note = Description of Artificial Sequence: Synthetic coding sequence
  source 1..369: mol_type = other DNA
atggccgccagccggcggctgatgaaggacaaccccccctacgacaagggggcctttcgtattgaaatcaacttccctgcggaataccctttcaaacctccgaaaatcactttcaaaactaagatttaccacccgaatatcgacgagaaggggcaggtttgtttgcccgtaatatccgccgaaaattggaagccagccacaaaaacagaccaagttatacagtcgttgatcgcacttgtgaatgatccccagccggaacaccctctaagggctgatttggcagaggagtacagcaaggatagaaagaaattctgcaagaatgccgaggagttcaccaagaagtatggagaaaagaggccagtcgattag

SEQ ID NO: 210672 - DNA, 462 bp, synthetic construct
  misc_feature 1..462: note = Description of Artificial Sequence: Synthetic coding sequence
  source 1..462: mol_type = other DNA
atgatggccagcatgcgggtggtgaaggagctggaggacctgcagaaaaaaccgccaccctatctgagaaacctgagctccgacgatgcgaacgtgttggtatggcatgccctactgctacctgatcagcccccctatcatctgaaggctttcaatctgagaatttcattcccacccgaatatccctttaagccccccatgattaaattcactaccaaaatctaccatccaaacgtagatgagaacggtcagatctgtcttcctatcataagcagtgagaactggaagccctgtaccaaaacatgccaggtgcttgaagcccttaacgtactggtaaacagaccaaatattagggaaccactgaggatggacctcgctgacctcctgacccagaaccccgaactcttccgaaaaaacgctgaggagttcaccttacggttcggtgtggatcgccccagttag

SEQ ID NO: 210673 - DNA, 264 bp, synthetic construct
  misc_feature 1..264: note = Description of Artificial Sequence: Synthetic coding sequence
  source 1..264: mol_type = other DNA
atgatcaagttcaccaccaagatctaccaccccaacgtggacgagaatgggcagatttgtttgccgatcatctcatctgagaattggaagccctgtacgaagacttgccaggtactcgaggcactgaatgtcctcgtcaacaggcccaacattcgcgaaccgctcagaatggatcttgccgacctgctgacccagaaccccgagttgttccggaagaatgccgaagagttcacactgcggtttggagtcgacagaccttcatag

SEQ ID NO: 210674 - DNA, 198 bp, synthetic construct
  misc_feature 1..198: note = Description of Artificial Sequence: Synthetic coding sequence
  source 1..198: mol_type = other DNA
atgatcaagttcaccaccaagatctaccaccccaacgtggacgagaatgggcaaatctgtctgcctattattagctccgaaaactggaagccatgcaccaagacatgtcaagtgctagaagctctgaatgtgctcgttaaccgcccaaacatcagagagccactgagaatggacctcgccgacttgttaactcagtag

SEQ ID NO: 210675 - DNA, 1128 bp, synthetic construct
  misc_feature 1..1128: note = Description of Artificial Sequence: Synthetic coding sequence
  source 1..1128: mol_type = other DNA
atgagcgtgagcggcctgaaggccgagctgaagttcctggccagcatcttcgacaagaaccacgagagattcaggattgtgtcttggaaactggacgagttgcattgccagtttctggtgcctcagcagggatcgcctcattctctcccacctcccctcaccctacattgtaatattactgaatcttaccctagttcttctccaatctggtttgtggactcagaggatcccaatctgacatcggtgttggagcgtcttgaggataccaagaacaataatctcctgcggcagcagcttaaatggctgatctgcgaactgtgcagtttatataatttgcccaagcacttggacgtggagatgctggatcaacccctccctacgggacaaaacggcaccacagaagaggtgacatccgaggaggaggaggaagaagaggagatggcagaggatattgaggacttggatcactatgagatgaaagaggaagagccgatctccggtaaaaagtcagaagacgaggggatagagaaagagaacctggcgattcttgaaaaaatcaggaagacccaaaggcaggaccatctgaatggtgccgtgtctggctccgtccaagcgtcagataggcttatgaaggagctgagagatatttacaggtcccagagttacaagaccggcatttatagcgtcgagttaatcaacgactcattgtacgactggcatgtgaaattgcagaaagtggatccagacagcccactccatagtgatctccagatcttgaaggaaaaagaaggtatagagtatattctattaaacttttctttcaaggataattttccatttgacccccccttcgtgcgagttgtcctgccagttctgagcggcggctatgttctgggcggcggagccctttgcatggagctgttaaccaaacagggctggagctcagcgtacagcatagaatctgtgatcatgcagattaatgctacccttgttaaaggtaaggctagggtgcagtttggcgccaataaaaatcagtataatcttgcacgggctcagcagtcctacaactctattgtacagattcacgaaaagaatggctggtacacacccccaaaagaagatgggtag

SEQ ID NO: 210676 - DNA, 945 bp, synthetic construct
  misc_feature 1..945: note = Description of Artificial Sequence: Synthetic coding sequence
  source 1..945: mol_type = other DNA
atgagcgtgagcggcctgaaggccgagctgaagttcctggccagcatttttgacaagaatcatgaacgattccggatcgtatcctggaaactggacgagttgcattgccaatttctggtgccccagcagggcagcccgcactccctcccgccccccctgacactgcactgcaatattacagaaagttacccctcatcttcacccatctggttcgtggattccgaggacccaaatttaacctcagttctcgaacgtcttgaggacaccaaaaataataatctgctgaggcagcagctcaagtggttgatctgcgagctttgctccctttacaatctgcccaaacacctggatgtcgaaatgctggatcagccactacccactggccagaatggaacgactgaggaagtgacttccgaggaagaagaagaggaggaagaaatggccgaggatattgaggacctggaccactatgaaatgaaagaggaggaacctatctcagggaaaaagtccgaagacgagggcattgaaaaggaaaacctggccatactggaaaaaatccggaagactcagagacaggaccaccttaacggtgcggtcagtgggtctgtccaggcctccgatcgactgatgaaggagctgcgggatatctaccgatcacaaagctacaagacggggatttattccgtggagcttatcaatgattccctttacgattggcacgtaaaattacagaaggtggatccagacagcccactccacagtgatctccaaatactgaaagagaaagagggcattgagtacattctgctaaatttcagcttcaaagataatttccccttcgacccacccttcgtgcgagtggttctcccagttctgtcaggaggcctggtacacccttcaaaaggccgctggcttaatgtcttgactgtagtgtgcttggactag

SEQ ID NO: 210677 - DNA, 1080 bp, synthetic construct
  misc_feature 1..1080: note = Description of Artificial Sequence: Synthetic coding sequence
  source 1..1080: mol_type = other DNA
atgcggatggacagcctgaccgaggagaagctggagtgccggctgtggtgttgcttgagcgatccctctccacctggtctggctgcaagatgctgtgtgctggagagatcaattgtcccatccctgcgacaggagtcgtatccatcttctagtcccatatggtttgtggactctgaagaccccaacctcacgtctgttctggagcgccttgaagatacaaagaataacaacttacttaggcagcagctgaagtggcttatctgcgaattgtgcagcctgtataaccttccgaaacatctggacgtagagatgctggaccaacctctgcccacaggtcagaacggcacaactgaggaggtcacctccgaggaagaagaggaggaagaagaaatggctgaagacatagaggacctggatcactacgagatgaaggaggaagaaccgataagcgggaaaaaatcagaagatgagggaatcgaaaaggaaaacctggctatactggagaagatccgcaagacacagagacaggaccacttgaatggggcggtaagtggaagcgtgcaggcttccgaccgactcatgaaagagcttcgggatatctaccggagtcaaagctacaagactggcatctattccgtggagttaatcaacgacagcttatacgactggcatgtaaagttacagaaagtcgatccagatagccctctgcacagcgatcttcagatcttaaaggagaaagaaggtatcgagtacattttgttgaacttcagctttaaggataattttcctttcgatccgcccttcgttcgggtcgtgctgcccgtcctttcaggtggatacgtacttgggggaggcgccctgtgtatggagctgctgaccaagcaagggtggtctagtgcttatagcatagagagcgtaattatgcagattaacgccaccctggttaaaggtaaggcaagagtccagttcggggccaataagaaccagtacaatctcgcgcgggcgcaacagtcctacaacagcatcgtccagatccacgaaaagaatggatggtacacacccccaaaagaagacggctag

SEQ ID NO: 210678 - DNA, 1080 bp, synthetic construct
  misc_feature 1..1080: note = Description of Artificial Sequence: Synthetic coding sequence
  source 1..1080: mol_type = other DNA
atgcggatggacagcctgaccgaggagaagctggagtgccggctgtggtgctgccttagcgacccctcaccacccgggttagccgctaggtgttgtgtgttggaaagatcaatcgtgccgtctctgcgacaagagtcttatccatcttccagcccgatttggttcgtggatagcgaagatcccaacctgaccagcgtcctcgagaggctggaggacaccaagaataataatctgctgcgccaacagctcaaatggctgatttgtgagctctgcagtctgtacaacctgccgaagcatctggatgttgagatgttggatcaaccccttcccaccgggcaaaacggcacaactgaggaggtgacgtccgaggaggaggaggaggaagaggaaatggcagaagatatagaggacctcgaccattacgaaatgaaagaagaggagcccatcagtggtaagaagtcagaagatgaagggatcgagaaggaaaaccttgccatcctggagaagatccgcaagacacagaggcaggatcatcttaacggtgcagtgagcgggagcgtacaagcctcggacagacttatgaaggagctgcgagacatctacagatcccagtcttacaagaccggtatatatagcgtggagcttatcaacgactctctatacgactggcatgttaaactgcagaaagtagatccggactctccactccactcagatctgcagatcctgaaggagaaggagggcatagagtatatcttgctgaacttctcatttaaagacaactttccctttgatccacctttcgtacgggtggtcctgcctgtgctgtcagggggctatgttctcggtggcggcgcactgtgcatggagttgcttacgaaacaggggtggagttccgcttattccattgaatcagtcattatgcaaatcaacgcaacacttgtaaaaggaaaagctagagtccagttcggagccaataagaatcagtataacctggccagagcccagcaatcttacaatagtatcgtgcagattcacgagaaaaatgggtggtacaccccgcctaaagaggatgggtag

SEQ ID NO: 210679 - DNA, 717 bp, synthetic construct
  misc_feature 1..717: note = Description of Artificial Sequence: Synthetic coding sequence
  source 1..717: mol_type = other DNA
atggcccagcagcagatgaccagcagccagaaggccctgatgctggagcttaagagtttgcaagaagaacctgtcgaggggttcagaatcacattagttgatgagtcagatctctacaactgggaggttgccatcttcggccctcccaacaccctttatgaaggaggctacttcaaggcccatatcaaatttcccatcgactacccctactctccccctacctttagattcttaaccaaaatgtggcaccccaatatatatgagaatggagacgtttgtatctctattctccatccaccagtggatgacccacagagtggtgagctaccgagcgaacgatggaatccaacccagaacgtgcgcaccatccttctgagcgtcatctcccttttgaatgagcctaacacgttcagtccagcgaacgttgatgcttcggttatgttcaggaaatggcgcgacagcaagggtaaggataaggaatacgccgaaatcatacgcaaacaggttagcgcaaccaaggccgaggccgaaaaggacggcgtgaaagtgccgaccactctagcagagtactgtatcaaaaccaaggtgccgtccaacgacaactcatcagacctgctgtacgatgacttgtatgatgacgatattgatgatgaagacgaagaagaagaggatgcggattgctatgatgatgatgattcaggcaacgaggaaagctag

SEQ ID NO: 210680 - DNA, 669 bp, synthetic construct
  misc_feature 1..669: note = Description of Artificial Sequence: Synthetic coding sequence
  source 1..669: mol_type = other DNA
atgaacagcaacgtggagaacctgcccccccacatcatccggctggtctataaggaggtcactacactgaccgcggaccccccagacggcatcaaagtatttcctaacgaggaagatttaaccgatttacaggttaccatcgaaggacccgaaggcacaccttacgcgggaggtcttttcaggatgaagcttctgctcggcaaggactttcctgcatccccccctaagggctattttctaacgaaaatattccatccaaatgtgggggccaatggtgaaatatgcgtgaatgttctgaaacgggactggacagctgagttgggaattcgccacgtactgctgacaattaagtgtctgctcattcaccctaaccctgagtccgctttgaacgaagaagccggtcgactcttgctggaaaactatgaggagtacgccgccagagctcgcctgctgaccgaaatccatggcggtgccggcggaccttccggccgagccgaagccggtagggcactcgcatccggcactgaagccagctctacggatccaggcgccccaggcggacccggtggcgctgaaggcccaatggctaaaaaacacgcaggggaacgtgacaagaagctggctgcaaaaaagaagacagataaaaagcgggccctgcgtagactgtag

SEQ ID NO: 210681 - DNA, 594 bp, synthetic construct
  misc_feature 1..594: note = Description of Artificial Sequence: Synthetic coding sequence
  source 1..594: mol_type = other DNA
atgcagcgggccagccggctgaagcgggagctgcacatgctggccacagaacctccaccaggcattacctgttggcaggacaaagaccaaatggatgatctgcgggcccagattcttggcggagccaataccccgtacgaaaaaggtgtgtttaagttggaggtgatcatcccagaaaggtacccatttgagcctcctcagatacggttcctgacacctatttaccaccctaatatcgactctgccggtcgcatttgtttagacgtcctgaaactcccaccaaaaggagcttggcggccttctctgaacatcgccacagtactgacctccattcagttgctgatgtcagaaccgaatccagatgatcctcttatggccgacattagctccgagttcaagtacaacaaacctgcctttctgaagaatgccagacagtggacggagaagcacgcccgccaaaaacaaaaggcagacgaggaagaaatgctggacaacctgcctgaagcaggcgacagtcgggttcacaatagtacacaaaagcgaaaggcctcccaactggtcggaattgagaagaaattccatccggacgtgtag

SEQ ID NO: 210682 - DNA, 489 bp, synthetic construct
  misc_feature 1..489: note = Description of Artificial Sequence: Synthetic coding sequence
  source 1..489: mol_type = other DNA
atggccagcatgcagaccaccggccggcgggtggaggtgtggttccctaagaggcttcaaaaggaacttttggctctacaaaacgaccctcctccaggcatgaccctcaacgaaaaaagcgtacagaactcaatcacgcagtggatagtagacatggagggggcacccggcactctgtatgagggggagaagtttcagctgctctttaagtttagtagcagatatccctttgacagtcctcaagtgatgttcacaggcgagaacatccccgtacatccacatgtgtacagcaatgggcacatatgtctgagcattctcaccgaggactggtcaccagccttgtctgtccagagcgtttgcctcagcatcatcagcatgttgagctcttgtaaggagaagcggcggccccccgataatagcttctacgtgaggacctgtaataaaaacccaaagaagacgaaatggtggtatcatgatgatacttgttag

SEQ ID NO: 210683 - DNA, 480 bp, synthetic construct
  misc_feature 1..480: note = Description of Artificial Sequence: Synthetic coding sequence
  source 1..480: mol_type = other DNA
atggccagcatgcagaagcggctgcagaaggagctgctggccctgcaaaacgacccccctcctggtatgactctgaatgaaaagtctgtccaaaacagtattacccaatggattgtcgatatggaaggcgcccccggcaccctctacgaaggagagaagttccagttactattcaagtttagctcacgatacccctttgatagtccccaggtgatgtttactggggaaaacatcccagtccatccccacgtgtatagcaatggtcatatttgtctttctattttgacggaagattggtctccggctttatctgtgcagtccgtgtgtctgtcaataatcagcatgctgtcgagctgcaaggagaaacggaggccgcctgacaattccttctacgtgcgcacttgtaataagaaccctaagaagacaaagtggtggtatcacgagttgaagagtgcctttatcctctcaattacagactag

SEQ ID NO: 210684 - DNA, 456 bp, synthetic construct
  misc_feature 1..456: note = Description of Artificial Sequence: Synthetic coding sequence
  source 1..456: mol_type = other DNA
atggccagcatgcagaagcggctgcagaaggagctgctggccctgcaaaatgacccacctccagggatgactctcaacgagaagagtgtccagaacagcattactcagtggatagtggatatggaaggcgcccctgggacgctgtatgagggggaaaagtttcaacttctgttcaagttttcctcgcgatatccattcgatagccctcaggtgatgttcaccggggaaaacattccagtccaccctcacgtctattcaaatggccatatatgcctttctatccttactgaggattggtctcccgcactgagcgtccaatccgtctgtttgagtattatcagtatgctgagcagctgcaaggagaagaggaggcctccggataactcattctacgtccgtacctgcaacaaaaaccccaagaagaccaaatggtggtaccatgatgatacctgctag

SEQ ID NO: 210685 - DNA, 354 bp, synthetic construct
  misc_feature 1..354: note = Description of Artificial Sequence: Synthetic coding sequence
  source 1..354: mol_type = other DNA
atgagcagcaacgtgcccgccgacatgatcaacctgcggctgatcttggtaagcggcaagaccaaggagttcctgttcagcccaaatgacagcgctagcgacatagctaagcatgtgtacgacaactggcctatggactgggaagaagagcaagtatccagcccaaacattctgaggcttatctaccagggtagattcctgcacggcaacgtgacactgggagcgcttaaattgcccttcggcaaaacgacagttatgcatttggttgctcgggagacgttacccgagccaaacagtcagggccagcgtaatagggagaagacaggagagagtaattgttgcgtgattctctag

SEQ ID NO: 210686 - DNA, 474 bp, synthetic construct
  misc_feature 1..474: note = Description of Artificial Sequence: Synthetic coding sequence
  source 1..474: mol_type = other DNA
atgcagctgaccgtgaaggccctgcagggccgggagtgcagcctgcaggtaccagaagatgaacttgtctctactctgaagcaattggtgagcgaaaagctgaatgttcccgttcgccagcagagacttttgttcaagggcaaagccttagccgacggcaaacgcctgtctgactactctatcggcccaaattcaaagctgaacctggtcgtcaagcccctggagaaggtgctgctagaagagggcgaggctcagcgcttggcagattcccctccgcctcaggtttggcagttaatttccaaagtcctggctaggcacttcagcgctgcagacgcgagtcgtgtcctcgagcagctccaaagagactatgagcggtcgctgtcgagactgaccttagacgatatcgaacggctggctagtagattcctgcatcccgaggtaaccgagacaatggagaaggggttttcaaagtag

SEQ ID NO: 210687 - DNA, 525 bp, synthetic construct
  misc_feature 1..525: note = Description of Artificial Sequence: Synthetic coding sequence
  source 1..525: mol_type = other DNA
atgttcctgaccgtgaagctgctgctgggccagcggtgcagcctgaaggtgtccggccaggagagtgtcgctacccttaagcgcctggtaagtcggcgcttgaaggtgccagaggagcagcaacatctgttgttccgaggccagctgctggaagacgacaagcatctaagcgattattgcattggcccaaatgcaagcatcaatgtcattatgcagcctcttgagaaaatggccctcaaagaagcacatcagcctcagacacaacccctttggcaccagctcggcttagtgctggccaaacattttgagcctcaagatgccaaggccgtgctgcagctgctgaggcaagaacacgaggaacgtcttcagaagatttccctggagcacttggagcagctggctcagtacctgctcgcagaggaacctcacgttgagcctgccggcgagagagaactggaagcgaaggctaggccacagagcagctgcgatatggaagagaaagaggaggcggccgccgaccagtag

SEQ ID NO: 210688 - DNA, 222 bp, synthetic construct
  misc_feature 1..222: note = Description of Artificial Sequence: Synthetic coding sequence
  source 1..222: mol_type = other DNA
atgatcgaggtggtgtgcaacgaccggctgggcaagaaggtgcgggtgaaatgtaatacagacgacacaatcggcgatctgaagaaattaatcgccgcacagaccggcactagatggaataagatcgtgctgaagaaatggtacactatttttaaggatcacgtctcactgggtgactacgagatccacgatgggatgaatctggaactatactaccagtag

SEQ ID NO: 210689 - DNA, 222 bp, synthetic construct
  misc_feature 1..222: note = Description of Artificial Sequence: Synthetic coding sequence
  source 1..222: mol_type = other DNA
atgatcgaggtggtgtgcaacgaccggctgggcaagaaggtgcgggtgaagtgtaataccgacgacaccatcggtgacctgaagaagctgattgctgcccagaccggcacacggtggaataaaattgttctgaaaaaatggtatactatttttaaggatcacgtgagtctcggcgattatgagatccacgacggtatgaatctggagttgtactaccaatag

SEQ ID NO: 210690 - DNA, 1143 bp, synthetic construct
  misc_feature 1..1143: note = Description of Artificial Sequence: Synthetic coding sequence
  source 1..1143: mol_type = other DNA
atgagcctgagcgactggcacctggccgtgaagctggccgaccagccgctgacaccgaaatccatattacgcctccctgagaccgaactcggtgagtattctttgggcggctatagtatctccttccttaagcagctcatagctggtaaactgcaggagagcgtcccagaccccgaactcatcgacctgatttattgcggtagaaaacttaaggacgaccaaacccttgacttctatggaatccagccaggttcgacagttcacgtcctccgcaagagttggcctgagcccgaccaaaagcctgagcccgttgataaagttgctgcgatgagagagttccgagttctgcacactgctcttcatagctcctcttcttatcgggaggcagttttcaagatgttatccaacaaagagagcctggatcaaatcattgttgccacacccggtttgtccagtgacccaatcgcacttggcgtgctgcaggataaagatctgttctccgtgttcgccgaccccaacatgctggacaccctggtgccggcccacccagccctcgtgaacgccattgtcctcgtgctccattccgttgcgggctcagcccctatgcctgggacagattctagcagccgttctatgccctcgtcaagctaccgggatatgcccgggggcttcttattcgaaggactgtccgatgatgaggacgactttcatccaaatactaggagcacaccgagcagcagtactccaagcagccgcccagcgagcctcggatactctggggctgcaggccctagaccaataacacagagcgagctcgcaacggccctggcactcgcttccaccccagagtcatcctcacatacccctacgcccgggactcagggccacagctcagggaccagcccgatgagcagcggtgtccagagcgggacaccgatcacaaatgatctgttttcccaggcattgcaacacgctttacaggcttccggacagccgtccctccagagccaatggcaaccacagttgcagcagctgagagatatgggaatccaggacgatgagctcagtctacgtgccctccaggccaccggcggagatattcaagctgctctggaactgatctttgccggaggggctccttag

SEQ ID NO: 210691 - DNA, 1143 bp, synthetic construct
  misc_feature 1..1143: note = Description of Artificial Sequence: Synthetic coding sequence
  source 1..1143: mol_type = other DNA
atgagcctgagcgactggcacctggccgtgaagctggccgaccagcccctgacgccaaagtctattctccgattgcctgaaactgaactgggagaatattcactgggggggtatagcatctcattcctcaagcagctgatcgctggtaaacttcaggagagtgtcccagatcccgagctgatagatctgatctactgtggccgcaagctgaaagacgaccagacactggacttttacggcattcagccgggcagtaccgtccacgtacttaggaagagctggcccgagcccgatcagaagcccgagcctgtggataaagtggcagccatgcgggagtttagggtcctgcacacagcactgcactcttcctcttcatatcgtgaagcagtattcaaaatgctgtcaaataaggaaagcttggatcagatcattgtggccacccccggactgagttctgacccaatcgctcttggggttctccaagacaaggacctgttcagcgtgtttgcggaccctaacatgctggataccttggtcccagctcacccagccttagttaacgcaatcgtgctagtgctgcactctgtcgctggatctgctccgatgccaggtaccgacagttcaagccggtctatgccgtcaagctcctaccgtgacatgccaggcggctttctgttcgaagggctctcagacgacgaggacgatttccatccaaatacgaggagtacccctagttcttctaccccatcgagtcggccggcctcactcggatactctggtgcagcaggccctcgtccaatcactcagtctgaattggccacagcccttgccctcgcatcaaccccggagtcctcctctcatacccccaccccagggactcaggggcacagctccggcacctcacccatgtcgagcggagtccagtctgggacccccatcacgaatgatcttttctctcaggcccttcagcacgcgctgcaagcatccggccagccttccctgcagagccagtggcagcctcaactccagcagctgcgcgatatgggtattcaagatgatgaacttagtcttcgggccctccaggcaaccggcggcgacattcaggccgcactggagttgatcttcgccgggggggcaccgtag

SEQ ID NO: 210692 - DNA, 957 bp, synthetic construct
  misc_feature 1..957: note = Description of Artificial Sequence: Synthetic coding sequence
  source 1..957: mol_type = other DNA
atggccctgcccatcatcgtgaagtggggcggccaggagtacagcgtgacaactcttagcgaggacgatacagtactggatctgaaacagtttcttaagacactgaccggggtcttgcctgagcgacagaaattgctcggcttaaaggtgaagggcaagcctgcagagaatgacgtcaagttaggcgccttaaaacttaagcccaatactaaaattatgatgatgggaaccagagaagagagtctggaggacgtgctcggccccccccccgataatgacgacgtggtaaacgatttcgatattgaggatgaggtagtcgaagtggaaaaccgcgaagaaaacctgttaaaaatcagcagacgggtcaaggagtataaggtagagatattaaaccctcctagggagggcaagaaacttctggtcctggatgtggactacactcttttcgaccaccgatcctgtgccgaaacaggagtcgaattgatgcgcccgtacctccacgagttcctgacttcggcttatgaggactatgatatagtgatctggtcagcaaccaatatgaaatggatcgaagctaagatgaaagaactgggtgtgagtactaacgcaaactataagatcaccttcatgcttgactctgcagccatgatcacggtgcacacccctaggaggggtttgattgacgtgaaaccattgggggtgatctggggaaaattctcagagttctactctaaaaagaacacaatcatgtttgacgacatcggtaggaacttcctcatgaatccacagaacggccttaagattcgcccttttatgaaagcccacctgaaccgtgataaggacaaagagctgttgaagcttacccaatacctgaaagagatcgcgaagctcgacgactttctcgacctaaaccacaagtactgggaaagatatttgtctaaaaagcagggacaatag

SEQ ID NO: 210693 - DNA, 1923 bp, synthetic construct
  misc_feature 1..1923: note = Description of Artificial Sequence: Synthetic coding sequence
  source 1..1923: mol_type = other DNA
atggccctgagccggggcctgccccgggagctggccgaggccgtggccggtggccgggtgctggtcgtgggggccggcggaatcggttgtgagttgctgaagaatcttgtcctcaccggtttctcccatattgatctcatcgacttagacaccattgacgtgtccaacctgaaccgacagtttctcttccaaaagaaacatgtgggccggagcaaggcgcaggttgccaaggagtctgtcctgcagttttatcccaaagccaacatcgtggcctaccatgactcgatcatgaatccggattataacgtagaattcttcaggcagttcatccttgtgatgaacgctctggacaacagggctgccaggaatcacgtgaatcgtatgtgtctcgccgcagatgtgccactgatcgaatccgggaccgctggctatctgggacaggtgacaacaatcaagaagggagtgacggaatgttatgaatgccaccctaaaccaactcaacggactttccctgggtgtactattaggaacaccccatctgaacctatccattgtatagtttgggctaagtacctgtttaaccagttattcggagaagaggatgcagaccaagaagtgagccccgatagagcagacccagaagctgcatgggagcccacagaagctgaggcccgtgccagggcttccaacgaggatggagatatcaagagaatctcgactaaggaatgggctaagagtacaggatacgatccagtgaaattgtttaccaaactgtttaaggatgacataaggtacttgttgacaatggacaaactatggcggaagcgaaagcccccggtgcccctcgattgggcagaggtgcagtcccaaggtgaagagacaaacgcgagcgaccagcagaacgagccgcaactcggactgaaggatcaacaggtgctggatgttaagagctatgcaagactgttttcgaagtctatcgaaaccctacgcgttcacctggccgagaagggcgatggtgccgagctcatttgggataaggacgacccatctgcgatggacttcgttacctccgccgccaatctcaggatgcatattttctctatgaacatgaaatcaagattcgacatcaaaagcatggcaggaaatataattcctgccattgctactaccaatgccgttattgctggccttattgtgctggagggcctgaagattcttagcggcaaaatcgaccaatgccgaaccatttttctcaataagcagccaaacccccgcaagaagttactggtgccatgcgctctcgatcccccaaacccgaattgctacgtgtgcgccagcaaaccagaagtgacagtcaggctgaatgttcacaaagtgacggttctcacgctacaggacaaaatcgttaaagagaaattcgccatggtggctccagatgtgcagatcgaggacggaaagggtaccatactgatctcctcggaggagggggagactgaagctaataatcataagaagctgtctgaattcgggatcagaaacggaagcagactgcaagctgacgactttttacaggactataccctgcttatcaacatcttgcactctgaggacctcggtaaagatgtcgagtttgaagtcgtaggggacgcaccagagaaagtgggaccaaaacaggccgaagacgccgcgaagagtatcacaaacgggagtgacgatggggcacagccatcaacctcgaccgcgcaggaacaagacgatgtcctgatcgtggatagtgatgaggaagacagttcaaacaacgcggatgtgtccgaagaggagcgctctagaaagagaaagctggacgaaaaggagaacctgtctgctaaacggtcgaggattgaacagaaggaggagctggacgatgtcatagccctggactag

SEQ ID NO: 210694 - DNA, 1635 bp, synthetic construct
  misc_feature 1..1635: note = Description of Artificial Sequence: Synthetic coding sequence
  source 1..1635: mol_type = other DNA
atgaaccccgactacaacgtggagttcttccggcagttcatcctggtgatgaacgccctggataatagggccgcgcgaaatcatgtgaatagaatgtgtctagctgccgacgtcccgctcatcgagtcaggaacagctggttatctggggcaggtaaccaccattaaaaagggagtgaccgagtgctacgagtgtcatccgaaacctactcagcgcactttccctggatgtaccatccgaaacaccccatccgagccaatccattgcatagtgtgggccaaataccttttcaaccagctgttcggcgaagaggacgccgatcaagaggtgtccccagacagagcagatcctgaagctgcgtgggagccgactgaggcagaagctagagcgcgagcctcgaacgaagacggtgacatcaagagaatctctacgaaggagtgggccaagagcactggatacgatcccgtgaaattattcactaaattattcaaggacgacatacgctacctactgaccatggacaaattatggaggaagcgaaagccccccgtgcctctggactgggcagaggtgcaaagccagggggaagaaacaaatgcgtctgatcagcaaaacgaaccccagctcggtctgaaggatcagcaggttctcgacgtaaaatcatacgctcgtctcttctcaaagtccatcgagactctccgcgttcatttagcagaaaagggtgatggcgccgagctcatctgggataaggatgacccgtctgcgatggacttcgtgacatccgccgcaaacctccgcatgcacatctttagcatgaacatgaaaagccggttcgatataaagtccatggctggaaacataatccctgcaatcgccacaacaaacgccgtcattgcagggctgattgtgctggaagggctcaagatcctttctgggaaaattgatcaatgccgaacgattttcctgaataaacagcccaatccacgaaaaaagctcctggtgccttgtgcgctggacccacccaaccccaattgttacgtctgcgcctctaaaccggaggtgactgttcggttgaatgtgcataaggtcactgttttaactctgcaagacaagattgtgaaagagaaattcgctatggtagcccccgatgttcagatcgaagacgggaagggcaccatccttatctcaagtgaggaaggggagaccgaggcaaacaatcacaagaaactctctgagtttggtattaggaacgggtcaagattacaggccgatgactttctgcaggactatacactcctgattaatatcttgcattctgaggatctgggtaaggacgtcgagttcgaggtcgttggggacgccccagagaaggtggggcctaagcaggcagaagatgcagcaaagtcgataacaaacggcagcgacgacggcgcccagccatcaacaagcactgctcaggaacaggacgacgtacttatcgtagactctgacgaggaggacagctctaataatgcggatgttagtgaagaggaacgaagtcgaaagcggaaactagatgaaaaggagaacctcagtgctaaacggtcgaggattgaacagaaagaggagctggacgacgtgatcgccctcgactag

SEQ ID NO: 210695 - DNA, 879 bp, synthetic construct
  misc_feature 1..879: note = Description of Artificial Sequence: Synthetic coding sequence
  source 1..879: mol_type = other DNA
atgtgcctggccgccgacgtgcccctgatcgagagcggcaccgccggctatctggggcaggtaactaccatcaagaagggagtcactgaatgttatgagtgccacccgaagccaacccagaggaccttccctggctgcaccattcgcaatacaccaagcgagccgatccattgtatcgtgtgggcaaaatatttgtttaatcaattgtttggagaggaagacgccgaccaggaggtatctccggaccgggctgaccccgaggccgcctgggagcctacagaggcagaagcccgtgctcgggcaagcaacgaggatggggacatcaagcgaatttctaccaaagagtgggcaaagtcaactggatatgaccctgtaaagctgttcactaaactgtttaaggatgatattagatacctcctcactatggacaaattatggaggaagcgcaagccccccgtgccactggactgggccgaggtgcagagccagggcgaggagaccaatgcttctgaccagcagaatgagccccagttgggcctcaaggatcagcaagtcctcgacgttaagagctacgcccgcctgttctctaagtccatagaaactctgcgggttcacctggccgagaagggtgatggagccgagctaatctgggacaaggacgacccctctgccatggatttcgtgacctccgctgcaaacttgagaatgcatattttcagcatgaacatgaagagccgcttcgacatcaagtctatggccgggaatattatccccgccattgccactaccaacgctgtcatcgcaggcttgatcgtgcttgaggggttaaaaattctctccggcaagattgatcagtgtagaactgatttctttgaatag

SEQ ID NO: 210696 - DNA, 1047 bp, synthetic construct
  misc_feature 1..1047: note = Description of Artificial Sequence: Synthetic coding sequence
  source 1..1047: mol_type = other DNA
atggccctgaagcggatgggcatcgtgagcgactacgagaagatcagaaccttcgccgttgcgatcgtgggggtgggcggagtggggtctgtcacagctgaaatgctgacccgatgtggaatagggaaacttttgctgttcgattacgacaaagttgagcttgcaaatatgaatcgactgttcttccaaccccaccaggctggccttagtaaagtccaggccgccgagcatactttgcgaaatataaaccccgacgtgcttttcgaagtccacaactacaatattacaaccgttgaaaatttccagcatttcatggatcggatttccaatgggggcctcgaggaaggcaaacccgtcgatctggttcttagctgtgttgataatttcgaggcacgcatgactatcaataccgcctgcaacgaactgggacagacatggatggagtccggcgtgtccgaaaatgccgtgtccggccatatccagttaatcatacctggcgaatctgcatgtttcgcttgcgctcctcctttggttgtggccgcaaatattgatgagaaaacgctgaagcgggaaggagtttgcgctgcgtccttgcctaccacaatgggcgtggtggccggcatcctggtgcagaacgtactaaagtttctgctgaacttcgggaccgtctcattttacctcgggtataatgctatgcaggatttcttccctacaatgtccatgaaacctaatccacagtgtgacgataggaattgcagaaagcagcaagaagagtataagaaaaaggttgcggccttgcccaagcaggaagtgatccaggaagaggaagagatcattcatgaggacaacgaatgggggattgaactcgtttccgaagtctctgaggaggaactgaaaaatttctccgggcccgtgccagacttgccggaaggaattacagtggcatacaccatacccaagaaacaggaagactcggtgactgaactcacagtggaggattcaggggagtccctcgaggacctgatggcaaaaatgaaaaatatgtag

SEQ ID NO: 210697 - DNA, 1215 bp, synthetic construct
  misc_feature 1..1215: note = Description of Artificial Sequence: Synthetic coding sequence
  source 1..1215: mol_type = other DNA
atggccgagagcgtggagcggctgcagcagcgggtgcaggagctggagcgggagctcgcccaggaacgaagtctgcaggttccacgttctggagatggcggcggtgggcgagttaggattgagaagatgtcgagtgaggtggtggatagcaacccttactcgcgtctcatggccttaaagaggatgggcatcgtttctgattatgaaaagattcggacattcgccgttgctatcgtgggtgttggtggcgtgggttccgtgacagcagaaatgctgactcgttgcgggatcgggaagcttctgctattcgactacgacaaagtcgaattggccaacatgaatcgcctcttctttcagccccaccaggccggtctctcaaaagttcaggctgcagagcacaccctccgaaacattaatcccgacgtcctgtttgaagtgcacaattataacatcacgacagtggagaatttccagcatttcatggatagaatctcaaatggcggcctggaggaggggaaacctgtggacctggtgttgtcgtgcgtggacaactttgaggcaagaatgactattaacaccgcttgtaatgagcttggccagacctggatggaaagcggtgtgtccgaaaacgccgtcagtggtcatattcagcttattatcccgggtgagtcagcctgcttcgcttgcgctcccccattagttgtggcagctaacatcgacgaaaaaactctgaaaagggaaggggtctgcgcagcgagtctgcccacaacgatgggggtggtggctggaattctcgtacagaacgtcctgaaattcctcctgaatttcgggacagtttcattttatttgggatataatgctatgcaggattttttccccacaatgagtatgaagcccaatcctcagtgtgacgatcggaattgtagaaagcagcaggaagaatataaaaaaaaagtggctgcattgccaaaacaggaagtcatccaggaggaagaagagatcatccacgaagacaatgagtggggcattgagctggtgtccgaggtttctgaggaagagttgaagaattttagtggaccagtgcctgacctgcccgaaggcatcaccgtggcctacacaattccaaagaaacaagaggacagcgtgactgaactcaccgtcgaggattccggcgaaagtctcgaggacctgatggccaaaatgaaaaacatgtag

SEQ ID NO: 210698 - DNA, 2379 bp, synthetic construct
  misc_feature 1..2379: note = Description of Artificial Sequence: Synthetic coding sequence
  source 1..2379: mol_type = other DNA
atgtggatccaggtgcggaccatggacggccggcagacccacaccgttgactctctgagcaggcttaccaaagtcgaagaactgaggagaaagattcaggaactgttccacgtggaaccagggctgcagaggctgttttacagaggtaagcaaatggaggacggccatacattatttgactatgaggtgcgactgaatgataccattcagcttttggttcggcagagcctcgttcttccccatagcacaaaagaacgggactccgaactctccgataccgacagcgggtgttgtttggggcagagcgagtccgataagtcatcaacacatggagaggcggccgccgagactgactctaggcctgctgatgaggacatgtgggatgagactgagctaggactgtataaggtgaatgaatacgtcgatgcacgggacaccaatatgggggcctggtttgaggcccaggtcgtgagggtcacaaggaaggccccaagccgggacgaaccatgctcttcaacttcccggcccgccttagaagaggacgtgatttatcacgtgaaatatgacgattatccggagaacggggttgtgcaaatgaatagccgggatgtgagggctcgtgcccgaactatcattaaatggcaggacctcgaggtcggccaagtggtaatgctaaactataatcccgataatcccaaagaacgcggcttctggtacgatgctgagattagtcggaagagggaaacccgcacagccagggaactctacgcaaatgtggtgcttggagacgattcccttaacgattgtcgcataatcttcgttgatgaagtgtttaagattgagagaccaggggaggggtcgccaatggtggataaccccatgcgcaggaaatctggacctagttgcaaacactgcaaagacgatgtgaatcggctatgtcgcgtgtgcgcctgtcacctatgtggagggagacaggacccggataaacagctcatgtgtgacgagtgtgacatggcttttcacatctactgtctcgaccccccactcagcagcgtcccctccgaggatgagtggtactgcccagagtgtcgcaacgatgcctctgaggtggtcctggctggcgagcgtctgcgcgaatctaagaagaaggctaagatggcctcagccacttcctctagtcaacgcgattgggggaaaggtatggcttgcgtcggccgaaccaaagagtgcaccatcgttccatcaaaccactacggtccaatccctggaattcctgtgggcaccatgtggcgattccgagtacaggtgtcagaatccggcgtccacaggccccacgtggccggcattcatgggcgaagcaacgacggggcttactctctcgttttagccggcgggtatgaggatgacgtggaccacgggaatttctttacttacacagggtcaggtggaagggatctgtcaggcaacaagagaacggctgagcagtcctgtgatcagaagctgactaatactaacagagccctggccctgaattgctttgctcccatcaacgaccaagagggggccgaggctaaggactggcgctccggtaagccagtgagagtagtcagaaatgtaaaaggcggaaaaaacagcaagtacgcccctgcagaggggaaccgctatgatggcatttataaagtcgtcaagtactggccagaaaaaggtaaaagcggattcctagtgtggcgttatctgcttagacgggatgatgatgaacctggaccctggaccaaggaaggaaaggacagaatcaagaagctggggcttaccatgcagtatcctgagggttacttagaagcactggcgaacagagaaagagaaaaggagaacagcaagcgtgaggaagaggaacagcaggaaggaggtttcgctagccctaggacaggaaaaggcaagtggaagcgaaaatctgcgggcgggggaccttcccgagctggcccgcggcgaacgagcaaaaagacgaaagttgaaccatactcgctcaccgcacagcagagttcactgatacgggaagacaaaagcaacgctaagctctggaatgaggtcctggcctcgcttaaggaccgcccagcttcaggaagcccatttcagctgttcctttccaaagtggaggagactttccagtgcatttgttgtcaggagttggtgtttcggcctatcaccacagtctgtcagcataatgtttgcaaggactgtctagaccgctcgttcagagcgcaggtcttttcctgccccgcttgtcgctacgacttaggtaggtcatacgctatgcaggtgaatcaaccccttcagacggtgttgaatcagctgtttccaggctatgggaatggtcgctag

SEQ ID NO: 210699 - DNA, 1224 bp, synthetic construct
  misc_feature 1..1224: note = Description of Artificial Sequence: Synthetic coding sequence
  source 1..1224: mol_type = other DNA
atggccagcgccaccagcagcagccagcgggactggggcaagggcatggcttgcgtcggtcggacaaaagagtgcactatcgttccttccaatcattatggccctatccctggaattccagtgggcactatgtggagatttagggtccaggtgagtgaaagcggggtgcacagaccacacgtggctggaatccacggcagaagcaatgacggtgcctattcactggtgctagcgggagggtacgaggacgacgtggatcacgggaatttcttcacatacactggctctggtggtagggatctgagcggcaataagcgcaccgcagaacagtcctgcgatcagaaactcacaaacacgaaccgggccctggcacttaattgctttgcaccaatcaatgatcaggaaggggcggaagctaaggactggaggagcgggaagcctgtccgcgttgtgcgaaacgtgaaaggcgggaaaaattcaaagtacgctccagccgaaggaaaccgatatgacggtatttacaaggtggtgaagtattggcctgaaaagggaaagtccggatttctagtctggcggtaccttctccgccgagacgatgacgaaccgggtccttggaccaaggagggaaaagatcgtattaagaaactggggctgactatgcagtaccccgagggatatctggaagcactggctaaccgagagagagaaaaagagaactctaagcgggaagaagaagaacagcaagagggcggctttgcttccccgaggaccggaaagggcaaatggaagcggaagtcggctggggggggcccgtcacgggcaggtccacgtaggaccagcaagaaaactaaggtggagccatactccctgaccgcccaacagtcctctctcatccgcgaagacaagtccaatgccaaactatggaatgaagtcttagcctcgctcaaggacagacctgcttcaggctctcctttccaactgttcctgagcaaagtcgaggagacctttcaatgcatatgctgccaggagctggtgttcaggcccatcaccaccgtttgtcagcataatgtttgtaaggactgtctggaccggagtttccgggcacaggtgttttcctgcccagcatgcagatacgatctggggcgctcttacgcaatgcaggtgaatcagcctctacagaccgtcttgaaccagctgttccccggatacggcaacgggcgctag

SEQ ID NO: 210700 - DNA, 2418 bp, synthetic construct
  misc_feature 1..2418: note = Description of Artificial Sequence: Synthetic coding sequence
  source 1..2418: mol_type = other DNA
atgggcgtgttcgccgtgccccccctgagcgccgacaccatgtggatacaagttagaaccatggacgggaggcaaacccatacggtcgacagtctctcaagactgaccaaggtagaggagttgcgccggaagatccaggaactgttccatgtggagcctgggctacagcgcctattttaccggggtaaacagatggaggacgggcatacgctgtttgattacgaggtgcgattgaacgacaccattcagttgcttgtccgacagagtctagtcttgccccactctactaaggaaagagattctgaactttcagatactgatagcggatgctgccttgggcagtcagagtcggacaagtcttccacccatggtgaggccgcggctgaaacagatagtcggcccgcagatgaagacatgtgggatgagacagagctgggattatacaaagtgaacgaatatgtggatgctagagatacaaacatgggggcatggttcgaagcgcaggtcgtccgcgtaactcggaaggccccgtctcgcgatgagccctgtagttccacaagtaggcctgccctggaggaggacgtgatctaccatgtcaaatatgacgactatcctgagaacggagtggtccaaatgaattcccgcgatgtacgggcaagggctagaaccattatcaagtggcaggacctggaagtggggcaggtcgtgatgctgaactacaacccggacaatccaaaggagagaggcttttggtacgacgctgaaatttctcggaagagggagacgcgcacggctcgcgagctctatgccaatgtggtacttggggatgattcactgaatgattgtcgcattattttcgtggacgaggtttttaaaatcgaacgacccggagaaggatcccctatggtcgataatcctatgaggcgtaagagtggcccgagctgcaagcattgcaaggacgacgtgaatcgcctttgtcgggtgtgtgcatgccatctctgtggaggtcgtcaagaccctgataaacagcttatgtgcgacgaatgcgacatggcgtttcacatctactgtcttgatcctcctctgagctcggttccaagtgaagacgagtggtactgccccgagtgtagaaatgacgcctctgaggtggtgctcgcgggcgaaaggttgcgcgaatcaaaaaagaaggccaagatggcttccgctacgtcatccagccagagagactggggcaaagggatggcatgcgtggggaggaccaaggagtgcacaatcgtgccatctaatcactatggccccatccccgggattccagtaggaactatgtggaggttcagggtgcaggtctccgaaagcggagtgcaccggccgcatgtagcgggtatacacggccgtagtaacgacggggcctatagtctggttcttgcagggggctatgaggatgatgttgaccacggtaatttcttcacatataccgggtccggcgggcgagacctgtccggcaacaaacgaacagcagagcagagctgcgaccaaaagctcactaacaccaatagagctcttgccctgaactgtttcgctcccataaatgatcaggagggtgcggaagccaaggattggcgctctggaaagcccgttcgtgtcgtgaggaatgtaaaaggaggcaagaatagcaaatacgcacctgcagagggcaataggtacgatggcatctacaaggttgtgaaatactggcctgagaaaggcaagtctggattcctggtgtggagatatctcctacggcgggacgacgatgaacccggcccctggaccaaagaaggaaaagatcggatcaaaaaactgggtctcaccatgcaataccctgaaggctatctggaggcacttgctaatcgggagcgcgagaaggagaattccaagagagaagaggaagagcagcaggaaggcggtttcgccagcccgcggacgggaaagggaaagtggaaacggaaaagcgccgggggaggcccctccagggcaggaccccgacggacctcaaagaaaaccaaagttgaaccctatagcttaactgcccagcaatctagtctgattagagaggacaagtctaatgccaaactctggaacgaagtgctggcaagtctgaaggatagacctgccagtggttctcctttccagttattcctctcgaaagtggaagaaactttccagtgcatttgttgccaggagttagtgttcaggcccatcacgaccgtatgccagcataacgtatgcaaagattgcctggacagaagtttccgggcccaagttttttcctgtcccgcatgcaggtatgaccttgggcggagctacgcaatgcaggtgaatcagccgctccagacggtgctgaaccaacttttccctggatacggcaacggtaggtag

SEQ ID NO: 210701 - DNA, 2379 bp, synthetic construct
  misc_feature 1..2379: note = Description of Artificial Sequence: Synthetic coding sequence
  source 1..2379: mol_type = other DNA
atgtggatccaggtgcggaccatggacggccggcagacccacaccgtcgacagcctgtcccgacttacaaaagtggaggaactgcgaagaaaaatacaggaactgttccatgtggaacctggtctgcagagattgttctaccgaggcaaacagatggaagatgggcataccctctttgactacgaagtcaggctcaacgacactattcagctgctggtcaggcagtctttggttcttcctcatagcaccaaggagcgagacagcgagctctccgacactgattccgggtgttgtctaggtcagtctgagagcgacaagagctccacgcatggagaagctgccgctgagaccgattctcgccctgccgacgaagatatgtgggacgagacagagttggggctctataaggtcaatgagtacgttgacgctcgcgatacgaacatgggcgcctggttcgaagcccaggtggtccgagtcacacgaaaggccccgagtagggatgaaccatgctcttctacctcacgccccgccctggaagaggacgtcatttaccacgtaaagtacgatgactacccagagaacggagtcgttcaaatgaatagcagggacgttcgtgcaagggcccggaccattatcaagtggcaggatctggaagtggggcaggtggtcatgctgaactacaaccccgataaccccaaagaaagaggattctggtatgacgccgagatttcccggaagagggagaccaggactgctagggagttatacgctaatgtagtgttaggagacgactcattaaacgactgtcgaataatctttgtagatgaggtgttcaagatcgaaagacccggggagggctctcctatggtggacaatcccatgaggagaaaaagtgggcccagctgcaagcattgtaaagatgatgtgaatagactgtgtagagtatgtgcgtgccacctatgcggaggtcgacaggatccggataagcagctgatgtgcgacgagtgcgacatggcgttccacatttactgtctggaccctcctctcagttctgtgcccagcgaggacgagtggtactgcccagagtgtagaaacgatgcgagcgaagtggtgctagctggtgagagacttagagagtctaagaagaaggcaaaaatggcgagcgccacgtcatcgagtcagcgcgattggggaaaagggatggcatgcgtcggcaggacaaaggagtgtacgatcgtgcccagcaaccactatggtccaattccaggcatcccagtgggaacaatgtggaggttcagggtgcaggtgagcgaatcgggagttcatagaccgcacgttgccggcattcacgggagatcaaacgacggcgcgtacagtctggtactggctggtgggtatgaagatgatgtcgatcacggcaacttctttacttacacagggtcaggggggcgagatttatctggaaataagcgtactgccgaacaatcatgcgaccaaaaactcacaaacactaaccgcgccctggcactaaactgttttgcccctataaatgaccaagagggcgctgaagctaaggactggagaagcgggaaaccagtgcgagtggtcaggaatgtgaagggaggtaagaacagtaaatatgcacctgcggagggcaatcgctatgacgggatatacaaggtggttaaatactggccagagaaaggtaaatcaggctttctggtgtggagatacttactccggcgcgacgacgatgagccaggaccctggactaaggagggtaaggatcggatcaaaaaattaggcctcacgatgcagtacccagaggggtacttggaagccctggccaatcgcgagcgggagaaggagaactctaaacgcgaagaggaggaacaacaggaaggtggcttcgccagtcctagaaccgggaaaggaaagtggaaacgaaagtccgccggaggaggaccttccagggcaggtccccgccggacatccaaaaagaccaaagtggagccatactcactgactgcacagcagagtagccttatcagggaagacaagtctaacgccaagctgtggaacgaggtactggcctcccttaaagaccggccagccagtggttcaccatttcagctctttttatccaaagtggaggaaaccttccagtgtatttgttgccaggaactggtgtttcgtcccatcaccaccgtgtgtcagcataacgtgtgcaaggactgcttagacaggtccttcagggctcaagtgttcagttgcccagcttgccggtatgacttggggagaagctacgcaatgcaagtgaaccagccactccagaccgtgcttaaccagctgtttccaggatacgggaatggtagatag

SEQ ID NO: 210702 - DNA, 2379 bp, synthetic construct
  misc_feature 1..2379: note = Description of Artificial Sequence: Synthetic coding sequence
  source 1..2379: mol_type = other DNA
atgtggatccaggtgcggaccatggacggccggcagacccacaccgtcgacagcttgagccgcctgacaaaggtggaggaacttcggcgcaagatccaggagctgttccatgttgagcctggactgcagcgactgttttacagaggtaagcagatggaagacggacatacattattcgattatgaggttcgcctaaacgatacgattcaactgctcgtgaggcagtctctcgttctgccccactctaccaaagagagggacagcgaactgtcagatactgactctggctgttgtcttggacagtctgagtcagacaagtcctcgacccatggggaggcagcagccgaaactgattcaaggcccgcagatgaagacatgtgggacgagactgaactcggactttataaggtgaacgagtacgtcgatgctagagacactaatatgggagcctggttcgaagctcaggtcgtgagggtcactcggaaagcgccgtctcgcgatgagccatgctcaagtacatcacgtcctgccctggaagaggacgtgatctaccacgtaaagtatgatgactatcctgaaaacggtgtggtccaaatgaatagtcgggatgtaagggctagagccaggaccattattaagtggcaggacttggaagtcggccaggtggtgatgctgaactacaatccggacaatccaaaggagcgaggattttggtacgatgccgaaatctcccgtaaacgcgaaacccggactgcccgggagttatatgctaatgtggtgcttggtgacgactcattaaacgattgtaggatcatctttgtggacgaggtgtttaaaatagaacggcctggcgagggctccccaatggtggacaacccgatgcgcagaaagagcggccctagctgcaagcactgtaaagacgacgtgaatcgcctgtgccgggtgtgtgcttgccatctatgcggtggaagacaggatcccgacaaacagctgatgtgtgacgagtgtgacatggctttccatatctattgcctagacccccccctctcgtctgtgcccagcgaagatgaatggtattgccctgaatgtcggaacgatgcctcggaggtcgtgctggccggcgagcggctgcgggagtcaaagaagaaggcaaagatggctagcgctaccagcagtagccaaagggactgggggaagggcatggcctgcgtgggccggaccaaggagtgtacgattgttccttccaatcactatggcccaatccctggcattccagtgggtaccatgtggcgcttcagagtgcaggtgagtgagtcaggcgtacaccgaccccacgtggctggcattcacggaaggagcaatgatggagcatactcgctagtcttggccggaggatacgaggacgacgttgatcacgggaatttcttcacatatactggtagtggaggcagggacctgtcaggcaacaaaaggactgccgaacagagctgtgatcagaagcttaccaataccaaccgtgcacttgcactgaactgtttcgccccgattaatgaccaagaaggtgccgaggcaaaagattggaggtcaggaaagcctgtgcgtgtggtgcgtaacgtcaaaggcggtaagaacagcaagtacgcaccggcagaaggcaatcggtacgacggaatctataaagttgtaaaatattggcccgagaagggaaaaagcggtttcctggtgtggcgctacctgttgaggcgggatgacgacgagcccggaccatggacaaaagagggaaaagacagaataaaaaagctggggctcactatgcagtatcccgaaggctatcttgaagccttggccaacagagagcgcgagaaggagaattccaaacgagaagaggaggagcagcaggagggaggtttcgccagccctcggacaggtaagggtaagtggaaacgcaagagcgccggtgggggtccgtcaagggctggcccccgtcggacatctaagaagaccaaagtggaaccctactccctcacggcccagcagtcctcgctcatacgcgaagataagagcaatgctaagctgtggaatgaggtactggcgtcactcaaagaccgtcccgcatctgggtctccttttcagctgttcctctcaaaggtagaggaaacgttccagtgcatttgttgtcaagaacttgtgtttagaccgatcactacggtatgccagcacaacgtttgcaaggattgtctcgacagatctttccgcgcccaggtgttctcctgtccagcatgcagatacgacctgggccggtcttacgcgatgcaagttaatcagcccctccagaccgtcttgaaccagctgtttccagggtacggtaatgggagatag

SEQ ID NO: 210703 - DNA, 3240 bp, synthetic construct
  misc_feature 1..3240: note = Description of Artificial Sequence: Synthetic coding sequence
  source 1..3240: mol_type = other DNA
atgaagagctgcgccgtgagcctgaccaccgccgccgtggccttcggagacgaggccaagaagatggcagaagggaaggcatctcgcgagtctgaggaggaatctgtcagccttacggtcgaggaacgtgaagccctgggaggtatggactctaggctatttggtttcgtgcggttgcacgaagatggggcgagaacaaagacattgttgggaaaggccgtgcgctgctacgaatctcttatattaaaggccgaggggaaggttgagtcggacttcttttgccaactgggacacttcaatttgcttctggaggattactcaaaagcactgagcgcataccaacgctattactccttacaggcggattattggaaaaatgctgcgtttctgtacggcctgggcctcgtgtatttctactataatgcatttcactgggccattaaggcattccaggacgtgttatacgtagacccatctttttgtcgcgctaaagaaattcacctccgattagggctgatgtttaaggtcaatacagattataaaagctcattaaaacatttccaactcgctctgatcgactgcaatccgtgtacactctcaaatgctgaaattcagtttcacatcgcacacctgtacgagacgcagcgaaaataccattctgcaaaagaagcatacgagcagcttcttcaaacggaaaacctgcctgcccaggtgaaggccaccgttctccagcaactgggctggatgcatcacaacatggacctggtcggcgataaggccactaaagagtcctacgccattcagtatttgcagaaatctctggaagctgaccctaactcaggccagtcctggtacttcctggggaggtgttactcatctattggaaaagtgcaggacgctttcatcagctaccgccagtccatcgataagagcgaggcttctgccgatacctggtgtagtatcggcgtcctatatcaacagcagaatcaacccatggatgccctccaagcatatatctgcgctgtgcagctggatcatggccatgctgcagcctggatggatctgggcaccctgtatgagagctgcaaccaacctcaggacgccatcaagtgttatcttaacgccgctcggagcaagcggtgcagtaatacatctacactggcggctcggatcaaattcctgcagaatggaagcgacaactggaacgggggtcagtccctgagccatcaccccgtgcagcaggtgtatagcctctgccttacaccccagaagctccagcacttggagcagctccgcgccaatcgtgataacctaaacccagctcagaaacatcagctggagcagctcgaaagtcaattcgtgcttatgcaacagatgcgccataaagaggtggcccaggtacgtaccacaggaatccacaacggtgctattaccgactccagcctgccaacaaattcggtcagcaacagacagccccacggtgctctgactagagtgagttctgtcagccagcccggggttcggccagcctgtgttgaaaaactgctttcgtccggggcgttttctgccggatgtattccctgtggtacttcgaagatcctgggcagtacagacaccatcctgctagggagcaactgcatcgccggaagcgagagcaacgggaatgttccctacctccaacagaacacccacactctcccgcataatcacactgatctgaattcttccacagaagagccatggcggaagcagcttagtaactctgcacaaggacttcacaagagtcagtcttcgtgcctctccggtccgaacgaggagcagcctctattttccactggctctgcccaataccatcaggctacgtcaaccggcattaagaaagctaatgagcacctcacactcccttccaacagtgttccgcaaggtgacgccgatagtcatctctcgtgccacaccgctaccagcggaggacaacaaggaattatgttcaccaaggagtctaaaccttccaagaaccgaagtcttgtacctgagacaagcaggcacaccggcgacacgagcaacggctgtgccgatgtgaagggactgagtaatcacgtccatcagttgattgctgacgcagtgtccagtccgaatcacggcgacagccccaacctactcatcgccgacaacccccagttgtctgccttgctgattggtaaagccaatggcaatgtgggcacaggcacatgtgacaaagtgaataacatacatccagccgtgcataccaagaccgatcacagcgttgcctcaagccccagctccgctatcagtactgcaacccctagcccaaagtctaccgaacagaggtccattaatagcgtgactagcctgaattctccccattctgggctgcacactgttaatggggaaggcctgggtaagtcacagagcagtaccaaggtggatctccccctggctagtcacaggagtacctcccaaatcctgccctctatgtctgttagcatctgtccctcttccactgaggtcctgaaagcatgccgcaatcctggtaagaacggtctctcgaattcatgcatcttactagacaaatgccctccgcctagaccacccacctccccatacccgccccttcccaaggataaactgaaccctccaaccccatcaatctatctggaaaacaaacgagacgcctttttccccccgctgcaccagttttgcacgaaccccaaaaatccggtgaccgtgatccgtgggctcgcaggagcgctaaaattggacctggggctctttagtactaaaaccctcgttgaagcaaacaacgagcacatggtagaggtgcgaacccaactgctgcaacctgcagacgaaaattgggaccccaccggtacaaagaaaatttggaggtgtgagagcaatcggtcccatactaccattgcgaaatacgcccagtaccaagcgtcatctttccaggaaagcctgagggccggcatgcaatggtgcgacctcagctcccttcagcctccgccccctggctttaagaggttctctcacctcagcctcccaaacagctggaattaccgacacctccccagctgccccaccaacttttgcatctttgtggaaaccggctttcaccatgtgggccaggcttgcttagagctgcttacttctggagggctactggcatcagcatcccagtcagccggtattacgggcgtgagccaccacgcccgctag

SEQ ID NO: 210704 - DNA, 4044 bp, synthetic construct
  misc_feature 1..4044: note = Description of Artificial Sequence: Synthetic coding sequence
  source 1..4044: mol_type = other DNA
atgaagagctgcgccgtgagcctgaccaccgccgccgtggccttcggcgacgaggccaaaaagatggccgaaggcaaggcatcgcgcgaaagtgaagaggagagcgtttccctgacagtggaggagcgggaggcactgggcgggatggattcacgactgttcggttttgttagactacatgaggacggcgcgagaaccaagacgcttctggggaaggccgtccgctgctacgagtctcttattctaaaagccgagggaaaggtggaaagcgatttcttctgccagctcggccactttaatcttttgctggaggactactcgaaggccctatcagcctaccagaggtactacagcctgcaagctgattactggaagaacgccgccttcttgtacggccttggactggtctacttttattataatgctttccattgggcaattaaggctttccaagatgttctgtatgtcgatccctcgttctgtagggccaaggagattcatttaaggctggggctcatgttcaaagtgaacaccgattataaatcctcattaaaacacttccaactcgctctgatcgattgcaacccttgtacactttccaacgctgagatccagttccacattgcccacttgtacgagacccaaaggaagtaccacagcgcaaaggaagcctatgagcagttgctccagaccgagaatctgccagcgcaagttaaggctactgtgctgcaacagctgggatggatgcatcacaatatggacttggtgggcgacaaggctactaaagaatcctatgccattcagtacctgcaaaaaagcttggaagcggatcctaactctggacaatcttggtacttcctgggcaggtgttatagtagtatcggtaaggttcaggatgcttttatatcctacaggcaatcaatagacaagagcgaagcttcagccgacacgtggtgttccatcggagtgctataccagcagcaaaaccagcccatggatgcgctccaagcttatatttgcgcagtacagttagaccacggtcacgctgcggcatggatggacctgggaacactgtatgagagctgtaatcagccgcaggacgctatcaaatgctacctgaacgctgcacggtcaaagcgttgttctaacacctcaactctcgcagcccgaattaaattcctgcagaatggatccgacaattggaatggcggccaatcactctctcaccaccctgtacagcaagtgtactccctttgtctcacaccccagaaattgcaacacctagagcagcttcgggcaaatagagacaatctgaaccctgcacagaaacatcagctggagcagctggaatcccagttcgtcctgatgcaacaaatgcgccacaaagaagtcgcccaagttcgcacaacaggcattcataatggcgccattacggactctagtctgcctaccaactccgtgagcaataggcagccgcacggcgcattaactcgagtgagtagtgtatcacagccgggtgtgcggccagcttgcgtcgaaaaactcctgagtagcggagcattcagcgctggatgtatcccctgcggaacgtcaaagatattaggatcaacagacactattctattaggaagcaattgcattgctgggagcgagagtaatggaaacgtgccgtacttgcaacagaacacccacacattaccccacaaccatacagatttgaactcatcaactgaagaaccttggcggaaacagctgtcaaatagcgcacaaggactgcacaaaagccaatcatcctgtctttctggaccaaacgaggaacagcctttgttcagcaccgggtccgcccagtatcaccaggccacatcaaccggtattaaaaaagccaacgaacaccttactctcccaagcaattcagtacctcagggggacgccgacagtcatctatcttgccataccgcaacttctggagggcaacagggcatcatgttcacaaaggaatctaagccctctaagaaccggtcactagtgcctgaaacctccaggcataccggcgatacatcgaacggctgcgcagacgttaagggactgagtaaccacgtgcaccagcttatcgccgacgcagtatcaagcccaaaccacggggatagccccaatcttctgattgcagacaatccgcagctgtctgcactcctgatcggcaaggctaacggcaacgtgggtactggcacgtgtgacaaagtgaataatatccaccctgctgtccacacaaagacagaccacagtgtggccagcagcccgtcttcggcgatctctaccgccaccccatcgccaaaatccaccgaacagagaagtataaacagcgtgacctccctcaactcgccacatagtgggctgcataccgtgaacggtgagggcttgggcaagagccagagcagtacaaaggtggacctccccttggcctctcatcgatcaacaagccagatcttacctagcatgagtgtgtcgatctgccccagcagtacagaagtgttaaaggcctgtcgcaacccagggaagaacgggttatctaattcatgcattctcttagataagtgcccgccgccaaggcctcctacctcgccatacccccccctgcctaaagataagcttaatcccccaacaccatccatctatctcgagaacaagcgcgatgcatttttcccaccactgcaccagttctgcactaaccctaagaacccagtcactgtgatccgggggctggctggcgctctgaagttagacttagggctattttcaacaaagacactcgtggaggcaaacaacgagcacatggtggaggtacggacccaactcttacagccagctgacgaaaactgggatcccaccggaactaagaagatctggcgctgcgagagtaacaggtctcataccaccatcgcaaaatacgcgcagtaccaagctagttctttccaagaaagcctccgcgaggagaatgagaaaaggacccagcataaagaccacagtgataacgaaagcaccagcagtgaaaattctggacggagacgcaagggcccattcaaaaccatcaaatttggcactaacatcgacctgtctgataacaaaaaatggaagctgcagctccacgagctgacaaagcttcctgccttcgcccgggtcgtttctgcaggcaacctcctgacccacgtaggccacaccatccttggcatgaatacagtacagctgtacatgaaagtcccgggttcaagaacgcccgggcaccaggagaataataatttctgctctgttaatataaacatcggtcccggcgattgtgaatggttcgtggtccccgaagactactggggcgtgcttaatgacttctgcgagaagaacaacctcaattttttgatgtctagttggtggccaaacttagaagacttgtacgaggccaatgtgcctgtgtataggtttatccaaaggccgggcgacctggtatggatcaacgctggaacagtccactgggtgcaggccgtgggctggtgcaataacattgcctggaacgtgggcccactgactgcttgtcaatataaactggcggtcgagagatatgagtggaacaagctgaaatccgtcaagagcccggttcccatggtgcacctgtcatggaatatggcaaggaacatcaaagtgagcgatccaaagctctttgaaatgatcaagtactgtctgctcaaaattctcaaacagtaccagaccctgagggaggccctggtagcggcaggaaaggaagtcatatggcatggcaggacaaatgacgagcctgcccactactgttccatctgtgaggttgaagtgttcaaccttctgtttgtgacaaatgagtccaatactcaaaagacttacattgtgcattgccacgactgcgccaggaagaccagtaagtccttagagaactttgtagtacttgagcaatacaagatggaagacttaattcaggtctatgaccagttcactctggccctcagtctcagtagctcatcctag

SEQ ID NO: 210705 - DNA, 3723 bp, synthetic construct
  misc_feature 1..3723: note = Description of Artificial Sequence: Synthetic coding sequence
  source 1..3723: mol_type = other DNA
atgaagagctgcgccgtgagcctgaccaccgccgccgtggccttcggggatgaggccaagaagatggcagaaggaaaagccagccgggagtccgaagaggaatcagttagtctgaccgtggaggagagggaagccctgggcgggatggactcccggctgttcggatttgtgcggctgcacgaggatggggctaggactaaaaccctattagggaaggcagtgcgctgttatgagagcttgattctgaaggctgaaggcaaagtggaatcggacttcttctgtcagctgggacacttcaatctgctgctggaggactatagcaaggctcttagcgcttaccaaaggtattacagcctgcaggcagattactggaagaacgctgcttttttatatggactgggactagtttatttctactacaacgcctttcactgggccatcaaagcattccaggatgtgctttacgtagacccatctttttgtcgggcgaaagagattcacctcaggctgggcctgatgttcaaggtgaatactgactacaaaagcagcctgaagcactttcagctggctctgatcgactgcaatccctgcacgctgagcaacgccgagattcagttccacattgcccacctgtacgaaacacagagaaaatatcattctgctaaggaggcctacgagcagttgctgcagacagagaaccttccagcccaggttaaggccaccgtactgcagcagcttggctggatgcatcacaacatggacctcgttggcgacaaggctacgaaagaatcctacgccatacaatatctgcaaaagagtcttgaagccgacccgaattcaggacagagctggtacttcctggggagatgctacagctcgataggcaaggtacaagatgccttcatttcctataggcagagcatcgacaagagcgaagcctctgcagacacttggtgctctataggcgtgctgtaccagcaacagaatcaaccaatggacgcattgcaggcctacatatgcgcagtgcagctcgaccacggccatgcggccgcttggatggacttagggaccctctacgaaagttgcaaccaacctcaggacgcaataaagtgttacttgaatgctgcccgttcaaagcggtgtagcaatacatccactctcgccgcgcgcatcaaattcctgcagaacggctctgacaattggaacggcggccagagcctctcccaccaccctgtgcagcaggtgtattccctgtgtctaacgccgcagaagctccaacatctagagcagttgcgagccaatcgcgacaatcttaacccagcacagaagcaccagctggagcaactggaatcccagtttgtgctgatgcagcaaatgcgccataaggaagttgcccaagtgaggacaaccgggattcacaatggggctatcacagatagttccctgccgacaaatagtgtgagcaacaggcaaccacatggcgccctgaccagggtctcttccgtgtcgcagcccggggtgcgccctgcatgcgtcgagaaacttctctcctccggagcattcagcgcagggtgtattccgtgcgggacgtccaagatattggggtcaacggacactatccttctgggttccaactgtattgctggatcggagtctaacggtaatgttccttacctgcagcagaacacccacaccctaccacacaaccatacagatctgaactcatcaacagaggagccctggcgcaaacagttatcaaactccgcgcaggggcttcacaaaagtcagtcatcttgcctgagtggcccaaatgaggagcagccattattttccaccggatcggctcagtatcaccaggctaccagcaccgggataaaaaaagccaatgaacacctgaccctccccagcaactctgtgccacaaggggatgccgattcccatctcagttgtcataccgcaacttccggtggtcagcaaggcatcatgtttaccaaggagtctaagccttcgaaaaaccggtccctggtcccagaaaccagcagacatacaggagacacttctaacggatgcgctgacgtcaagggcttatcaaaccatgtgcaccagctgatcgctgatgcagtgagttcccctaaccacggggacagtcccaatctgctcattgccgataacccgcagcttagtgcactgctcattggcaaggccaatggcaatgttggcaccggaacctgtgacaaagtaaataacatccatcctgctgtacatactaagactgaccactccgtcgcaagcagtccatccagcgccatctcgacggccacacccagcccaaaatccacagaacagcgttctattaactctgtaacctctctgaactctcctcattccgggctgcataccgttaatggggagggcctgggaaagtcccagtcgtccaccaaagtggacctcccactggcgagccatagatcaactagtcaaatccttccaagtatgagtgtctctatatgtccatcctcaactgaagttttgaaagcttgccgcaatcccggcaagaacggactcagtaacagttgtattctgctggacaaatgccccccccctcgacctccaacttccccctatccccctctgccaaaagacaagctcaatccgccaactcctagcatctaccttgaaaataaaagagacgctttcttcccgccactccatcagttttgtactaaccccaagaaccccgtgaccgtgattcgcggccttgcaggagccctcaagttagacctcggcctgttcagcacaaaaactctggtggaagccaacaatgagcatatggttgaagttcgcacgcagttgctacaacccgccgacgagaattgggaccccaccgggacaaaaaaaatatggcgttgtgagagcaacagaagccataccacaatcgctaagtacgcacaatatcaggccagctctttccaagagagcctacgagaggagaatgaaaaacggacgcagcacaaggaccattctgataatgaaagtacatcttctgaaaatagcggcagacggagaaaggggcctttcaagacaattaagtttgggacaaatatcgatctgtcagataataagaaatggaagctgcagttgcatgaactgaccaagctccccgcttttgctcgcgttgtgagtgctgggaacctcctcactcacgtcgggcacactattcttggcatgaacacagtgcagctttatatgaaggttccaggtagccgcacaccaggccatcaggaaaacaataatttttgttctgtgaacatcaatatcggaccgggggactgcgagtggtttgtcgtgccagaggattactggggcgtcttgaacgacttctgtgaaaagaataaccttaatttcctgatgagcagctggtggccaaatttggaggacctctacgaggccaatgtgcccgtatacagattcatccagagacccggcgacctcgtgtggattaatgctggtaccgtccactgggtgcaggcagtcggttggtgcaataatatagcatggaatgtcgggcccctgaccgcctgccaatataaactggccgtcgaacgatacgaatggaataaactgaaaagcgtgaagtcaccagtccccatggttcatctgagctggaacatggccaggaatataaaagtgagcgatcctaaactgtttgagatgatcaagtag

SEQ ID NO: 210706 - DNA, 624 bp, synthetic construct
  misc_feature 1..624: note = Description of Artificial Sequence: Synthetic coding sequence
  source 1..624: mol_type = other DNA
atgaagagctgcgccgtgagcctgaccaccgccgccgtggccttcggcgacgaggccaagaaaatggcggaaggcaaggcctcacgggagtctgaagaggaatctgtgagcctcacggtggaagaaagagaagccctcgggggcatggatagtcggctgtttggtttcgtacgattgcacgaggatggagcacggacaaagaccctgttggggaaggcggttaggtgctatgagagcctcatcctgaaggccgagggtaaagtggagtccgattttttttgccaactcggccatttcaacctgctgctcgaggattatagcaaggccctgtcagcctaccagaggtattatagcctgcaggcggattactggaaaaatgccgcctttctctatggattgggcttagtgtacttctattacaatgccttccattgggccatcaaagctttccaagacgtgctttatgttgatccatccttttgccgggctaaagagattcatctccggctcggcctgatgttcaaagtgaacactgattataagtcgtcactgaagcacttccagttagctctgatcgattgcaacccttgtacacttagtaatgcggaatccaagtatttctag

SEQ ID NO: 210707 - DNA, 4179 bp, synthetic construct
  misc_feature 1..4179: note = Description of Artificial Sequence: Synthetic coding sequence
  source 1..4179: mol_type = other DNA
atgaagagctgcgccgtgagcctgaccaccgccgccgtggccttcggcgacgaagccaagaagatggcggagggcaaggcctcacgcgagtccgaagaagaaagtgtgagtctcaccgtcgaggaacgggaagctctgggcggtatggacagtcgtctgttcggatttgtgaggctacacgaagacggggctagaaccaaaacgttactggggaaggccgtgcgatgctacgagagtctcatcttgaaagctgagggtaaagtcgagtctgattttttctgtcagcttggtcactttaacctgctcctcgaggactactctaaggccctttccgcttaccaacggtattatagcttacaggcagactactggaagaacgccgccttcttgtacggtttaggcttggtgtacttttattataacgcctttcattgggccataaaggcattccaggacgtattatacgtggaccccagcttctgccgggctaaagaaatacatctgcgcttgggcttaatgttcaaagtgaacacagactacaaatcatcacttaaacatttccagcttgccttgatcgactgtaatccctgtacactcagcaatgcagaaatccagttccatatcgctcatctctacgagacacagcgcaagtaccacagtgccaaagaggcttatgagcagctgttacagacagaaaatcttcctgcacaggttaaagctaccgtcttgcaacagttagggtggatgcaccacaatatggacttagttggagacaaagcgaccaaggaatcctacgccattcagtacctgcagaagtcattggaagctgaccccaacagtggccaatcttggtattttctgggacgctgctatagctcaataggcaaggtgcaggacgcgtttatatcctatcggcaatcaattgataagtccgaagcctccgcagacacctggtgttctattggagtcctatatcaacaacagaaccaacccatggatgccctgcaggcctacatatgcgcagtacagctagaccatgggcatgctgccgcctggatggacctcgggaccctgtacgagtcatgtaaccagccccaggacgctataaagtgttacctgaacgcggctcggagcaaaaggtgttctaatactagcactctcgccgcccgtataaaatttctgcaggcccagctctgtaacctgccccagtcaagcctccaaaacaagactaagctgcttcccagcattgaagaagcatggtccctgccaatccccgctgaactcacctctaggcaaggagcaatgaatacagctcagcagaacggctccgacaattggaacggcgggcaaagtttgtctcaccatcccgtgcagcaggtttattctctgtgtctaaccccgcaaaaattacaacatttagagcagctgcgggccaaccgggataatttgaatcccgcacaaaaacatcaactggagcagctggagtcccaatttgtcctgatgcagcaaatgcgccacaaagaggtggcacaagtccgcacaaccggaatacataacggcgccattactgatagttcactacccacgaattccgtgagtaataggcagcctcatggagcattaacccgagtatcctctgtatcccaacctggggttcgacctgcctgcgtggagaagcttctaagcagtggcgccttctcagcgggttgtattccctgcggcacaagtaagatccttggctctacagatacaatcttgctcggttcaaactgtatcgcgggtagtgagtcaaatggcaatgttccgtacctccaacagaacacccacactttacctcataaccatacggacttgaactcatccacagaagaaccttggcgaaagcagttgtccaacagcgcgcaggggttacacaagtcccagagctcatgcctgagtggcccaaacgaagagcagccactgttctctaccgggagtgcccaataccatcaggcgacatccacgggcatcaagaaagcaaatgagcatttaactctgccctcgaactcagtccctcaaggagatgcggatagtcatcttagttgccatactgcgaccagcggcggacagcaaggaattatgttcactaaggagtccaagccttccaagaatcgctccctcgtcccggaaacatcccgccacaccggtgacacttcaaatggctgcgccgacgtcaaaggtttgagcaatcatgtgcaccagttgatcgctgatgccgtttctagccccaatcatggggactccccaaaccttctcattgccgataatccacaactctccgcattgttgatcggaaaagcaaacggcaatgtaggtactggaacctgcgataaagtaaataatattcaccccgcagttcataccaaaacggaccactccgttgcttcgtctccgtctagtgctatttcgactgctaccccgtcccccaagtccactgagcagcgctctattaacagtgttacctccctaaacagcccacacagcggactgcacaccgtcaatggcgaaggcctcggcaaatcgcagagcagcacaaaagtggatctaccacttgcctcccatcgatcaacatctcagatcctcccttccatgtcggtgtcaatctgcccatcttccacagaggtgctcaaggcttgcagaaaccctggcaaaaatgggctgagtaattcttgcatcctgctggataagtgtcccccaccacgccctccgacttctccttatccacctctcccgaaggataagctcaacccgcccacgccctcaatttacctcgagaacaagcgggatgcctttttccccccactccatcagttctgtactaatccaaagaatcctgtcactgtgatcaggggcctggctggagcactaaagctggatctcggcctgtttagcaccaaaactctcgtggaggccaataatgagcacatggtggaggtcagaactcagcttcttcaacccgccgatgagaactgggatcccaccggaacgaaaaagatttggcgctgcgaatctaacaggagccatactacgatagcaaaatacgcccagtaccaagctagcagctttcaggaaagtctgcgggaagaaaatgagaaacggacccagcataaagaccactcagataacgaatcaaccagctccgagaactcgggacgcagacggaaaggaccctttaagaccatcaaattcggaaccaatatcgatctttccgacaataagaaatggaaacttcaactccacgaattaacaaagctgcccgcatttgctcgggtagttagcgctggaaatttgctgacccacgttggacatactatactaggcatgaataccgtgcagctctacatgaaggtccccggctccaggacacccggccaccaggagaacaacaatttttgttccgtcaacattaatatcggtcccggagactgcgaatggttcgtcgtccctgaggattattggggcgtgcttaacgatttttgcgagaaaaacaacctcaatttcctaatgagctcctggtggcccaacctggaggacctttacgaggccaatgttcctgtgtatcgtttcatccagaggcctggcgatttggtctggatcaacgcaggaaccgttcactgggtgcaggccgtggggtggtgtaacaatatagcgtggaatgttggccccctcacagcctgtcagtataaactcgctgttgaaagatacgaatggaacaaacttaagagtgtcaagagccctgtgccaatggtgcatctctcctggaatatggctcggaacattaaagtttcagatcccaaattattcgagatgatcaaatactgtctcctgaaaatcttgaaacagtaccaaacattacgggaggctctggtggctgcaggcaaggaagtgatctggcacggacggaccaatgatgaacctgcccattactgcagcatatgcgaagtggaagtttttaaccttctgttcgtaacaaacgaatcaaacactcagaaaacatacatcgtccactgccacgattgcgctcggaagacgagcaagtcactggagaactttgtggtgctcgaacaatataaaatggaggatcttattcaggtgtacgaccagtttaccctcgcactctccctgtctagtagctcctag

SEQ ID NO: 210708 - DNA, 3636 bp, synthetic construct
  misc_feature 1..3636: note = Description of Artificial Sequence: Synthetic coding sequence
  source 1..3636: mol_type = other DNA
atgaagagctgcgccgtgagcctgaccaccgccgccgtggccttcggggatgaggccaagaaaatggcagaaggtaaggcgtcccgggagagcgaggaagagtctgtgtctctcaccgtcgaagagcgggaggccttggggggcatggacagcaggcttttcgggttcgtgcggctgcatgaggacggcgcgaggacgaagaccctcctgggaaaagccgtgcggtgttatgaatctctgatcttgaaagcagaagggaaggtcgaatctgacttcttctgccagttgggacactttaatctcctgctggaagattatagcaaagctctctctgcttatcaaaggtactacagcctgcaggccgattactggaaaaacgccgctttcctatatgggctcggtctggtgtacttttactataatgcctttcactgggccatcaaagcgtttcaggacgtgctttatgtggacccctctttctgccgagccaaagagatccacttaagattggggttgatgttcaaagttaacaccgactacaaaagttccctcaagcattttcaactggccctcattgattgcaatccttgcacattatcgaacgctgagatccaatttcacattgcccatctgtatgagacccagcgaaaatatcacagtgccaaggaggcttatgaacagctcctccagaccgaaaatctgccagcacaggtgaaggctactgtgctccagcagctggggtggatgcaccacaatatggacctcgtgggtgataaggcaactaaggagagctacgcaatccagtacctgcagaagagcctggaagccgatcccaatagcggtcaaagctggtattttcttggccgctgctactccagcatcggaaaagtccaggatgcctttatttcctatcggcagtccatcgataagagcgaagctagcgcagatacatggtgctcgatcggcgtgctctatcagcagcagaaccagccaatggatgccctacaagcatacatttgcgccgtgcagttagatcatggtcatgcagcagcatggatggacttaggcaccctttacgagtcatgtaaccaaccccaagatgccattaagtgctacttgaacgcagcgcgtagcaagcgctgtagcaacacatccaccctagccgcaaggataaagttcctgcaggcacagctgtgtaatctgccacagagcagtctccagaacaaaactaaattgctcccatccatagaagaggcctggagcctccccatacccgcggaactcacgagtcggcaaggtgctatgaacacagcccaacaaaacgggagcgacaattggaacggggggcagtcattgtcacaccacccagtccagcaggtgtacagcttatgtttgacccctcagaaactgcagcacctggaacagctgagagcaaaccgggataatctgaacccagcgcagaagcatcagctcgagcagctcgagtcccagtttgtactcatgcagcagatgagacacaaagaagtagcacagggactacataagagtcagtcatcatgtctgtcaggccccaacgaggaacagccactgttcagtacaggcagcgcgcagtatcatcaggcaacaagcaccgggatcaagaaagccaatgaacacctgactctgccaagcaattccgtaccccagggggacgcagatagccatctctcatgccatactgccactagtggcgggcaacagggcatcatgtttaccaaagaaagtaaaccatccaaaaatcgctccctcgtgccagaaaccagcagacatactggcgatacaagcaacgggtgcgccgatgtgaaaggcttaagcaaccacgtgcaccaactcatagccgacgcagtctcctctcccaatcatggcgattccccaaatttgctgatcgcggacaacccccagctgtctgcactgctgatcggaaaggcaaacggtaacgtgggaaccggcacgtgcgataaggtgaacaatatccacccggccgtgcacaccaaaactgaccattctgtcgcatcaagtccgagcagtgctattagcacagcaacacctagcccaaagagcaccgagcagcggtctataaatagtgtaacttccttaaacagtcctcactcagggttgcacacagtgaacggagaaggtctgggtaaatcacagtcctccaccaaggttgatctgcccctggcatcacaccgcagcactagccagatattgccaagcatgtcagtgagtatctgtccaagtagtaccgaggtgctgaaggcttgccggaatcccgggaagaacgggttatcaaactcctgtatcctgcttgataagtgtccgcccccgaggccacctacttccccataccctcccttgcccaaggacaagttgaatccccctaccccctctatctacctggaaaacaaaagggacgcatttttcccccccttgcatcagttttgtactaatccaaaaaacccagtcacagtgatccgaggactggccggggctcttaagctcgatctgggcctattcagtaccaagaccttggtcgaggctaataacgagcacatggtggaggtcagaacccagctgctgcagcccgctgacgaaaactgggaccccacgggcactaaaaagatatggcggtgtgaatccaatcgaagccataccacaattgcgaagtacgcacagtatcaagcatcttcgttccaggaaagtcttagggaggagaacgagaagcgcacccagcacaaagaccattcagataacgaatcaaccagcagtgagaacagcgggcgccggcgcaaagggccattcaagactattaaattcggtaccaatatcgaccttagcgacaataagaagtggaagttacagctgcatgagctgacaaaactaccagctttcgcgcgggtggtgtctgcgggaaacttgctcacccatgtgggacacaccatactggggatgaataccgtgcagctgtatatgaaagtcccaggatcccgcactcctgggcatcaagagaacaacaacttttgtagtgtgaacattaacattgggcccggcgactgcgaatggttcgtggttccagaggattactggggagtactgaacgacttctgtgagaagaataatttgaacttccttatgtcatcatggtggcctaatttggaggacctctatgaggccaacgtgcctgtctaccgcttcatacagaggcccggggatctcgtgtggattaatgctggcaccgtacactgggttcaggccgtcgggtggtgcaataacatcgcctggaatgtgggccccctaaccgcctgtcagtacaaactcgccgttgagaggtatgagtggaacaaactcaagagtgtgaaaagccccgtgcctatggttcacctcagctggaacatggctcgcaacataaaagtgtccgaccccaagctgtttgaaatgattaagtattgcctgctgaagattttgaaacagtaccagacgctgagagaagctctggtggccgcaggcaaggaagtgatctggcatggtcgcacaaacgatgagcccgcgcattactgcagtatatgcgaggccctgagcctgtcctccagtagctag

SEQ ID NO: 210709 - DNA, 3141 bp, synthetic construct
  misc_feature 1..3141: note = Description of Artificial Sequence: Synthetic coding sequence
  source 1..3141: mol_type = other DNA
atgaagagctgcgccgtgagcctgaccaccgccgccgtggccttcggggatgaggcaaagaaaatggcagagggaaaggcttcacgggagtcagaggaagaatcagtctcattaaccgttgaagaacgtgaagcgcttgggggtatggattctaggctgttcgggttcgtgcgattacacgaggatggagcacgtactaagacccttcttggcaaggcagtgagatgctatgagtcattgatacttaaggccgaggggaaagtggagtccgatttcttttgccagcttggtcattttaatttgctgttggaagattatagcaaggccctgtccgcttaccagcgatattacagtttacaagcggactattggaagaatgctgcttttctgtacggcctgggtcttgtatacttctactacaacgcctttcattgggccatcaaagcctttcaggatgtgctgtacgtcgatccctccttctgcagggctaaagagatccacttaaggctcgggcttatgtttaaagtaaacaccgattacaaatccagcctgaagcattttcagcttgctctgattgattgcaacccatgcactctttctaatgcagaaattcaatttcatatcgctcacctgtatgagacccagaggaagtatcattcagccaaggaggcctacgagcagcttctgcagactgaaaacctgcctgctcaggtgaaggctactgtacttcagcagctgggttggatgcaccacaacatggacctggtgggagataaagcaaccaaggaatcctatgccattcagtacctgcagaagtctctggaagcggatccgaattcgggccagtcctggtatttcttggggagcgtgctatatcagcagcagaaccaaccaatggacgctctccaagcctacatttgcgcggtccagctggatcacgggcatgcagctgcatggatggatctgggcaccctgtatgagtcttgcaatcaaccccaggatgcaatcaaatgctatcttaatgctgcaagatccaagaggtgttctaataccagtactctagctgcacggatcaaatttctccagaatggctcagacaattggaatggcggtcagagcctctcccaccatccagtacaacaggtttattccctgtgcctgactcctcagaagctgcagcatttagagcaacttagggccaatagggacaacctgaatccagcccagaagcatcagctcgagcagctggagagccagttcgttctgatgcaacagatgagacacaaggaagtggctcaggtgagaacaactggcatccataacggggcaatcacagacagtagtttacccaccaactcagtgagtaaccgacagcctcacggagctcttacgagggtgagcagtgtgtctcagcctggcgtcaggccagcttgcgttgagaagctgctttctagcggcgccttctctgccggctgtataccctgcggcacgtccaagattctgggctcaacggatacaattcttttggggagtaactgtatagctggcagtgagtccaacggcaatgtcccatatctgcagcagaatacccatactttgccacacaaccacacagatttaaactcatctaccgaagagccgtggcggaaacagctgtctaattctgcgcaaggattgcacaaatctcagtcatcttgcctgtcgggcccaaacgaggaacagccacttttctctactggatcggcccagtatcaccaggctacatctacggggatcaaaaaggccaatgagcacttaaccctcccatcaaacagtgtgccccagggcgatgccgacagccacctgtcatgtcatactgcaaccagcggcggccagcaaggaattatgttcactaaggagtcgaagccctctaagaatcgcagcctcgtcccagagacgagtcgacacacaggcgacacaagtaacggatgcgcggacgtgaaagggctgtccaatcacgttcatcagctcatagcagacgccgtgtcaagtcctaaccatggtgactctccgaacctgttgatcgcagataacccccagcttagcgccttgctgattgggaaggctaatggtaatgttggcactggaacttgcgacaaagtcaataatatccatcccgctgttcacacgaagactgaccattctgtagcatcctcccctagctccgcaatcagtacggcaactcccagcccaaagtctaccgaacagcggtcaatcaactccgttaccagcctcaactcccctcactctgggctgcatacagttaacggcgagggcctcgggaaatcccagtcatccactaaagtagacttgccactggcttcacataggtccacttcccagatcctgccttcaatgtccgtttccatatgcccgtccagcactgaagtgttgaaggcttgcagaaatcccggcaaaaatgggttgagcaactcctgtatcctgctagacaagtgtccccctcctcggcccccgaccagcccgtacccgcccctcccaaaagacaagctgaaccctccaacacctagtatctacctggagaacaaacgcgacgccttttttccacctctgcatcagttctgtaccaatcccaagaaccccgtcacagtgatcagagggctcgccggtgcgctgaagttagatctgggacttttcagtacgaagaccttggtggaagcaaataacgaacacatggtagaggtgagaactcagctgttgcagcccgctgacgaaaactgggaccccaccggcactaaaaaaatctggcgctgcgagtcaaacaggagccataccactattgccaagtatgcgcaataccaagcatcgagtttccaggaaagtctgagggctggtatgcagtggtgcgacctgagtagcttacagccccctccacctggattcaaacggttctcccatttatctttacccaatagttggaattacaggcatctgccttcctgccccacaaacttctgtatcttcgtggaaacgggctttcaccacgttggacaggcctgcctggagctgctgacgtctggtggcctcctcgcaagcgcaagtcagagtgccggtattacaggtgtgtcccaccacgcccgatag

SEQ ID NO: 210710 - DNA, 3018 bp, synthetic construct
  misc_feature 1..3018: note = Description of Artificial Sequence: Synthetic coding sequence
  source 1..3018: mol_type = other DNA
atgaagagctgcgccgtgagcctgaccaccgccgccgtggccttcggagacgaggccaagaagatggcagagggtaaagcaagccgggaatcagaggaggagagtgtgagtttgacggtcgaggagagagaggcgttgggagggatggacagcaggctgttcggcttcgttagattacatgaggacggagcaaggactaagacattgttggggaaagccgtccggtgctatgagtcgcttattctgaaagcagagggaaaagtagagagtgattttttctgccaactcggacatttcaatctcttgcttgaggactatagcaaggcattgagtgcataccagcggtactactccctgcaagctgactactggaagaacgccgcctttctgtacggcctgggcctagtttatttctattataacgccttccactgggccatcaaggctttccaggatgtactgtacgtggacccaagcttctgtagagcaaaggaaatccatctgaggctgggcctaatgtttaaagtgaatacagactataaatctagcctaaagcatttccaactggctctgattgattgcaacccctgcaccttatctaatgccgagatacaatttcatatcgcacatctctatgagactcagcgtaagtatcacagcgccaaggaggcatatgagcaactgctccagaccgagaatctacctgctcaggtgaaggccactgtgctgcagcagctgggttggatgcatcacaacatggatttggtgggagacaaggcgaccaaagaatcttacgcaatccagtatttgcagaaatctttggaggctgaccctaacagcggacagagttggtactttctggggagcgtcctgtaccaacagcagaatcaacctatggacgctcttcaagcatacatctgcgccgttcagctggaccatggccacgctgcagcttggatggatcttgggaccctgtatgagagttgtaaccagccgcaggacgcaattaagtgttacctaaatgcggcccgcagtaaacgctgctcaaatacttcaacgctggcagccaggatcaaattcttgcagcaatcattatcactacatatgatcacctccagccaagtagaggggctctcgtcccccgcaaagaagaagcgtacttcctccccgaccaagaacggctctgacaattggaacggcggtcaaagtctctcccatcaccctgtgcaacaggtgtacagtctgtgcttaactcctcaaaagttgcagcacctggaacagcttcgagcaaatcgcgataacctgaatcctgcccagaaacaccagctcgaacaactggagtctcaatttgttctaatgcagcagatgcgccacaaagaggtggctcaggtacgcacaaccgggatccacaatggtgccatcacagacagttcactcccaacaaactctgtgagcaacagacagccgcatggcgcactgacgcgggtgagcagtgtgtcccagccaggtgtgcgtcctgcttgtgtggaaaaattgctttcttccggcgctttttccgcggggtgtatcccctgcgggacaagcaagattctcggcagcaccgacaccatcttactcgggagcaattgcattgctgggagtgaatcgaacgggaacgtgccgtatttgcaacagaacacacacacactgcctcataaccacaccgacttgaactcatctacggaagagccttggcgtaaacagctgtccaactctgcacagggtctgcacaagtcacagtcttcttgtctgtccgggccaaacgaagagcaacctctgttcagtaccggctctgctcagtaccaccaggctacctccacaggcataaaaaaggccaacgagcacctgaccctgcccagtaacagtgtcccccaaggagacgctgactcccacttgtcatgccacactgccacatccggcggccagcagggcatcatgtttaccaaagaatccaagccctcaaaaaatcgctccctggtgcccgagacgagtcgccatacaggcgacacctcaaatggctgtgccgacgtcaagggcctttccaaccacgtgcaccagctaatagctgacgcggtcagcagtccaaaccacggagattcccctaatctcctcatagcagacaacccacagctgagcgccttgctaatcgggaaagcaaatggtaatgtaggcaccggcacatgcgacaaggtaaacaatatccatcctgctgtgcataccaaaactgatcactcagtcgcaagctcaccaagttccgccatctctacggccacccccagtcctaagagtacggagcagcgctccataaactctgttacgagcctaaacagtccacattctggactgcacacggttaatggagaagggctgggaaaatctcagtcctccacaaaggtggatcttccccttgccagtcatcggtcaacaagtcaaatcctgccttcaatgagcgtgtctatctgtccctcaagtacagaagtcttaaaagcatgccggaatcctggaaaaaacggtctgtcaaatagctgcattcttctggataagtgtcctcctccacggccacccacttccccatatccccctttaccaaaggacaagttgaatccgcctactcccagcatctatttagaaaataaacgcgatgcattctttcctcctctgcaccaattctgcacgaaccctaaaaatcccgtgacagttatccgtggccttgccggggcactgaaattggatcttggtctgttcagcaccaagacactggttgaggctaacaatgagcacatggtagaagtacgtacacagttgctgcagcccgccgacgaaaactgggacccaactgggaccaagaaaatttggcgctgtgaatctaataggtctcacaccaccatcgccaagtacgcacagtaccaggccagtagttttcaagagtctctacgatccctaatcctcagtcatcctggatggaacgcaatggtctag

SEQ ID NO: 210711 - DNA, 3213 bp, synthetic construct
  misc_feature 1..3213: note = Description of Artificial Sequence: Synthetic coding sequence
  source 1..3213: mol_type = other DNA
atgaagagctgcgccgtgagcctgaccaccgccgccgtggccttcggtgacgaggcaaagaaaatggcagagggtaaggctagcagggaatctgaggaagagtccgtgagtttaaccgtcgaagagagggaagccctgggggggatggactctcgtctcttcggcttcgtgcggctgcacgaagatggtgctcgtaccaagacattactcggcaaagccgtgcgttgttacgaatcactgatccttaaggccgaaggcaaggtggaaagcgattttttttgccagctgggtcacttcaatctgcttctcgaggattactctaaagctttgagcgcctaccagcgatactattctctacaagcagattattggaaaaacgctgcgttcctttatggcctgggcctggtgtatttttactataacgcctttcactgggctatcaaagcctttcaagatgtgctctatgttgacccctccttttgccgtgcaaaggaaattcatctacgactagggctcatgttcaaggtgaatacagactataagtcttccctcaagcatttccaattggctctgatcgattgcaatccgtgcacactgagtaatgctgaaattcagtttcatatcgcccacctctacgaaacacagcgcaaatatcatagcgctaaggaagcatacgaacagctgctgcaaaccgaaaatctgccagcgcaagtgaaagccacagtccttcagcaactggggtggatgcatcacaacatggatctcgtcggcgataaggccacaaaagagtcttatgctatccaatatcttcagaagtctctggaagctgatcctaattccgggcagagttggtattttctcggccggtgctatagctctattggtaaggtgcaagatgcattcatatcctatcgtcaatccattgataagtccgaagcctcagcagatacctggtgtagtattggtgttctctaccagcaacaaaatcagccaatggacgcactccaagcttacatttgcgccgtgcaactcgatcatggacacgcagcagcttggatggaccttggaacactgtatgaatcttgcaatcagccccaagatgccattaagtgctacttaaacgcagcccggtctaaaagatgtagcaatacatcaacattagccgcacgcatcaaattcctacaggcccagctctgtaatctcccccagtctagcctgcagaataagacgaagctgctaccctcaattgaagaggcttggtcactgccaattcctgctgagcttaccagcaggcagggggcgatgaacaccgcccagcagcagtcactgtccttgcatatgatcaccagcagccaggtggagggactcagctccccagctaaaaagaagaggacaagctctcccactaagaacggtagtgataattggaatggtggccagtcactctcacatcatcctgtgcaacaggtgtattctttgtgcctgactccacaaaagctacagcatctcgagcagttacgcgccaatcgcgataaccttaaccccgcccagaaacaccagttagagcagttagaatctcagtttgtgctgatgcagcagatgcgacacaaagaggttgcccaggtgagaacgacggggatccataatggagcaatcacagacagcagtctgcccactaattctgtatccaaccgacagccacacggggcattaactcgggtaagtagcgtaagtcaacccggtgtgcggccagcatgcgtcgagaaactccttagctcaggagctttcagcgcaggctgcattccttgcggtacatcaaaaatccttggttcgactgatacgatcctgttgggctccaattgcatcgcgggatccgagagtaacgggaacgtgccctacctccagcagaatacccacactctgccgcacaatcataccgatcttaattcctccacagaggagccttggagaaagcaactcagcaattccgcacagggcctccataagagtcagagtagctgtctgtcagggcccaatgaagagcagcctttgttttctaccggctcggcccaatatcaccaggccacatcgaccggcatcaagaaggctaatgaacacttaacacttccctcgaattccgttccgcagggagatgcagattcccacctcagttgccacactgcaacatccggcggacagcagggaattatgttcactaaagagtctaagccatccaagaatagatcccttgtgccagagacgtcccgccatactggcgacacatctaatggctgcgccgacgtgaagggcctgtctaatcatgtgcatcagttgatagccgacgcagttagctctcccaaccatggggatagcccaaatttgctgatcgctgacaacccccagttatcagccctgctgattggcaaagccaatggcaacgttggcacaggcacatgcgataaagtaaataacatccatccagcagtgcatactaagactgatcacagcgtggcgtcttccccgagttcagccattagcaccgcaacaccaagcccaaagagtactgagcagaggtccatcaattcggttacaagccttaattccccacacagcggtctgcatacagtgaacggggaaggcttggggaaatcacagagtagcaccaaggtcgatctccccttagcctctcaccgatcaacgtcgcagatacttccgtctatgtctgtctctatttgcccatcaagcactgaggtgctgaaggcatgtagaaaccccggaaagaacggactgtccaactcttgtattctgctcgataagtgcccccctccgaggccaccaacgagcccttaccctccactgcccaaagacaagttgaatccacctacccccagcatctatttagagaataagagagatgcatttttcccgcctttgcaccagttctgtaccaatccgaagaatcccgtgactgtgatcaggggcctcgccggtgccctaaagcttgacctaggcctgttcagtaccaaaacactggttgaagctaacaatgagcatatggtggaggtcagaacccagctgttgcaacccgccgacgagaattgggatcctacaggcacaaagaagatctggaggtgcgagagcaaccgatcacatacaactatcgccaagtacgcacagtaccaggccagctccttccaggagagcttgcggtag

SEQ ID NO: 210712 - DNA, 798 bp, synthetic construct
  misc_feature 1..798: note = Description of Artificial Sequence: Synthetic coding sequence
  source 1..798: mol_type = other DNA
atgcccaacatggtgttcatcggcggcatcaactgcaagaagcggaaggatctgtctcaggaatttgaggcttatatcaatgcatccggcgagcatggcatcgtagtgttttccttgggaagcatggttagcgaaatcccagagaagaaggccatggccatcgctgacgcactgggcaagatcccccagacagtgttatggcgttacacaggaacaagaccttcaaatctggccaataataccattctggtaaagtggttgccgcaaaacgacctgttaggacacccaatgactcgtgcctttataacgcacgcaggatcacatggagtttatgagtctatctgcaatggcgtgccaatggtaatgatgccgctcttcggcgatcaaatggataacgccaaacggatggaaacaaaaggtgcgggggtcacactcaacgttctagagatgaccagtgaagacctcgaaaacgcactgaaagccgtgatcaatgacaaatcctacaaagagaatatcatgcgactctcgtccctgcacaaagatcgccccgtcgagcctctagatctggccgtgttctgggtggaattcgtgatgaggcacaaaggggcgcctcacctgcggccagccgcgcatgatcttacttggtaccagtaccacagcctggacgtcattggatttttactggcagtggtgctgacagttgcattcattacatttaagtgctgtgcatatggatacaggaaatgtctgggcaagaagggcagggttaagaaggcccataaatctaagactcactag

SEQ ID NO: 210713 - DNA, 1605 bp, synthetic construct
  misc_feature 1..1605: note = Description of Artificial Sequence: Synthetic coding sequence
  source 1..1605: mol_type = other DNA
atggccaccggcctgcaggtgcccctgccccagctggccaccggccttctgctgctgcttagtgtccagccatgggctgaatcagggaaggtcctggtcgtgcctacagacgggagccactggttaagcatgagggaggcgctgcgagacttgcatgcccgtggccaccaggtggttgtgctcaccctagaggtgaacatgtatatcaaagaggagaatttcttcacgctcactacttatgccatctcttggacacaggacgaatttgaccggctgctgttgggtcacactcaatctttcttcgagactgagcacctgctcatgaagtttagtcgccgtatggcaattatgaataacatgagcctcatcattcataggtcctgcgtggagctgcttcataatgaagccctgattcgccacctgcatgctaccagttttgatgtggtgttgaccgacccctttcatctttgtgcagctgtgttggccaaatacctaagtatccccgccgtgttctttcttcgaaatattccctgtgacttggactttaaggggacgcagtgtccgaaccctagctcatacatccctcgactgttgaccacaaattctgaccatatgacatttttgcagagggttaagaacatgttgtatcccctggcgttgagctatctgtgtcatgccgttagcgcaccatatgcttccctggcttctgagctctttcagcgggaagtcagcgttgtggatttagtttcccacgcttccgtgtggctgttccggggcgattttgtgatggactacccgcggccgatcatgcccaacatggtgttcattggcggcatcaactgtgccaatggcaagcccttatcacaggagtttgaggcttatatcaatgctagcggagagcacggaatagtagtattctcgcttggctctatggtgtcagagatccctgagaaaaaagctatggccatcgctgacgcccttggcaagattcctcaaaccgtcctctggcgttacaccgggacaaggccatccaacctggcaaataatacaatccttgtcaaatggctcccacaaaatgacctgctggggcaccccatgactcgggcctttatcacacacgccggtagccacggagtgtatgagtctatatgcaacggggtgccaatggttatgatgcccttattcggcgatcagatggataatgcgaagcgtatggaaacaaagggcgccggtgtgaccttaaatgtactggagatgaccagtgaagacctggagaatgcactgaaggccgtgatcaatgataagtcatacaaagagaacatcatgagattgagtagccttcataaggacaggcccgtggagcccctggacctcgctgtgttttgggtggaattcgtaatgcggcacaaaggagctcctcatctgcgcccggccgcccacgacctaacttggtaccagtatcatagcctggatgtgatcggcttcctcctggctgtggtcttaacagtggcttttatcacatttaaatgttgcgcatatgggtacaggaaatgtctgggcaagaagggacgcgtgaagaaggcacacaagagtaaaacccactag

SEQ ID NO: 210714 - DNA, 1599 bp, synthetic construct
  misc_feature 1..1599: note = Description of Artificial Sequence: Synthetic coding sequence
  source 1..1599: mol_type = other DNA
atggcctgcctgctgcggagcttccagcggatcagcgccggcgtgttcttcctcgccctttgggggatggtcgtaggcgataaactgctggttgtgccccaggacggctcccactggttatcaatgaaagacatcgtagaagtcttatctgaccgtggccacgagattgtagtggtcgtccccgaagttaaccttctactgaaggagtcaaagtactacaccaggaaaatctaccccgtgccgtatgatcaggaggagctgaagaaccggtaccagagtttcggaaataatcacttcgcggaacggtcctttctgacagctccccaaaccgagtaccgtaataacatgatcgtcataggcctctacttcattaattgccagtctttgctacaggaccgggataccttaaatttcttcaaggaatccaaatttgatgctctcttcacagatccagcactgccctgtggagttattcttgccgaatatttgggcctgccaagtgtatacctgttccggggcttcccgtgttcccttgaacataccttctcccgctcccccgatcccgtgagctacataccaagatgttatactaaattctctgatcatatgacctttagccagcgagtagctaacttcctcgtcaacctgttggaaccatacctgttttactgtctgtttagcaagtacgaggagctcgcatccgccgtgctaaagcgagacgtagatatcattacgctgtaccagaaagttagcgtttggctgcttcggtatgacttcgtgctggaatatccacggccggtcatgcccaacatggtatttatcggagggattaactgcaagaaaagaaaggacctgtctcaggaatttgaggcgtatataaacgcctctggagagcatggaatcgttgttttctccctgggatctatggtttctgagattcctgaaaaaaaagccatggccattgctgatgccctgggtaagattcctcaaacagtactgtggcggtatactggcacccggccctcaaacctagccaacaatacaattctcgtcaagtggctcccccagaacgaccttctggggcacccaatgaccagagctttcatcacacatgccggaagccacggtgtgtacgaatctatatgtaatggcgtccccatggtgatgatgcccctcttcggggaccagatggacaacgccaaacgcatggagaccaaaggcgccggtgtgaccctgaacgtgctggaaatgacttccgaggacctggagaatgcactgaaggcggtcatcaacgacaagagctacaaggaaaacatcatgcggctttccagcctgcacaaggataggcctgtggagcctctagacctcgctgtattttgggtggaattcgtaatgcggcacaagggagccccacacctccggccagctgcccatgacctgacctggtaccagtaccacagcctcgacgtcatcggtttcctccttgccgtggtcctgaccgttgcctttattaccttcaaatgttgcgcgtatggttaccgaaagtgcttgggcaagaaggggagagtgaaaaaggctcataaatccaagacccattag

SEQ ID NO: 210715 - DNA, 570 bp, synthetic construct
  misc_feature 1..570: note = Description of Artificial Sequence: Synthetic coding sequence
  source 1..570: mol_type = other DNA
atggcctgcctgctgcggagcttccagcggatcagcgccggcgtgttcttcctcgctctttggggtatggtcgtgggcgataaactgctcgttgtgcctcaggacggtagccactggctcagcatgaaagacatagtggaggtgctctcagacagaggacacgagatagtggtggttgtgccggaagtgaatctgctcctgaaggagagtaaatactacacacgcaagatctaccctgtcccctacgatcaggaggagctgaagaatcgctaccagagctttggcaataatcacttcgcggagcgctcttttcttacagcccctcagactgagtataggaacaatatgatagtaatagggttgtactttatcaattgccagagtctccttcaggacagagacactctcaatttcttcaaagagtccaaattcgatgccctatttaccgatccagccctcccctgtggggtgattctagctgaatatctgggtctgcccagcgtgtatttattcagggggttcccatgctcactcgaacacacctttagcagatccccggacccagtctag

SEQ ID NO: 210716 - DNA, 1593 bp, synthetic construct
  misc_feature 1..1593: note = Description of Artificial Sequence: Synthetic coding sequence
  source 1..1593: mol_type = other DNA
atggcccgggccggctggaccggcctgctgcccctgtacgtgtgcctactgctgacctgtggctttgccaaggccggcaagctcctggtggtgcccatggatggctcccattggttcaccatgcaatccgtggtggagaaactgatcctgaggggccatgaggtggtagttgtaatgcctgaagttagctggcagttgggccgatcattaaattgtacagtgaaaacttatagcactagttacactttggaggaccaggacagagaattcatggttttcgcagacgctcgctggacagcacccctgcgttcagcattctctttgcttacctcttcctctaacggcatcttcgatttgtttttcagtaactgtcggtccttatttaacgatcgcaaactggtggaatatttaaaagagtcctgtttcgacgccgtcttcctggaccctttcgacgcatgcggcttgatcgtcgctaagtacttttcactgccctcagtcgtgttcgctcgagggattttctgccactacctcgaggagggtgctcagtgccccgccccactaagttatgtgccgcgtctgttgctgggattctcagatgccatgacctttaaggagcgagtttggaatcacattatgcatctcgaggagcacttattctgtccgtattttttcaagaatgttcttgaaatcgcttctgagatactgcagacaccggtcactgcatatgatttgtattcccatacgtccatttggctcttgcgaacagactttgtgctcgagtacccgaagcccgtcatgcctaatatgatattcattggtggtattaactgtcaccagggtaaaccagtacccatggagtttgaggcgtatattaacgcttctggggagcatggcatcgtcgttttctccttggggtccatggtgtctgaaatcccagagaaaaaagccatggccatcgccgacgctctaggaaagatcccgcaaacagtcctgtggaggtacactggcacacgcccatcaaatctggcgaataacacaattctggtcaagtggctgccacaaaacgatctcctgggccaccctatgacccgggctttcatcacccatgcaggatctcacggtgtttatgagtctatctgtaacggggtcccaatggtgatgatgcccctgttcggcgatcaaatggataacgccaaacggatggagaccaagggggccggtgttacactgaacgtcctggaaatgacatcagaagacctggagaacgccctaaaagccgtgattaacgacaaaagctataaagagaatatcatgagacttagcagtctccacaaggaccgacccgtggaacccctggatctcgccgtgttctgggtagagttcgtcatgcgtcacaaaggggccccccacttacggccggccgcacatgatctcacgtggtatcaatatcattcactcgacgtgatcggcttcctcttggctgtcgtactgactgtcgccttcattacatttaaatgttgtgcctacggctaccggaagtgcctgggtaaaaagggacgggtaaagaaagcccacaagtcgaagacgcactag

SEQ ID NO: 210717 - DNA, 1593 bp, synthetic construct
  misc_feature 1..1593: note = Description of Artificial Sequence: Synthetic coding sequence
  source 1..1593: mol_type = other DNA
atggcccggaccggctggaccagccccatccccctgtgcgtgagcctgctgctgacatgtggttttgccgaagcaggtaagctgcttgtggtccctatggacggatctcactggtttacaatgcaaagtgtggtggagaagcttatcctgagaggtcacgaggttgtcgttgtcatgcctgaagtgagttggcaactgggcaagtctctgaattgtaccgtgaagacctatagcacctcatatactctggaagacttagatcgcgagtttatggatttcgccgatgctcagtggaaggcccaggtacgaagcttattcagcctctttctcagttctagtaatggcttctttaatctgttcttcagccattgccgttcccttttcaatgatcgaaagctcgttgaatacctcaaggagagttcattcgacgcagtctttctggacccctttgatgcttgcggcctcatagtcgccaagtacttcagcttgccttccgtggtgttcgcacgcggcattgcatgccactatcttgaagaaggggctcaatgtccagcacctcttagttacgtccccaggattctgctcgggttctctgacgcgatgacattcaaagaacgcgttcgtaatcatattatgcacctagaggagcacttgttttgtcaatatttctctaagaacgcccttgagattgctagcgagattctgcagactccagtgaccgcatacgacctgtactctcacacctctatctggctactaagaactgacttcgtcctcgattatcccaaaccagtcatgccaaatatgatttttattggcggcattaattgccatcaaggcaagcctcttcctatggaatttgaagcctacatcaacgcctccggggaacacggcatagtggtgtttagccttggaagcatggtgtcagaaattccagagaagaaagccatggctatcgctgacgcattaggaaagattccacaaaccgtcctgtggaggtatacaggcacacggcccagcaacctggcgaacaatacaatcttggtaaaatggctgcctcagaatgatctcctaggacaccctatgacgcgtgctttcatcacacacgctggctcccatggcgtgtatgagtccatttgcaacggtgtacctatggtcatgatgcccctattcggtgatcagatggataatgccaagcggatggagactaaaggagcaggcgtgacccttaatgttcttgagatgacgtcagaggacctcgagaacgctttgaaggcggtgatcaacgacaagagctacaaagaaaacattatgagactttccagtctccataaggacagacctgtggaacctctcgacctggcagtgttttgggtcgaatttgtgatgagacacaagggcgcaccccacctgaggcctgctgctcacgacttgacttggtaccagtatcactcactggacgtcatcgggttcctactggctgtggtgctaaccgtcgcattcatcacctttaaatgctgtgcgtacggttaccgcaagtgtctggggaagaagggacgagtgaagaaagcccacaaatccaagacccactag

SEQ ID NO: 210718 - DNA, 1593 bp, synthetic construct
  misc_feature 1..1593: note = Description of Artificial Sequence: Synthetic coding sequence
  source 1..1593: mol_type = other DNA
atggcctgcaccggctggaccagccccctgcccctgtgcgtgtgcttgctcttgacctgcggctttgcggaagccgggaagctcctggtcgttccgatggacggctctcattggttcacaatgcgatccgtggtggagaaattgattcttcggggtcacgaggtggttgtggtcatgcctgaagtgagctggcagttagggcgaagccttaactgtacagtgaaaacttactctacctcctatacactggaggacctggaccgggagtttaaagcctttgcccatgcacagtggaaggctcaagtccgctctatatattcattgctgatgggatcgtacaacgacatcttcgacttgttctttagtaattgcaggtctctgtttaaggacaagaagctcgtggagtacctgaaagagtccagtttcgacgcagttttcctggatcctttcgacaattgtggattgatcgtcgcgaagtacttctccctacccagcgtggtgtttgcgaggggcatcttgtgtcattacttagaagaaggagctcagtgcccagcccccctctcttacgttcctagaattttgcttggctttagcgatgcaatgactttcaaggaacgcgtgcggaatcacatcatgcacctcgaagagcacctgctgtgtcaccgcttttttaaaaatgccttggagattgcctcggagatcctacagacccctgtgactgaatacgatctgtacagccatacctcgatctggctgcttcggacggatttcgttcttgattatcccaagcccgtgatgccaaacatgattttcatcgggggaattaattgccaccaaggcaaacctctccccatggagttcgaggcatacattaacgctagtggagagcatggcatagtggtgttcagtctgggctcgatggtgtccgagatccctgagaaaaaggctatggctatagccgacgcactcggtaaaataccacagacagtgctctggagatacacaggtacccgaccatctaacttggctaataacaccatccttgtcaagtggctgcctcaaaacgacttgctcggacaccctatgacccgagccttcatcacgcatgctggttcccacggggtgtatgagtccatctgcaacggggtccctatggtcatgatgcccctttttggggaccagatggataatgccaagagaatggagacaaaaggcgccggagtgacactgaatgtcttggagatgacatcagaagacctcgagaatgccctgaaagctgtgattaatgataaatcttacaaagagaacattatgcggctgtcctccctgcacaaagatcgccctgtcgagcccttggacctggctgtcttctgggttgaatttgtgatgaggcataaaggcgctccacacctacgccccgccgcccatgacctgacgtggtaccaataccattccctcgacgtgatcggattcttgcttgcagtggtcttaaccgtcgccttcataaccttcaagtgttgcgcatacggatataggaagtgtctgggcaaaaaagggcgagtcaagaaagcgcacaagtcaaaaacacattag

SEQ ID NO: 210719 - DNA, 1584 bp, synthetic construct
  misc_feature 1..1584: note = Description of Artificial Sequence: Synthetic coding sequence
  source 1..1584: mol_type = other DNA
atgctgaacaacctgctgctgttcagcctgcagatcagcctgatcgggaccacactgggcgggaatgtattaatatggcccatggaaggttcccactggcttaacgtgaagattatcatcgatgagcttataaagaaggaacataatgtgactgtcctggttgcttctggggcattgttcatcacgcccactagtaatccatctctaacattcgagatctaccgcgttccatttggaaaagagcggatcgagggggtaattaaggactttgtgctgacctggctcgagaatagaccaagcccctcgacaatttggcgtttctatcaggagatggccaaggtaataaaggatttccacatggtttcccaggaaatttgtgatggcgttcttaagaaccagcagctgatggcaaagttgaagaagagcaaattcgaagtactggtatccgatcctgttttcccatgcggggatatcgtggccctgaaactggggatcccctttatgtattctttgagattttcaccggcctccaccgtcgagaaacactgcggcaaagttccttatcctccttcctatgtacctgcagtgctgagtgagctgaccgatcaaatgtcatttaccgaccggatccggaacttcatctcctatcacctccaggattatatgttcgagacactctggaaatcatgggatagctattactcgaaagcgttggggggtctgctcctttgttgcccaggctggtcagccgtagccgatttgggatccctgcagcccctactgccaggcttcaaacgtttcagccgcctcagtctgcattgcagttgggattatcgcctgcccgccggtcgcccgactacattatgtgaaactatgggcaaagctgagatatggctgatcaggacatattgggacttcgagttcccaaggccatatctgcctaactttgagttcgtcgggggcttgcattgcaaacccgccaagcctctgcctaaggtgctatggcgctacaaaggaaagaaacccgcaaccctggggaataacacccagttgtttgactggataccccagaatgatctgttggggcacccaaagaccaaggcctttattacacacggcggcacgaacggaatctatgaggccatttaccacggtgttcccatggtgggagtacctatgtttgcagaccaaccggacaacatcgcccatatgaaggccaagggcgccgccgtagaagttaacctgaatacaatgacgtctgttgatctcctgtccgcccttagaactgtgatcaacgaaccttcatacaaagaaaacgccatgcgcctctctcgtatccatcacgaccagcccgtgaagcctctagacagggcagtgttctggatcgagttcgtcatgcgccataagggtgctaagcatttgcgggtcgcagcacacgatctcacatggttccaataccattcactggatgtcatcggattcttgttagtttgtgtcactaccgccatttttttagtgatacagtgctgtttgttctcgtgtcagaagttcggtaagattgggaagaaaaagaaaagagagtag

SEQ ID NO: 210720 - DNA, 2082 bp, synthetic construct
  misc_feature 1..2082: note = Description of Artificial Sequence: Synthetic coding sequence
  source 1..2082: mol_type = other DNA
atgctgaacaacctgctgctgttcagcctgcagatcagcctgatcggcaccaccctgggcggaaatgtattaatttggcccatggaagggagccactggctcaacgtaaaaattatcatcgatgagttgattaaaaaggaacataatgtgacagtcctggtggcgagcggcgccctgttcattaccccaacctcaaacccatcattaactttcgagatatatcgggtccctttcggcaaggagcggattgagggagtaataaaggatttcgtgctaacctggttggaaaaccgccctagcccctccaccatatggcgcttttatcaggaaatggccaaagtgatcaaagatttccacatggtcagccaagaaatttgtgacggcgtgctcaagaaccagcagctgatggcaaaattgaaaaagtctaagtttgaggttctcgtgtcagatcccgtgtttccttgtggagacatcgtggctctgaagttgggtatccccttcatgtatagcctgaggttcagtcccgcctcaaccgtggaaaaacactgcggtaaagtgccatatcctcctagctatgttccagctgtgctgagtgaactgactgatcagatgtctttcaccgatcgaatacggaacttcataagttaccatctccaggattatatgtttgagacactgtggaaaagctgggacagctactactctaaggctctggacgggtcccattggcttaatatcaagattatactggaggagctgatccagcggaatcataatgtgaccgtgcttgcttcaagcgccactctgttcattaattcaaatcccgactcaccagtgaatttcgaagtcatccccgtgtcttataagaaaagcaatattgatagtttaatagagcatatgattatgctgtggatcgaccaccggccaactccactgacaatttgggctttttataaggaattggggaaattgctagataccttcttccagattaacattcagctgtgcgacggcgtcctcaagaaccccaagctgatggcccgactgcagaaaggcggcttcgatgtcctcgtcgctgatcctgtgactatttgcggagacctggttgcccttaaactcgggattcctttcatgtacacgctgcgtttctcacctgcaagcaccgtcgaaagacactgtggcaaaatcccagcgcccgtgtcatatgttcccgccgccttgagcgaattgacagatcagatgacctttggagagaggattaagaacacaatcagttactcgctccaagattatatcttccaatcctattggggagaatggaacagctattatagtaagatcctcggacggcccaccacgctgtgcgagaccatgggtaaagcagaaatttggctgattcggacatactgggatttcgaattcccccgcccttacctgcccaatttcgagtttgtgggtggactgcactgtaagccagcaaaacctttgccaaaggttctgtggcgctataagggaaaaaagcctgccaccctgggtaacaacacccagttattcgactggataccacaaaatgacctgctcggacaccccaagactaaggcatttataacacacggcggcactaatggaatttacgaagctatctaccacggcgtgccaatggttggagtgcctatgttcgccgatcagccagataatattgcgcatatgaaggctaagggcgccgccgttgaggtgaatctcaacaccatgactagcgtggatcttctctcagcactcaggactgtaatcaatgaacccagctacaaggaaaatgcaatgaggctgtctcgcatccatcacgaccagccagtcaaacctttggacagggccgtgttctggatcgaattcgtgatgcgtcataaaggcgctaagcatctgagagtcgccgcgcacgatttaacctggttccagtaccatagtctggatgtcataggatttctattagtctgtgtaactaccgctatcttcctggtgatccagtgctgtctcttcagttgccaaaagtttggaaagatcggaaaaaagaagaaaagagagtag

SEQ ID NO: 210721 - DNA, 1611 bp, synthetic construct
  misc_feature 1..1611: note = Description of Artificial Sequence: Synthetic coding sequence
  source 1..1611: mol_type = other DNA
atggtgagcatccgggacttcaccatgcccaagaagttcgtgcagatgttagtgtttaacctgaccctgactgaagttgtccttagcggcaacgtccttatctggccaaccgacggaagtcactggttaaatattaagatcatcttggaggaactaatccagcgaaaccataacgtgaccgtgttagcatccagcgcaacgctgttcatcaatagcaatcccgatagtccagtgaatttcgaggttatccccgtgtcttacaagaaaagtaacatcgatagcttgatagaacacatgattatgctttggatcgatcacaggccaacccctctcaccatatgggctttctacaaagagttggggaagcttctagatacatttttccaaattaatatccaactgtgcgatggcgtgctgaagaatccaaagttaatggcccggctgcagaagggtgggttcgacgtgctggtcgccgatccggtgactatttgtggagacctcgtagccctcaaattaggaatcccgttcatgtataccctgcgcttcagcccagcctcaacggtggaacgtcactgcggcaagatccctgctcccgtgagctatgtcccagcggccctcagcgaactgacagaccaaatgacctttggcgagcgtattaaaaacacaatatcttacagcttgcaagattatatattccaatcttactggggagagtggaatagctactatagcaagatcctgggcaggccgaccaccctttgtgaaaccatgggcaaagccgaaatttggctgattcgtacctattgggattttgagtttccacgcccgtatttgccgaacttcgagttcgtgggggggctccactgtaagcctgcaaagccgctgcctaaggaaatggaggagttcattcagagttctgggaagaacggggttgtagtatttagcctgggctccatggtgaagaatctgacagaggagaaggccaacttgattgcatctgctctggcacagattccccagaaggtgttgtggagatataaggggaaaaaaccagcgaccctcggaaacaacacgcaacttttcgactggattcctcagaacgatttgctcgggcatcctaaaacaaaggcttttattactcacggaggcaccaacggcatctacgaggcaatataccacggggtgcccatggtaggagtcccaatgtttgctgatcaacctgataacatcgcccatatgaaagccaagggagctgcagtggaggttaacctaaacacaatgactagcgtcgatctgctgtctgcacttcgcaccgtgataaacgaaccatcttacaaagaaaacgccatgaggctgagcaggatccaccatgatcaacctgtgaaacccttggatcgggccgtgttttggatcgagtttgtcatgagacataaaggagccaaacacctgcgcgtggcagctcacgatctgacgtggttccagtaccattctctggatgttatcggcttcctgctcgtgtgcgttacgactgccatctttctcgtcatccaatgctgcttgttcagctgccagaagttcggtaagatcggcaaaaaaaaaaagagggaatag

SEQ ID NO: 210722 - DNA, 1584 bp, synthetic construct
  misc_feature 1..1584: note = Description of Artificial Sequence: Synthetic coding sequence
  source 1..1584: mol_type = other DNA
atgctgaacaacctgctgctgttcagcctgcagatcagcctgatcggaacaaccctgggcggcaacgtccttatctggcctatggagggttcccactggctaaacgttaagataattatagacgaactgatcaaaaaagagcacaacgtcacggtgctcgtcgccagcggggccctctttatcacacctacgtctaaccctagcttaacattcgagatttatcgtgtgccttttggcaaagagcgtatcgagggagtgattaaagacttcgtgctcacttggctcgaaaaccggccaagtccaagcacaatatggcgattttaccaggagatggcaaaggtaatcaaagacttccatatggtcagccaggagatctgcgacggggttctgaagaatcaacaattgatggcaaagctcaaaaaatccaaattcgaagtcttggtgtccgatcctgtattcccttgcggtgacatcgttgccctaaagctgggaattccatttatgtacagtttgcggttcagccctgcaagcactgtggagaaacattgtggaaaggtgccttacccgccctcttacgtgcctgcggtgctctcagagctgacagatcagatgtcctttacggatcgaattcggaacttcatatcttaccatctccaggattacatgtttgaaactctgtggaagtcatgggattcttactattctaaggccttgggccgacctacaaccctctgcgagaccatgggtaaggccgaaatatggctgatccgcacttactgggattttgaatttccacgcccctacctgcccaactttgagtttgtaggagggctgcattgcaagcccgcgaaaccactgcccaaggaaatggaagaattcatccaaagcagcggcaagaacggcgttgtagtgttctctttaggctcaatggtgaagaatttgaccgaggagaaagctaatctcattgcgtctgcgctcgcgcaaattccccaaaaggtgctgtggcgctacaagggtaaaaagcccgcaacccttggaaataacacacagctgtttgattggatccctcagaacgatttgctgggacatccaaagactaaagctttcataacccacggtggaaccaacggcatatacgaagcaatctatcacggcgttcctatggttggagtcccaatgttcgctgaccagccggataatatcgcccacatgaaggctaaaggcgctgccgtagaggtgaatcttaacacaatgacttctgtagacttactctcggccctccgtacagttatcaacgagcctagttataaggagaatgcgatgcgactctcccggatccatcatgaccagccagtgaaaccactcgatcgcgccgtcttttggatcgaatttgtaatgcgccataagggcgccaagcatctgcgggtggccgcccacgacctgacgtggtttcagtatcacagcctggatgtgatcgggtttctgctggtgtgtgtgaccacagccatattccttgttattcagtgctgtcttttcagctgccagaaattcggaaagatcggcaagaaaaagaaaagagaatag

SEQ ID NO: 210723 - DNA, 477 bp, synthetic construct
  misc_feature 1..477: note = Description of Artificial Sequence: Synthetic coding sequence
  source 1..477: mol_type = other DNA
atgctgaacaacctgctgctgttcagcctgcagatcagcctgatcggaacgaccctggggggtaatgttttaatatggcctatggaggggtcccactggctgaacgtgaagatcatcatagatgaactcataaagaaagagcacaacgtgacggtactcgtggcctccggggccctgtttatcacccccacatctaacccgtctctgacctttgaaatttatcgcgttcctttcggaaaggagcggatcgaaggggtcataaaagacttcgttctgacctggctggagaaccggccctccccttccactatctggcggttttaccaagagatggccaaagttatcaaagattttcacatggtgtcccaggagatttgtgacggagtgttaaaaaatcagcagttaatggccaagttaaagaagagcaagtttgaggtactggtttctgaccccgtgttcccctgcggcgatatttag

SEQ ID NO: 210724 - DNA, 1590 bp, synthetic construct
  misc_feature 1..1590: note = Description of Artificial Sequence: Synthetic coding sequence
  source 1..1590: mol_type = other DNA
atgaccctgaagtggaccagcgtgctgctgctgatccacctgagctgctatttctcatctggatcttgcggaaaagtcctggtctgggccgccgagtactcccactggatgaacatgaaaaccatccttaaagagcttgtgcagagaggccatgaggttaccgttctggctagctccgcaagcatacttttcgaccccaacgacgcctctacccttaaattcgaagtgtatccgacatcactcacaaagacagagtttgaaaatatcatcatgcagcaggtgaagagatggagcgatattagaaaggattctttctggctgtacttctcccaagagcaggaaatactgtgggaactgtacgatatttttcgaaacttttgtaaggacgtcgtctcaaataaaaaagtgatgaagaagttacaggaaagccgcttcgatattgtatttgcggacgcggtcttcccttgtggagagctgcttgcagctctccttaacattagattcgtgtactctcttagattcaccccagggtacaccattgaaaggcacagtggcggtctcattttccctccaagctacatccctattgtgatgagtaaactgtctgaccagatgaccttcatggagcgggtgaagaatatgatatacgtactctacttcgatttttggttccaaatgtctgacatgaagaaatgggaccagttttactcagaagtactaggccgccctactacactgttcgaaaccatgggaaaggctgacatctggttgatgagaaatagctggtctttccagtttccacacccttttctccccaatgttgatttcgtagggggcttccattgtaagcctgctaaaccattgcctaaggagatggaggagttcgtgcagtcctctggggagaatggagtggtggtgttctctctgggctcggttataagcaatatgacagccgagagggcgaacgtgatcgctaccgcacttgccaaaatacctcaaaaggtgctctggaggttcgacgggaataagcctgatgctctgggcttaaatacgaggctgtataagtggataccccagaacgatctcctggggcaccccaaaaccagagccttcataacccatggcggggccaatggaatttacgaggcgatctatcacggcatacctatggtagggatccccctctttttcgaccagccagataacatcgcacatatgaaggcaaaaggagcagccgttcgcttggacttcaataccatgtccagcactgacttactcaacgccctcaagaccgtcatcaatgaccccttgtataaggagaatattatgaagctgtcaaggattcagcatgatcagcccgtgaagccacttgacagggctgtgttttggatcgagttcgtaatgccccacaagggggccaagcacttgcgcgtggccgctcatgatctcacttggttccaataccactccctggacgtaattggatttctcctggcctgcgtggcaactgtgatctttataattacaaagttctgcctgttttgcttttggaagttcgccaggaagggaaaaaaaggtaagcgagactag

SEQ ID NO: 210725 - DNA, 1593 bp, synthetic construct
  misc_feature 1..1593: note = Description of Artificial Sequence: Synthetic coding sequence
  source 1..1593: mol_type = other DNA
atgagcctgaagtggaccagcgtgttcctgctgatccagctgagctgttacttctcctctggatcctgcggaaaggtactggtgtggcctaccgaatacagccattggattaatatgaaaaccattttagaagaactggtccagagagggcacgaggtgaccgttttgacctcttctgccagcacactggttaatgcctccaagagctcggctatcaagcttgaggtgtaccccacctcactcaccaagaattacttggaagattctttgctgaagatattagacagatggatctacggcgttagcaagaatacattttggagctatttcagtcagctacaggaactttgctgggagtattatgactactctaataagttgtgtaaggatgccgtgctgaataagaaactaatgatgaagctgcaggagagtaaattcgatgtgattctcgccgatgccctaaacccttgtggcgaactcctggcagaactgtttaacatcccttttttatacagtttaagattcagcgtcgggtacactttcgagaaaaacgggggaggcttcttgtttcccccgtcttacgtaccagtggtgatgagcgagttgagtgaccagatgatttttatggaaaggatcaaaaatatgatacacatgctctatttcgatttttggttccaaatttacgacctcaaaaagtgggaccagttctactccgaagtcctcggtagacctaccacactgttcgagaccatgggaaaagccgaaatgtggctgataaggacatactgggactttgagtttccccgcccgttcttgcccaatgtcgacttcgtggggggactgcactgtaagccggccaaacccctgcccaaagagatggaggagttcgttcagagcagtggggaaaatggtatcgtggtattcagcttaggttccatgattagcaacatgagcgaggagagcgcaaacatgatcgcctcagctcttgcccaaatcccgcagaaagttttgtggagatttgacggcaagaagcccaacaccttgggtagtaacacgagactctacaagtggttgcctcagaatgacctgctgggccaccctaaaactaaggctttcatcactcacggtggtacgaacggtatatacgaggcaatttaccacggaatcccaatggtgggcatccctttgttcgccgatcaacatgacaacattgcacacatgaaagcaaagggggccgctctctctgtcgacataaggaccatgtcatcccgggacctgcttaatgctctgaagtcagtgattaatgacccagtgtacaaggaaaacgttatgaaattgtcaaggatacaccacgatcagccaatgaagccactggatcgggctgtattctggatcgagtttgttatgaggcacaaaggggcaaagcatctcagggtggcagctcacaacctaacatggatccagtaccattctctcgacgtcatagcctttctactggcttgtgttgccaccgtgatatttattatcactaagttttgcctgttttgttttaggaaactggcgaagaaggggaagaaaaagaaaagagattag

SEQ ID NO: 210726 - DNA, 1593 bp, synthetic construct
  misc_feature 1..1593: note = Description of Artificial Sequence: Synthetic coding sequence
  source 1..1593: mol_type = other DNA
atgagcctgaagtggatgagcgtgttcctgctgatgcagctgagctgttattttagttccggttcgtgtgggaaggtgcttgtgtggcccacagagtattctcactggattaatatgaaaactatcctagaagagctggtacaacgagggcacgaagtgattgtgctcacctcgtccgcatctatcctggttaacgccagtaagtcatctgccatcaagctcgaagtgtacccaacatctctgacaaaaaatgacctggaggactttttcatgaagatgtttgacaggtggacctactcaatttctaagaatactttctggtcatatttcagccagttgcaagagctttgttgggagtattccgactataacatcaagctgtgcgaagatgccgttctgaataaaaaattgatgaggaagctgcaggagagcaagtttgacgttctcctggctgatgctgtcaatccttgtggagaactgctggctgagctcctgaatattccttttctgtacagcttaaggtttagcgtcggttataccgttgagaagaatggtggtggatttctgttccctccaagctatgtgccagtggtgatgtccgaactctctgaccaaatgatctttatggaaagaatcaaaaatatgatctatatgctttactttgacttctggttccaggcctacgacctgaaaaagtgggatcagttctattccgaggtgctgggccgacccacaactctctttgaaacaatgggaaaggctgagatgtggctcattcgcacatattgggattttgagttccccaggccctttctaccgaatgttgatttcgtgggtgggcttcattgcaagccagcaaagcctttacctaaggagatggaagaatttgtgcaaagtagtggggaaaacggaattgtggtcttttccctgggctccatgatttcgaatatgtccgaggagagcgcaaatatgattgctagcgcgctcgcacagatccctcagaaagtcctctggcggtttgatggcaagaagccaaacacgctcggatccaacacacggctctataagtggctccctcaaaatgatctgctcgggcacccaaagaccaaggcgtttataacgcatggcgggaccaacggaatttacgaagcaatctatcacgggatcccaatggtcggtatcccccttttcgctgatcagcatgacaatatcgcccacatgaaggcaaaaggcgccgctttatctgtggatattagaactatgtcatcccgggacctgttaaatgccctgaaaagtgtgattaatgacccaatttacaaagagaacatcatgaagctgtccagaatccatcacgatcaacccgtcaaacccttagatagggccgttttctggatcgagtttgtgatgagacacaagggcgcgaagcaccttcgagtggctgcccacaatttgacttggatccagtaccatagtctggatgtgatcgcctttttgctggcatgtgttgctaccatgatcttcatgatcacaaaatgctgtctcttctgctttaggaaacttgctaaaaccgggaagaagaaaaaacgagattag

SEQ ID NO: 210727 - DNA, 1590 bp, synthetic construct
  misc_feature 1..1590: note = Description of Artificial Sequence: Synthetic coding sequence
  source 1..1590: mol_type = other DNA
atggccctgaagtggaccagcgtgctgctgctgatccacctgggctgttacttttcctcaggaagttgcggcaaggttctcgtctggactggagaatacagccactggatgaatatgaagactattctcaaagagctcgtacagcgcggtcacgaggtgacggtcctcgcaagctctgcatctatactctttgatcctaacgatgcgtttacgctgaagttggaagtgtaccctaccagtctgaccaaaacggagttcgaaaatatcattatgcagcaggttaagcgttggagtgacatccagaaagactcattctggctttacttcagccaagagcaagaaatcctctgggagtttcacgatatattccggaacttctgcaaggacgtcgtgagcaataagaaagtcatgaagaagctgcaggaatccaggtttgatatcatctttgctgacgcttttttcccctgcggcgaattattggccgctctgctgaatataccattcgtttattcgttgtgcttcacacctgggtatactatcgaaaggcactctgggggtctgatctttccaccgtcctatattccagttgttatgtctaagctgtccgatcaaatgaccttcatggagcgcgtgaagaatatgatctacgtactgtacttcgatttctggtttcaaatgtgtgacatgaagaagtgggaccagttttacagcgaggttttgggacggccaacaacgctattcgaaacaatggggaaggccgacatctggctcatgagaaattcatggagctttcagtttcctcatccttttttaccgaacatcgatttcgtaggggggttacattgcaagcctgctaaacccctgcctaaggaaatggaggagttcgtgcagtcatctggggagaatggagtcgtggtgtttagtctgggctcagtcatctcgaacatgactgcagaacgggccaatgtcatcgccactgccctggccaagatcccccagaaagtcttatggagattcgacggtaacaaaccggacgctctcggcttgaatacccggctttataagtggatccctcagaatgatctgctgggactgcctaagacgcgcgctttcataactcacggaggggctaatggtatctatgaggcaatttaccacggtattccgatggtggggattcctctgttctgggaccagcctgacaacatcgcacacatgaaagctaagggggccgctgtgcgtcttgacttccataccatgagctctaccgaccttctgaacgccctcaagacagttattaacgacccgagttataaagaaaatgtgatgaagctgagtataattcagcacgaccagcccgtcaagccacttcatagagctgtgttctggatcgagttcgtgatgtgccataagggagccaagcatctgagggtggccgctagagacctgacatggtttcagtaccactctctcgatgtcattggattcttgctcgcctgcgtggccacggttatctttgtggttactaagttttgtcttttctgcttttggaagttcgcgcgaaagggcaagaaggggaaacgggattag

SEQ ID NO: 210728 - DNA, 1008 bp, synthetic construct
  misc_feature 1..1008: note = Description of Artificial Sequence: Synthetic coding sequence
  source 1..1008: mol_type = other DNA
atggccctgaagtggaccagcgtgctgctgctgatccacctgggctgttacttcagttctgggagttgcgggaaagttttagtgtggaccggcgagtatagccactggatgaacatgaaaacaatacttaaggagctcgtgcaacgaggacatgaggtgactgtcctggctagctctgcttccatattgttcgaccctaatgatgcatttactctaaaactggaggtttacccgaccagcctgacaaagactgagtttgagaacatcataatgcagcaggtcaaaagatggagcgatatccagaaagactcgttctggctctatttcagccaggagcaggaaatcctgtgggagtttcacgatatttttcgcaatttttgtaaagacgtggtgtctaataagaaagtaatgaagaaactgcaggagagccggttcgatataatctttgcagacgctttctttccttgcggggaactcctggctgccctgctgaacatccctttcgtatactcactatgctttacgcccggatacacaatcgaacggcactcaggcggtttgatttttcctccaagctacatacccgtagtgatgagtaaactcagtgaccagatgaccttcatggaacgtgttaaaaatatgatttatgtactttactttgatttctggttccagatgtgtgatatgaagaagtgggatcaattttacagtgaagtcctcggtaggcccaccacacttttcgagacaatgggcaaggctgacatttggctcatgcggaattcttggagcttccagttcccccaccccttccttcctaatattgacttcgtcggtggactgcactgtaaacctgcaaagccgctgcctaaagagatggaggaatttgttcagtctagcggcgaaaatggtgtcgtggtgttttccctagggtctgtgatcagcaatatgaccgcggaaagagctaacgtaatcgcaacagctctggcaaagataccgcagaaaatatag

SEQ ID NO: 210729 - DNA, 1587 bp, synthetic construct
  misc_feature 1..1587: note = Description of Artificial Sequence: Synthetic coding sequence
  source 1..1587: mol_type = other DNA
atgagcatgaagtggaccagcgccctgctgctgatccagctgagctgttacttcagttctgggtcttgtgggaaggttctagtgtggccaacagagttcagtcactggatgaacatcaaaacgatcttggacgaactggtgcagcggggacacgaggttactgtgctggcttcctcagcttccatttctttcgaccccaattctcccagcaccctgaagtttgaggtttacccggtgtccttgactaagacggagtttgaagacattataaagcagctggtaaagaggtgggctgaactccccaaagacactttctggtcctacttctcgcaggtgcaggaaatcatgtggacatttaacgacatcctccgcaagttttgcaaggacatcgtgagcaacaaaaaactgatgaagaaactccaggagagccgctttgatgtggtgctggccgatgccgtgtttccctttggagagctgttggccgaactgctcaagattcctttcgtgtacagtttgcgttttagtcccgggtatgctatcgaaaagcattctggggggctgctgtttcctccaagttatgttcctgtggttatgagcgagttaagtgaccaaatgacctttatcgaaagagtaaagaacatgatctacgtgctctacttcgaattctggttccaaatcttcgacatgaaaaaatgggaccagttctatagtgaggtgctgggccgccccaccaccctctctgagacaatggccaaggccgacatctggttaatcagaaattactgggacttccagttcccccacccactgttgcccaatgtcgaattcgtggggggcctgcactgtaagcctgccaagcctttgccaaaggagatggaagaatttgtccagagcagtggagaaaatggcgtggtggtctttagcctgggctccatggtgagtaacacttccgaggagcgagcgaacgttatcgccagcgccctcgccaaaatcccacagaaagtcctgtggcgtttcgatggaaataagcccgatacattggggctgaatacgcggctatataagtggattccccagaacgacctgctgggtcaccccaaaactagggctttcatcacacacggcggagctaatggaatttacgaggccatctaccatggaatccccatggtgggggtgcccttgtttgcggaccaacctgataatatcgcccacatgaaggccaaaggagccgccgtcagcctcgacttccatacgatgagctctaccgatctcttaaatgccctcaaaaccgtaatcaacgaccctctgtacaaggagaatgcaatgaagctcagccggattcaccacgaccagcccgtgaaacccttagatcgcgccgtgttttggatcgagtttgtaatgcgacataagggggccaaacatctaagagtggccgctcacgaccttacgtggttccagtaccattctctggatgtcactgggtttctgctggcctgcgtggccactgtgatttttatcatcaccaaatgcctgttctgtgtgtggaaatttgtaaggacaggcaagaagggtaagcgagactag

SEQ ID NO: 210730 - DNA, 1179 bp, synthetic construct
  misc_feature 1..1179: note = Description of Artificial Sequence: Synthetic coding sequence
  source 1..1179: mol_type = other DNA
atgttcttcgccctgctgcacgtgagcagcaccaacggcctggacgccgtttttcctttcggcgagctcttagctgaactgctcaaaatccccttcgtatacagtttgaggttttctcccggctatgcaattgaaaagcattctggcggtttgctgttccctccgagttacgtccctgtggtgatgagcgagctctcagatcagatgacttttatagaaagggttaagaacatgatctacgtgttatattttgagttttggttccagatcttcgatatgaaaaaatgggatcagttctattcagaggttctgggccggcccacgacattgagcgagaccatggcaaaagccgatatatggttaattagaaattactgggactttcagtttccacacccgctcctgccaaatgtggagtttgtagggggtctgcattgtaaacccgccaagcccttgcccaaggaaatggaagaatttgtgcagtcttccggagagaatggagttgtcgtttttagtcttgggtcgatggtgtccaatactagcgaagagagggcaaatgtgattgctagtgccctggccaagatccctcaaaaagtcctgtggcgatttgacggcaacaaaccagacaccctagggctgaatactaggctctacaaatggatcccacaaaatgacctgctgggccaccccaagaccagagccttcattacccacggaggggcaaacggtatctacgaggccatctaccatggaattcccatggtgggagtgcctctgttcgccgatcagccagacaacattgcccatatgaaagctaaaggcgccgctgtgtctttggactttcataccatgagcagtaccgacttgctgaatgccttaaagaccgtaatcaacgatccactttacaaggagaatgctatgaagctgagcagaattcaccacgaccaaccagtgaaacccctggaccgcgctgtgttctggatagagtttgttatgcggcacaagggggctaagcaccttagagttgccgcacacgatctcacatggtttcagtatcattccttagacgtgaccggtttcctgctcgcctgtgtcgccactgtgatcttcatcatcaccaaatgcctgttttgcgtgtggaagtttgtgcgcaccggcaaaaaaggaaaaagagactag

SEQ ID NO: 210731 - DNA, 165 bp, synthetic construct
  misc_feature 1..165: note = Description of Artificial Sequence: Synthetic coding sequence
  source 1..165: mol_type = other DNA
atgagcatgaagtggaccagcgccctgctgctgatccagctgagctgctacttttctagcgggagctgtggtaaggttctggtatggcccaccgaattctcccattggatgaacattaagaccatcttagacgaactcgtccagagaggacacgaagtgacatag

SEQ ID NO: 210732 - DNA, 1590 bp, synthetic construct
  misc_feature 1..1590: note = Description of Artificial Sequence: Synthetic coding sequence
  source 1..1590: mol_type = other DNA
atgagcgtgaagtggaccagcgtgatcctgctgatccagctgagcttttgtttttcaagtggtaactgcggcaaagtcctggtgtgggctgctgaatatagccactggatgaatatcaagactatcttggatgagctcatccaacgggggcacgaagtcaccgtgttggcctcgtccgctagtattcttttcgaccctaataactcttcagctctcaagatagagatctaccctacgtcactgacgaagactgagttggaaaacttcatcatgcagcagatcaaacgctggtccgacctgccaaaggacacattttggctatacttttcccaggtccaggagataatgtcaatcttcggagatatcactcgcaaattttgcaaggatgtggtgagcaacaaaaagttcatgaaaaaagtgcaggaatcgagattcgacgtgatatttgctgacgccatcttcccgtgcagcgagttactggccgaactgtttaacattccttttgtgtatagtctgagcttctcacccggctatacattcgaaaaacattcgggtggcttcattttcccacctagctacgttcctgttgtgatgagcgagttgaccgatcagatgacttttatggaacgggtgaagaacatgatctatgtactgtatttcgatttttggttcgagatttttgatatgaaaaagtgggaccaattctactcagaagtgttagggcggcccacaaccctgagcgaaacaatgggtaaagcagatgtatggttgatacgtaactcttggaattttcagtttccatatccactgctgccgaacgtcgacttcgtgggcggattgcactgtaagcccgcaaaaccacttcctaaggagatggaagatttcgtgcagagctcaggcgaaaatggggtagtcgtatttagcttgggctccatggtttccaatatgacagaggaaagagctaacgtcatcgcctccgcccttgcacagatcccgcagaaagtgctctggcgattcgacggcaataagcccgatactctgggtctgaatacccgcctgtataaatggattccccagaacgatctcttgggccatcctaagaccagggcgtttatcacacatggcggggcaaatggcatttacgaggcaatttaccacggtattccaatggtggggatccccctcttcgccgaccaacctgacaacatcgcacacatgaaagcgaggggcgctgccgtccgcgtcgattttaacacaatgagcagcactgacctcttgaacgcactgaagagagtcattaatgacccttcttataaagaaaatgtgatgaagctcagtaggatccaacacgaccaacccgtgaaacccctggaccgggccgtgttctggatagagtttgtcatgcggcataaaggagccaaacacctacgggtcgccgcccacgatctgacttggtttcagtaccattccctagatgtcatcggtttcctgttggtgtgcgttgccaccgtgatatttattgtgacgaagtgttgtctcttctgcttctggaagttcgcaaggaaggcaaagaagggaaagaacgactag

SEQ ID NO: 210733 - DNA, 1269 bp, synthetic construct
  misc_feature 1..1269: note = Description of Artificial Sequence: Synthetic coding sequence
  source 1..1269: mol_type = other DNA
atgctgcagtggcggcggcggcactgctgcttcgccaagatgacctggaacgcaaagcggagcctgttccgcacccatctgataggagtgctgagcttggtgttcctttttgccatgtttctattctttaaccaccatgattggttaccagggagggctggctttaaagagaacccagtgacttacactttccgaggatttaggtcaacaaagagcgaaactaatcactctagcctccgaaacatctggaaagagacagttcctcagacacttcggccacagactgccactaactctaataacacggacctgtctccccagggtgtcacagggctggagaatactttgtccgcaaacggaagcatttataacgagaaaggtacaggtcaccccaactcctatcacttcaaatatattattaatgaacccgaaaaatgccaagagaagtccccttttctcatattgctgattgctgctgagccaggccaaatagaggcccgcagggcgattcggcaaacttggggtaacgagtctttggccccagggattcagatcacgcgtatatttttactcggacttagcattaagctgaacggctatctgcaaagggctattttggaggaatctcgccagtatcacgatataatacagcaagaatacctggacacgtattataacttaactataaagactctcatggggatgaactgggtagctacttactgcccacacatcccatacgtgatgaagacagacagcgatatgttcgtcaataccgagtacctgataaacaaactcctgaagccagatctgccccccagacataactacttcacagggtatctgatgcgagggtatgccccaaatagaaacaaagactccaagtggtacatgccaccagacttatatccttctgagagatacccagtgttctgctctggaaccggatatgtctttagtggggacctcgctgagaaaatcttcaaagtttctcttgggatccggcggcttcaccttgaagatgtgtacgtgggcatctgcttggccaaattgaggattgaccccgtgccacctccaaatgagtttgtcttcaatcactggagggtgtcatatagtagttgtaaatacagtcatctgattactagtcaccagtttcagccttcagaacttattaagtattggaaccacttgcagcagaataaacataacgcttgtgccaatgctgcaaaggagaaggctggccgctataggcatcgcaaacttcattag

SEQ ID NO: 210734 - DNA, 1137 bp, synthetic construct
  misc_feature 1..1137: note = Description of Artificial Sequence: Synthetic coding sequence
  source 1..1137: mol_type = other DNA
atgcagctgcggctgttccggcggctgctgctggccgccctgctgctggtgatagtgtggactctctttggtccatctgggctcggcgaggaattactctcactcagtctggccagcctgctacccgctcctgctagcccaggccccccccttgccctacccagactgctcattcccaaccaggaggcgtgttccggaccaggtgcgcctcccttcctgttgatacttgtgtgtaccgctcctgaaaacctaaatcaacgaaatgccattcgggcctcatggggcgggctgcgtgaggcccgcggtctccgggtccagaccctgttcctccttggggagccaaacgctcagcaccccgtttgggggtcacagggtagcgacctggcctcagagagcgccgctcagggggacatactgcaagctgcctttcaggacagctacaggaacctaacacttaaaacactgtccggtctcaattgggctgaaaagcattgccccatggcaaggtacgtcctgaaaacagacgacgatgtgtatgttaatgtgcctgaactcgtatccgagcttgtcctgcggggtgggagatggggccagtgggagcgctcaacagagccccagcgcgaagcagagcaggagggcgggcaggtcctacactctgaggaggtgcctttactatatctcggtagagtccattggcgggtgaacccctctagaacccctgggggcaggcacagagtctctgaggagcagtggcctcacacatgggggcccttccccccttatgcctcgggtacaggctatgtgctgtcagcctccgccgtgcaacttattctgaaggtcgcatcacgagctcctctgttgccactggaagatgttttcgtgggggttagtgctcgtcgggggggcttagctcctactcagtgcgtgaagctcgcaggggcgactcactaccccttggatcgctgttgttatggcaaattccttctgacaagtcatcgtctcgatccatggaaaatgcaggaagcgtggaaactggttggtggctctgatggcgagaggaccgcccctttctgcagttggttccagggggtgttaggaattctgagatgtcgggcaatcgcctggctgcaatcctag

SEQ ID NO: 210735 - DNA, 1137 bp, synthetic construct
  misc_feature 1..1137: note = Description of Artificial Sequence: Synthetic coding sequence
  source 1..1137: mol_type = other DNA
atgcagctgcggctgttccggcggctgctgctggccgccctgctgctcgtgatcgtctggacactctttggcccctctggattaggagaggagctcctcagcctcagtcttgcaagcttgttacccgctccggcctcccctggaccacctttggcactaccacggctgctaatccctaaccaagaggcgtgttccggtcctggggcaccacctttcctcttgatactggtctgcaccgcgcctgaaaacttgaaccagcggaacgcaataagagcttcctggggaggccttcgggaggcgaggggcctcagagtgcagacgttgtttctccttggagaacccaacgctcagcatcctgtctgggggtctcaaggatcagacttagcatcggagagcgcagcccagggggatatactgcaggctgcattccaggacagctacaggaacctgacactgaaaactttgtccggcctaaattgggccgaaaaacattgtcctatggctaggtacgtcctcaagacagatgacgacgtgtatgttaacgtgccagagctggtgtcagaactggtgctcaggggtggaagatggggccaatgggaaagaagcacagagccgcagcgcgaggccgaacaagaaggagggcaggtcctccactcagaagaagtgcctctattgtacctaggacgcgtgcactggcgtgtgaacccctctcgtacgcctggtggccggcaccgcgtaagcgaagagcagtggccacatacttggggcccgttccccccatacgcttccggcactggctatgtcctgtctgcatctgccgtgcaacttatcctgaaggtcgcttctagagcacccctccttccccttgaagacgttttcgtgggagtatccgcacggaggggaggcctggcaccaacccaatgcgtgaagttggccggcgctactcactatcccctcgacaggtgttgctatgggaaatttttgctaacgagccaccgcctggacccgtggaagatgcaagaggcttggaagttggtgggcggttccgatggcgaacggaccgcgcctttttgcagctggttccaaggcgtcctgggtatcctcagatgccgggccatcgcgtggcttcagtcatag

SEQ ID NO: 210736 - DNA, 1137 bp, synthetic construct
  misc_feature 1..1137: note = Description of Artificial Sequence: Synthetic coding sequence
  source 1..1137: mol_type = other DNA
atgcagctgcggctgttccggcggctgctgctggccgccctgctgcttgtaatcgtatggacactgtttggaccaagcggcctcggagaagagctgctatccctgtcccttgcctccctgctgcccgcaccagcatctccaggaccgcccctagcgctgccacggttactaatcccaaaccaggaagcctgttcaggccctggcgccccacccttcttactaatcctggtctgtacggcgccagagaatctcaaccaaaggaatgctatcagggcaagttggggcggactccgcgaagccagaggtctcagggtgcagaccctctttctgcttggcgaaccgaacgcacagcatccggtctggggtagtcaagggtcagatctggcgtccgaaagcgcagcacagggggatatcctacaggctgctttccaggactcctatagaaacctgaccttgaagacactatctggattaaattgggctgagaaacactgcccaatggcaagatacgtgctgaagacggatgacgatgtctacgtcaatgtcccagagctggtctcggaattggtgttacgcggaggccggtggggacagtgggagagatccacagagccgcagagagaggccgagcaggagggcggccaggtattgcattctgaggaagtgcctttgctttacttggggagagtgcactggcgcgttaatcctagcagaacgccgggcggccgccacagggtgtcagaggagcagtggcctcacacttgggggccgtttcccccctacgcctctggaacagggtatgtcctcagcgcatctgccgttcagctaatattaaaggttgctagcagggctcctctgctgccattagaagatgtgttcgtcggtgtctccgctcggaggggcgggctcgcccctacacaatgcgtaaagttggccggcgcgacgcattaccctctggacagatgttgttatggaaagtttctgttgacatcacatcggctcgacccttggaagatgcaagaggcctggaagttggtggggggctccgatggggagcgcacagccccattctgctcttggttccaaggagttttaggcattctgcgctgcagagccatagcttggctgcagtcatag

SEQ ID NO: 210737 - DNA, 1137 bp, synthetic construct
  misc_feature 1..1137: note = Description of Artificial Sequence: Synthetic coding sequence
  source 1..1137: mol_type = other DNA
atgcagctgcggctgttccggcggctgctgctggccgccctgctgctggttatagtttggactctgttcggtccctctggcttaggagaagaactgctgagtttgtctctggcttcgctgctcccggcacctgcctcacccggtcctcctttagccctccctcgacttctcatacctaatcaagaagcttgctccgggcctggcgcgcccccttttctcctgattctggtgtgtactgcacccgaaaatcttaaccagagaaacgctataagagcttcctggggcgggcttcgggaggctcgtggcctgagggtgcagacgcttttcctgctgggcgagcccaatgcacaacatccagtatgggggtctcagggttcagatctggctagcgagtctgccgcccagggcgacatactccaggcggcattccaagattcataccgtaatctgacactcaagacacttagtggtttgaactgggctgagaagcactgcccaatggcccgctatgtgctgaagactgacgacgatgtgtatgtgaatgttccggagttggtgagtgaactcgtgctgagagggggccggtgggggcagtgggaaagaagcactgagccccagcgtgaggccgagcaggaagggggccaggtcctccatagcgaggaagtgcctctgctctatctgggaagagtacattggcgcgtgaacccttctcggactcctgggggtcgccaccgcgtcagcgaagagcagtggccacatacctggggtccttttcccccctatgcgagcggaacaggctacgtcctcagtgcctctgccgtgcagctaatactgaaggtcgcaagcagagcccctttgctgcctctggaggacgtgttcgttggcgtgtcagctcgccggggcggactggctcctacccaatgcgtgaagctagccggggcgactcattacccattggaccggtgctgctatggcaagttcctcctgacttctcacagactggatccctggaagatgcaggaggcatggaaacttgtgggggggtccgatggtgagcgcaccgctcccttttgttcgtggtttcagggtgtattagggatcctcaggtgtcgtgctatcgcatggctgcagtcttag

SEQ ID NO: 210738 - DNA, 1137 bp, synthetic construct
  misc_feature 1..1137: note = Description of Artificial Sequence: Synthetic coding sequence
  source 1..1137: mol_type = other DNA
atgcagctgcggctgttccggcggctgctgctggccgccctgctgctagtgatcgtctggaccttgtttggtccctctgggctcggagaagagctcctgtcactgtcgttggcctcgctcctgcctgcaccagctagccctggacctcctcttgctcttcccagactcctcataccaaatcaggaagcttgttccggaccaggggcgccgccgttcctgctgattctggtgtgcacagctccggaaaatcttaaccagagaaacgctatccgcgcctcttggggcggattaagggaagcaagagggttacgcgtccagaccttgttccttctcggggagcctaatgctcaacacccagtttggggtagccaaggaagtgatttggctagcgagtcagcagcccagggagatattctccaggctgccttccaggacagctaccgaaacctgactctgaagaccctgagtggtctaaactgggccgagaagcattgtcccatggctcggtacgtgctgaaaacagacgatgacgtctatgtcaacgtccctgaactggtttccgagctggtgcttcggggaggccgatggggccagtgggagcggagcacagagccccagcgcgaggccgagcaggaaggtgggcaggtcctacacagcgaggaagtgcccctgctgtaccttggtcgcgttcactggcgggtaaacccctctaggacacctggtgggagacacagggtgtctgaagaacagtggcctcatacatggggcccctttccaccctacgcctccggtacggggtacgtcttatcagcctctgccgtgcagctcattttaaaagttgctagcagagcgcctctgctgcccctagaggatgtgtttgtgggtgtcagcgccagaagaggcggattagcacctacgcagtgtgtgaaactggcgggggccacccattaccctcttgaccgatgctgctatggaaagtttctgctcacttcacatcggttggatccgtggaagatgcaagaggcttggaagttagttggcggctcggacggagaaaggactgcaccattctgtagctggttccaaggcgtcctcggcattctgagatgtagggcgatcgcatggcttcagtcctag

SEQ ID NO: 210739 - DNA, 933 bp, synthetic construct
  misc_feature 1..933: note = Description of Artificial Sequence: Synthetic coding sequence
  source 1..933: mol_type = other DNA
atggccttccccaagatgcggctgatgtacatctgcctgctggtgcttggcgcgctgtgcctgtacttcagcatgtacagtcttaaccccttcaaagaacagtccttcgtctataagaaggatggcaacttcttaaagcttccagatacggactgccggcaaacccccccattcctggtgctcttagtgaccagctcacacaagcagttggccgagcggatggccatccgccagacatggggcaaagagaggatggtgaagggcaagcaattaaagacattcttcctgctgggcacaacatcttccgccgctgagacaaaggaggtggaccaggagtcccagcgacatggcgatataatacaaaaggatttcttggatgtgtactacaatctgacactgaaaaccatgatgggcatcgagtgggtccaccgcttctgccctcaggccgcattcgtgatgaaaactgatagcgatatgttcatcaacgtggactatcttactgaactgctgctgaagaaaaatcgcacaacacgtttctttacagggtttctcaagctgaacgaattccctattcgccagccgttttccaagtggttcgtgagcaagtctgagtacccgtgggaccggtacccccccttctgtagcggcacaggttacgtgttttcgggagacgttgccagtcaggtgtataatgtctccaaatcagtgccctatattaagctcgaggatgtctttgtcgggctttgcctggagcgactcaatatccgactcgaggaacttcatagccagcctaccttcttccccggcggtctgcggttttctgtgtgcctgtttagacggatcgtggcctgtcactttatcaagccgcggactttacttgactactggcaagcgctcgagaactccaggggagaggactgcccaccggtgtag

SEQ ID NO: 210740 - DNA, 933 bp, synthetic construct
  misc_feature 1..933: note = Description of Artificial Sequence: Synthetic coding sequence
  source 1..933: mol_type = other DNA
atggccttccccaagatgcggctgatgtacatctgcctgctggtgctgggggctctttgtctgtattttagcatgtatagcctgaaccctttcaaagagcagtcatttgtctataaaaaagatgggaacttcctcaagctgcctgacaccgactgcagacagactcccccctttctcgtcctgctggtgacctcaagtcataagcagctggctgagaggatggccatccgccagacttggggcaaagagaggatggtcaaggggaagcagctgaagactttttttctgctgggtactacaagttctgccgccgagaccaaggaggtggaccaagagtctcaacggcatggcgatatcatccagaaagacttcctggatgtttactacaacttaactctaaagactatgatgggaatagagtgggtgcacaggttttgtccccaggccgcatttgtgatgaaaaccgattctgatatgtttatcaacgtggactatttaactgaactgttactgaagaagaatcgaacgacacggttcttcactggatttctgaagttaaacgagttccccattcggcagccttttagtaaatggtttgtgtctaaaagcgagtatccttgggacagataccccccattttgtagtggtaccggttatgtctttagtggagacgtcgcttcgcaggtttataatgttagcaagtctgtcccgtacatcaagctcgaagatgtgttcgtgggtctttgtctcgagcgtcttaacattcgtttggaggagctacatagccaaccaacattttttccaggaggattacgatttagtgtttgtcttttcagaagaattgtggcatgtcacttcattaaacctcgaaccttgctggactattggcaagcgcttgagaactcccgaggcgaggactgccctcccgtgtag

SEQ ID NO: 210741 - DNA, 933 bp, synthetic construct
  misc_feature 1..933: note = Description of Artificial Sequence: Synthetic coding sequence
  source 1..933: mol_type = other DNA
atggccttccccaagatgcggctgatgtacatctgcctgctggtgctgggcgctctctgcctatatttcagcatgtacagcttgaacccattcaaggagcagagtttcgtgtacaagaaggatggtaatttcctcaaattgccagacaccgattgtagacagacccccccgttcttggtgcttctggtgacgagcagtcacaagcagcttgcggagcgaatggccattagacagacctggggcaaagagcggatggtaaaggggaaacagctgaagacattcttcctactaggcacgactagttctgcagccgagacaaaggaggttgaccaggagtcacagcggcatggcgatataattcagaaagactttcttgatgtttactacaatttgaccttaaagactatgatggggattgaatgggttcacaggttttgtcctcaggctgccttcgttatgaagaccgactctgacatgttcataaacgtggactacctcaccgagcttctccttaagaagaaccgtacaacgcgattcttcacaggcttccttaagctcaacgaatttcccattagacaacccttcagcaagtggttcgttagcaagagtgagtacccttgggaccgctaccctccgttctgctccgggactggctacgttttttctggcgacgtagcttcgcaggtttataacgtaagcaagagcgtgccctacattaaactggaggacgtcttcgtgggactgtgtctggaacgccttaacataaggctggaagaactgcatagccagccaacgttttttccaggtggtctccgtttctccgtgtgcttattcaggagaatagtggcgtgccattttattaagcctaggacactattggactattggcaagctttagagaatagccggggagaagactgtcctcccgtttag

SEQ ID NO: 210742 - DNA, 933 bp, synthetic construct
  misc_feature 1..933: note = Description of Artificial Sequence: Synthetic coding sequence
  source 1..933: mol_type = other DNA
atggccttccccaagatgcggctgatgtacatctgcctgctggtgttgggggctctgtgcctatatttttccatgtattctctcaatccttttaaggaacaatcttttgtctacaaaaaagacggcaattttttaaaacttcctgacacagattgtcggcagaccccccccttcctcgtcctgctggttacaagctcccacaagcagctggctgagcgaatggcaatccggcagacgtggggcaaggagaggatggtgaaaggcaagcagctaaagacctttttcctgctcgggacaacctcttcggctgcagaaacgaaggaggtggatcaggagagccagcgccatggagatatcatccaaaaggacttcctcgacgtgtactacaacctcacattgaagactatgatgggaatcgaatgggtccataggttctgccctcaagccgcgttcgttatgaagactgacagcgacatgttcatcaacgttgactatttgaccgaactactgctcaaaaagaaccgcacaacacgcttcttcaccgggttcctgaaactaaacgagtttcccatacgacagccctttagcaaatggttcgtcagtaaatccgagtatccctgggaccgctaccccccattctgttccggtaccggctacgtatttagcggagatgtggcctcccaagtgtataacgtgagtaagagcgtgccctacataaagttggaggacgtatttgttggtctgtgtctagagcgtcttaacatccgactcgaggaactgcacagtcagcccactttctttccagggggccttcgattctccgtctgtcttttcagacgcatagtggcatgtcattttatcaaacctagaactctgctggattactggcaggccctcgagaacagccggggcgaagactgtcctcctgtatag

SEQ ID NO: 210743 - DNA, 1197 bp, synthetic construct
  misc_feature 1..1197: note = Description of Artificial Sequence: Synthetic coding sequence
  source 1..1197: mol_type = other DNA
atgcggctgcgggagcccctgctgagcggcagcgccgccatgcccggggcctcgctgcaacgagcctgccgactgctcgtcgccgtttgcgccctgcacctcggcgtcaccctggtatattatcttgcagggcgggatcttagtagactgccccagctcgtaggggtgagcactccattgcaggggggctcgaattctgccgccgctatcggccaatcatcaggcgaacttagaaccggcggcgcgcgccctccaccacccctcggcgcttctagccaacccagaccgggaggagattcctcccccgtcgttgactctggcccagggccagccagcaaccttacctccgtgcccgttccacacaccaccgccctctcacttccagcatgtcctgaagagagccctctcctcgtgggcccaatgctgatcgagttcaatatgccagtcgatctagagttggtcgccaagcaaaatccgaacgtgaagatgggtggacgatatgccccacgagactgtgtgtccccgcacaaggtggcgatcattatccccttcagaaatcggcaggaacatctgaaatactggctgtattatctccaccccgtgctgcagcgtcaacagcttgactacggtatatatgtgattaaccaggcgggcgatactatttttaatcgggccaaactgctaaacgtgggctttcaagaggccttaaaggactatgattacacatgttttgtcttttccgacgttgacttgattccaatgaatgaccacaatgcctatcgctgcttctcacagcccagacacatcagtgtggcaatggacaagtttggattcagtctaccttatgtccaatatttcgggggagtttccgcactgagcaagcagcagttcctgacaatcaacgggttccccaacaattactggggatggggaggtgaggatgacgacatcttcaacaggctggtctttaggggtatgagtatctctcggcctaatgcggtggtggggaggtgtagaatgatccggcactctagagataaaaaaaacgagcccaatccgcaacgctttgatcgaatagcgcatactaaagaaaccatgctgagtgatggtctcaactctttgacataccaggtgcttgatgtgcaaagataccctctgtatactcagattaccgtcgacatcgggacgccgagctag

SEQ ID NO: 210744 - DNA, 678 bp, synthetic construct
  misc_feature 1..678: note = Description of Artificial Sequence: Synthetic coding sequence
  source 1..678: mol_type = other DNA
atgcggctgcgggagcccctgctgagcggcagcgccgccatgcccggcgccagcttacaaagggcctgccgcctgctcgtggctgtatgcgccttgcatttgggcgtcactctcgtgtattatctagctggacgagatctctcaagattgccccagcttgtgggcgttagcaccccattgcagggcggtagtaactcggccgctgccatagggcaatcgtctggggagctacggaccggcggcgctaggcctcccccacccttgggtgccagctcacagcccaggccaggcggggattctagccccgttgtcgattctggaccaggacctgcttcgaacttaacttccgttccagtgcctcacacaaccgctctatccctgcccgcttgtccagaggagagtcccctgctggtaggccccatgcttattgagtttaacatgccggtagacttagagttagtagccaagcagaatcctaatgtgaagatgggtggccgctatgctccccgagactgcgtgtctcctcacaaagtggcaatcattataccatttcgtaataggcaggagcacttaaagtattggctttactatctgcaccccgttctacagagacagcagctggattacggcatttacgtgatcaaccaatatgaaaagatccgaagactcctgtggtag

SEQ ID NO: 210745 - DNA, 1068 bp, synthetic construct
  misc_feature 1..1068: note = Description of Artificial Sequence: Synthetic coding sequence
  source 1..1068: mol_type = other DNA
atgcggctgcgggagcccctgctgagcggcagcgccgccatgcccggtgcatccttacaacgcgcctgcagactactggtcgctgtgtgcgcattacacctcggggtgacgttggtatattacctggccggccgggaccttagtcgcctccctcagctcgtgggggtgtccacacctgttgtggacagcggaccagggcccgcttctaatctcacttccgtacccgtacctcacacaaccgccctgtcgctgcccgcgtgtcccgaagaatcccctctgctggtggggcctatgttgatcgagtttaacatgcccgtggatttggaacttgtggccaagcagaatcccaacgtaaaaatgggcgggagatacgccccacgggattgtgtatcccctcacaaggtcgcaataatcattcccttccgtaaccggcaggagcacttaaagtattggctgtactacctgcatcccgtgctccagaggcagcagctggactatggcatatacgtgattaatcaggcgggtgacacaatttttaaccgggccaaactcctcaacgtgggtttccaggaggccttgaaagactatgattatacttgcttcgtgttcagcgacgtggacctgattccgatgaacgatcataacgcataccggtgctttagtcaaccacggcatatttccgtggctatggacaaattcggattctccctcccttacgtccaatatttcggaggagtgagcgcgctctccaaacagcagttcctaacaattaacgggtttcctaataactattggggatgggggggtgaggacgacgatatatttaatcgacttgtcttccggggtatgtccataagccgacccaacgctgttgtgggccgctgtcggatgattaggcacagtagagataaaaaaaacgagcccaacccccagcgttttgaccgcattgcacatacgaaggagactatgttaagtgacggtctgaattcactgacctaccaagttttggatgtgcagagatacccactttacactcagatcactgttgatataggcactccctcttag

SEQ ID NO: 210746 - DNA, 438 bp, synthetic construct
  misc_feature 1..438: note = Description of Artificial Sequence: Synthetic coding sequence
  source 1..438: mol_type = other DNA
atgaacgaccacaacgcctaccggtgcttcagccagccccggcacatttccgtcgccatggataaatttggcttttcccttccctacgttcagtactttggcggcgtatctgccctgagcaagcagcaatttttgaccattaacggctttcctaacaattattgggggtggggaggcgaggatgacgatatatttaatagactcgtgttccgcggaatgtctatttcaaggcctaatgcagtggtcggtcgctgcagaatgatccggcatagccgagacaagaagaacgagcctaatccacagagattcgatcgtatagcccatacaaaggagacaatgctatcagatggccttaactcgctaacataccaagtgctggatgtgcaaaggtacccactgtacacacaaatcacagttgatattggaaccccttcatag

SEQ ID NO: 210747 - DNA, 1206 bp, synthetic construct
  misc_feature 1..1206: note = Description of Artificial Sequence: Synthetic coding sequence
  source 1..1206: mol_type = other DNA
atggccgtggaggtgcaggagcagtggccctgcctgcccgccgccggctgccccggcccccttggcggccccgtggccgcatgcggaatgagtaggctgctgggaggaacgctggagcgagtgtgcaaagcggtgctcctgctctgtctgctgcatttcctcgtagccgtcattttatatttcgacgtgtacgcacagcacctggccttcttcagccgcttctccgccagaggacccgctcacgccctccatcccgccgccagcagcagctcgagtagcagcaactgtagcagacctaacgcaaccgcctctagctcaggcttaccagaggtcccctcagcattgcctggccctaccgctcccacccttccaccatgccccgacagtccccccgggctcgttgggaggcttctgatcgaattcacttcacctatgcccctggagagggtgcagcgagagaaccccggcgttctgatgggaggccggtataccccacctgattgtacgcccgcccagaccgtcgccgtgatcatccctttcagacaccgcgagcaccacctgaggtactggctccattatctccacccgatattgagaaggcaacggctgaggtacggggtctatgtgatcaatcagcatggggaggataccttcaacagagcaaaactcctcaacgtcggcttcctggaagctttgaaagaggacgcggcttacgattgctttatctttagcgatgtggatcttgtgcccatggacgataggaatttatacagatgtggagatcagccccggcattttgcaattgcaatggataaatttggattcaggctgccgtacgcaggttattttggtggcgtgtcaggcctgtccaaagctcagtttctcaggattaacgggttcccaaacgagtactggggttggggcggggaagacgatgacatctttaaccgcatatctttgaccggcatgaaaataagcaggcctgacattaggatcggcagatatcgtatgatcaagcatgaccgtgataaacataatgagccgaatccgcagaggtttacaaagattcaaaatacgaagctgaccatgaaacgcgacggtattggttccgtgcggtatcaagtccttgaagttagcagacaaccactattcacaaacattactgtggacattgggcggcctccctcctggccccccaggggatag

SEQ ID NO: 210748 - DNA, 1119 bp, synthetic construct
  misc_feature 1..1119: note = Description of Artificial Sequence: Synthetic coding sequence
  source 1..1119: mol_type = other DNA
atgagccggctgctgggcggcaccctggagcgggtgtgcaaggccgttctactgttatgcctcctacactttctggtggcggtcatcctttacttcgatgtctacgcccagcacttagctttcttctctcgcttctccgcaaggggtccggctcatgctttacaccctgctgcctcaagcagcagtagttcttcaaattgtagccggccgaatgctaccgcatcctcttctggactgcccgaagtgccttctgcgcttcccggaccaactgcaccaacgctgccgccctgtcccgactccccccccggcctggtcggcaggctcttgatagagtttacaagccctatgcccctagagagggtccagcgagagaatcccggcgtcctgatgggtggccgttataccccccctgattgcaccccagctcagaccgtggccgtgataatacctttccgtcaccgagagcaccacctgaggtactggctccactacctgcatccgatcctcaggcgacagagattgcggtacggtgtctatgtgattaaccaacatggagaagacacgttcaacagagccaagctgcttaatgtgggattcctggaggcactgaaggaagatgccgcctatgattgcttcatattttccgacgtggatctggtgcccatggacgataggaacctttataggtgtggtgatcagccacggcattttgccatagctatggataagttcggattccgactgccttatgctgggtattttggaggggtctcaggtctaagcaaagcccagtttctacgaataaatgggttccccaacgaatattggggctggggcggcgaggatgacgatatatttaatagaattagcttgacgggtatgaagatctcccgaccagacatacgaattggcagatatcgcatgatcaagcatgatagggacaagcacaatgaacctaatcctcagcgcttcactaaaattcagaatacaaaactaacgatgaagagggatggaattggttctgtgcgctatcaggtcttggaagtctcaaggcagcccctgttcacaaatataaccgtcgacataggtcgccccccttcctggccacctcgtgggtag

SEQ ID NO: 210749 - DNA, 1119 bp, synthetic construct
  misc_feature 1..1119: note = Description of Artificial Sequence: Synthetic coding sequence
  source 1..1119: mol_type = other DNA
atgagccggctgctgggcggcaccctggagcgggtgtgcaaggccgtgctccttctgtgcttgttgcattttttagtggctgttattctgtattttgatgtttacgcacagcacttggccttcttctctagatttagcgctaggggccctgcacatgcgcttcatcccgctgcctccagctcctcttcaagtagcaattgctccaggcccaatgccacagcaagcagcagtgggctacctgaagtgccctcagccctgcccggccccactgcccccactctgcctccttgcccagattctccgccaggtctggtgggcaggctgctcatagagttcaccagccccatgcccctggagcgcgtgcaacgcgagaaccccggggtattgatgggcgggcggtacacacccccagattgcacaccagcccagaccgtcgccgtgatcattccgttcagacatagagagcaccacctccggtactggcttcactacctgcatccaattctgcgccgccagagactcagatatggtgtctacgttattaaccaacatggagaggatactttcaaccgggctaaactcctgaatgtggggtttctggaggccctcaaagaggatgcagcctatgactgtttcatcttctcagatgtcgacctggtcccaatggatgatagaaatctgtaccgctgtggcgatcaacctaggcatttcgcgatagcgatggacaagttcggtttccgattgccctatgcagggtatttcggcggggtcagtggactaagcaaagcgcagttcctgcgtatcaatggcttccccaatgagtattggggatgggggggcgaggatgacgacatttttaaccgcatctctttgaccgggatgaagatctccagaccagacattcgcatcgggcgctatcggatgattaagcacgaccgggataagcataacgaacctaacccgcagaggttcacgaagattcaaaatacaaaacttaccatgaagcgggatggcattggcagcgtgaggtaccaagttctggaggtgtccaggcagcccctatttaccaacataaccgtcgacatcggacgacctccctcctggcctcccagggggtag

SEQ ID NO: 210750 - DNA, 921 bp, synthetic construct
  misc_feature 1..921: note = Description of Artificial Sequence: Synthetic coding sequence
  source 1..921: mol_type = other DNA
atgcccagcacccagctgctggccgccgccgccgccgccgccaccgcccctggccctacccctcctccattggctcccggttcattgcggtctcccgtcccgtgtcccgtgccccggctgcctcgatgccacccagtgctcacgagacacttggtcctacgcgttcagagagagaaccccggcgtgcttatgggcgggagatatacaccccctgattgcacccccgctcagactgtggcggtgataatcccattccgccacagggaacatcacttacgttactggctccattacctgcatcccatcctgaggcgtcaacgcttgcgctatggggtttatgtgataaatcaacacggagaagacacatttaacagagcgaagctgctcaatgtgggtttcctcgaagctctcaaggaggatgcagcttatgattgttttatctttagcgatgtggacctcgtaccaatggatgaccgcaacctgtatagatgcggggaccagcccagacactttgctattgccatggataagtttggttttaggttgccttatgcagggtatttcggtggggtgtccgggcttagcaaagcgcagtttctgcggattaacgggttcccaaacgaatattggggatgggggggggaggacgacgacatttttaatcgaatctctttgacaggaatgaaaatctcccgacctgatatcaggattggcaggtacagaatgattaagcatgatagggacaagcacaacgagcccaatccacagaggttcacaaagattcaaaataccaaactcacaatgaaaagagacggcatcggatccgtacggtatcaggtcttggaagtgagccggcagcctctattcacgaacattaccgtggatatcggaaggcctcccagctggccgcccagaggttag

SEQ ID NO: 210751 - DNA, 441 bp, synthetic construct
  misc_feature 1..441: note = Description of Artificial Sequence: Synthetic coding sequence
  source 1..441: mol_type = other DNA
atgctgcggcggctgctggagcggccctgcaccctggccctgctggtcggctctcaactggccgtgatgatgtatctgagcctggggggcttccgcagcctgtcggctctattcgggagagatcaggggccaacattcgactacagccatcccagagatgtgtattccaacctgagccatttacctggtgcccccggaggcccacccgcaccccagggtctaccctattgccctgaaagaagcccacttcttgtggggcctgtgagcgtgagtttttctccggtaccttccctggcggagatcgtggagaggaatccgagggtggagcccgggggacgttacagacctccagccgctctgccccccgcgccactcctcgccgcaccggccgcctgcttatggcatttgtgccacccccctggatggaagtggaatatatag

SEQ ID NO: 210752 - DNA, 1182 bp, synthetic construct
  misc_feature 1..1182: note = Description of Artificial Sequence: Synthetic coding sequence
  source 1..1182: mol_type = other DNA
atgctgcggcggctgctggagcggccctgcaccctggccctgctggtggggtcacaactggctgtgatgatgtacttaagcctcggggggttccgcagcttgagtgccctgtttggaagagaccaggggcctactttcgattattcccatccacgtgacgtttacagcaacctgtcccacctccccggagctcctggcggcccaccagccccacaagggcttccatactgccctgaaaggtctccactcctggtcgggcccgtgagtgtgtctttctctccagtgccatcattagccgagatcgtggaaaggaatccccgggtggagcccggaggcaggtatagacctgcaggctgtgaacccaggtccaggacggccatcatcgttcctcacagagccagagaacaccatttgagactccttttgtatcatctgcaccctttcctgcagcgacagcagttagcgtatggtatctacgtgattcaccaagcggggaacggaactttcaaccgcgccaaattactcaacgtcggcgtgagggaggcactgcgtgatgaggaatgggattgcctttttctccacgatgtcgacctgctaccagagaacgaccacaacttgtatgtgtgcgaccctcggggaccacgacacgtcgcagttgccatgaataaattcggttactctctgccctatccccaatatttcggaggagtgagcgcacttaccccggatcagtatctcaagatgaatggctttcccaatgaatattggggatggggtggtgaggacgatgacatcgccaccagagtgagactggccgggatgaagatatccagacctccaacatctgttggccactataaaatggtcaagcatcggggcgacaaaggcaacgaggaaaatcctcacagattcgatctactcgtgcgaactcagaatagttggacccaggacgggatgaacagtttgacgtaccagcttctggcacgcgaactaggacccctgtatacaaacatcactgcggatataggaaccgatcccaggggtccccgcgcccctagcggaccccggtacccccctggctctagtcaggcatttcgccaggaaatgctgcagcgtcggcctccagctcgtccggggcctctgtccaccgccaaccatacggctcttaggggtagtcactag

SEQ ID NO: 210753 - DNA, 1182 bp, synthetic construct
  misc_feature 1..1182: note = Description of Artificial Sequence: Synthetic coding sequence
  source 1..1182: mol_type = other DNA
atgctgcggcggctgctggagcggccctgcaccctggccctgctggtcggatcgcaactggccgttatgatgtacttgagcctcggcggtttcaggagccttagcgcactattcggaagggaccaaggacccacctttgactactctcatccaagggatgtttatagcaatctgtcccaccttcctggtgccccaggcggccccccagctccacagggccttccctactgtcctgagaggtcacctctgctcgttgggcccgttagcgtctcattctcgccagtgccctcactggccgagattgttgagagaaacccccgggtggaacccggtggacggtataggcctgctggctgcgaaccccggtctcggacggccatcatagtgccgcatagagcgagggagcaccacctacggctgctgttgtatcatctgcatccgtttcttcagcgtcagcagctggcttacggaatctatgtgattcaccaggccggaaatggtaccttcaaccgggcgaagctgctgaatgtgggcgtccgggaagcattacgagatgaagagtgggattgcctcttcctgcacgacgtcgacctgttaccagagaacgatcacaacctgtacgtttgtgatccacgcggaccccggcacgtcgccgtggccatgaacaagtttggctactccttaccatatccccagtacttcggaggggtgagcgctctgaccccggaccagtacttgaaaatgaatggtttccccaacgagtactggggttgggggggcgaagatgacgacatagctacacgcgttaggcttgctgggatgaagatttcccgcccgcctactagcgtcggtcattacaagatggttaagcacagaggggacaaaggcaacgaagaaaacccacatagattcgacctgctggtccggacccaaaattcttggactcaagacgggatgaatagcctaacgtaccagctgcttgcccgcgaactgggtccactgtacaccaacatcacagctgatataggaacggatccacgaggcccaagggctcccagcggacctaggtacccccccggaagtagccaggcattcagacaggaaatgctgcaacgcaggcccccggcccgccccggacctctgagcactgcaaatcacacgccaagcgaagtacacacctag

SEQ ID NO: 210754 - DNA, 1182 bp, synthetic construct
  misc_feature 1..1182: note = Description of Artificial Sequence: Synthetic coding sequence
  source 1..1182: mol_type = other DNA
atgctgcggcggctgctggagcggccctgcaccctggccctgctggtaggatcacagctggctgtgatgatgtatctttcacttggtggctttcgctcactgagcgctctgttcggtcgggatcagggtcccacgttcgactactcccacccgcgcgacgtgtacagcaaccttagccacctgcctggggcccccggaggcccaccagcccctcaggggctgccctactgccccgagagatcacccctacttgttgggccagtgagtgtctcctttagccctgtcccaagtttggctgaaatcgttgagagaaatccccgcgtggagcccggagggaggtatcggccagctggatgtgaaccacggagccgcacagctatcatcgtaccgcacagggccagagaacaccacctccggttactactttaccacctgcatccatttctgcaacgacagcagttggcctatgggatttacgtaatccaccaggctgggaacggcaccttcaacagagctaaactgttgaatgttggggtccgagaagcgctcagggacgaagagtgggactgtctcttcttacatgacgtcgatttgctgcccgaaaacgaccataatctctacgtttgcgatccacgggggccaagacatgtggctgtcgccatgaataagtttggctactcgttaccatatccgcaatactttggaggggtatcagctttgactcccgatcagtatcttaagatgaacggcttcccaaacgaatattggggttggggtggcgaggatgatgacatcgccactagagtgaggcttgctggaatgaagatctcacggcctccaacttctgtgggacactacaagatggtaaagcatcgaggggataagggaaatgaagaaaacccccaccggtttgatctgttagttagaactcagaactcatggactcaagatggtatgaattcccttacctatcagctgctcgcacgcgagctggggcccctgtacacaaatataaccgctgacatcggcacggaccctcgggggccaagagcgcctagcgggccccgataccctccaggctcgtcccaggcctttaggcaggaaatgctacagcgcaggcctcctgccagacctggccctctgagtacagcaaaccatactgctctgcgaggtagtcattag

SEQ ID NO: 210755 - DNA, 1113 bp, synthetic construct
  misc_feature 1..1113: note = Description of Artificial Sequence: Synthetic coding sequence
  source 1..1113: mol_type = other DNA
atgctgcggcggctgctggagcggccctgcaccctggccctgttcggcagagaccaggggccaacttttgattacagtcaccctcgcgatgtctattctaatctgtctcatctgcccggcgcccccggagggcctccagcaccgcaaggattaccatactgccccgagcgaagccctttactggtgggtcccgtgtcagtcagtttctcacccgtcccgtctcttgcagaaatcgtggagagaaacccaagagttgagccaggcggacggtaccgacccgcaggctgtgaacctcgctctcgcaccgccatcatcgtgccacatcgtgctagggaacatcatctacgcttgcttttgtatcatctgcaccccttcctgcagcgccagcaactagcttatggaatttatgttatccaccaggctggcaacggcacttttaatagagctaaacttctcaacgtgggcgtgcgagaggcgttaagggacgaagagtgggactgcctgtttctacatgacgttgatctccttccagagaacgatcacaatctgtatgtgtgtgacccccgtgggcctcggcatgtggcggtcgccatgaataagtttggttatagcttgccatatccccagtatttcggtggtgtgagcgccctgactccagatcaatacctcaagatgaacggcttccccaatgaatactggggttggggcggcgaagacgatgacatagcaactcgggttcgactggctggaatgaaaatcagccgtccacccacttccgtgggacattataagatggttaagcaccgtggagacaagggtaacgaagagaatccccatagatttgacttacttgttcggacacagaattcatggacccaagatggaatgaattccctcacgtaccagttattagcccgcgaactgggtcccctgtacacaaacatcactgctgacataggtactgacccacgaggtcctcgcgcacccagtgggcccaggtacccgcccggtagttctcaggcttttcgtcaagaaatgttgcaaagaagaccaccagcccgacctgggccactgtctacagccaatcacactgccctgcgaggcagccattag

SEQ ID NO: 210756 - DNA, 684 bp, synthetic construct
  misc_feature 1..684: note = Description of Artificial Sequence: Synthetic coding sequence
  source 1..684: mol_type = other DNA
atgctgcggcggctgctggagcggccctgcaccctggccctgctggtagggtcacagctggctgtgatgatgtatctgagcctgggtgggttcaggagcctgagtgcccttttcggaagggatcagggcccaactttcgactactctcacccccgggacgtatactcaaatctgtcgcacctcccaggagcgcccggcggccccccggcgccccagggcctaccatactgtccagaacgatcgcccctcctcgtgggtcccgtgagtgtgtcgttctcgcctgttcccagtctcgctgaaatcgttgagaggaaccctagggtggagccaggcgggcgatacagaccggcaggctgcgagccccgttctaggaccgcgattatcgttccccatagggcaagagagcaccatctccgcttgttgctctatcacttgcaccctttcctgcagcggcagcaattagcctatggaatctacgtaatacatcaggctggcaatggaacatttaatagggccaagttactaaacgtgggagtaagggaagccctgagagacgaggaatgggactgtctttttctgcatgacgttgacctgttgcctgagaacgaccataacctgtacgtgtgtgatccgcgagggccgcgccacgtcgccgtggcaatgaataagtttggttaccgctag

SEQ ID NO: 210757 - DNA, 1035 bp, synthetic construct
  misc_feature 1..1035: note = Description of Artificial Sequence: Synthetic coding sequence
  source 1..1035: mol_type = other DNA
atgggcttcaacctgaccttccacctgagctacaagttccggctgctgctgctcctcacactctgtctgaccgtcgtcggctgggctacttcaaattactttgttggagctatccaggagattcccaaggcgaaggaattcatggccaactttcacaaaacactcatcctgggcaaggggaaaacactcacaaacgaagcctccactaagaaggtggagctggacaattgcccctccgttagcccatatctgcgaggtcagagcaagctgatttttaagcccgacctcaccctggaagaagttcaggccgaaaacccgaaggtcagtcgcggacgatatcgcccccaggaatgtaaggccctgcaacgtgtggccatactcgtgccccatcggaacagagaaaagcacttgatgtacctcctcgagcatctgcacccatttctccagaggcagcagctggactacggcatatacgtgatacaccaggcagaaggaaagaaattcaatcgagctaagctcctcaacgtggggtatctagaggcgttgaaagaggaaaactgggactgtttcatttttcatgatgtggatttggtccctgagaacgattttaacttatataaatgcgaagaacaccccaagcacctggttgtggggcgtaactctaccggctatcgtctaaggtatagtggatatttcgggggggtcacagccttgtcaagagagcaattttttaaggtgaatgggttttcaaacaactactggggctggggaggcgaggacgatgacctgcggcttagggtcgaattacagcggatgaaaatttcccgacccctcccggaggtaggaaaatacacaatggttttccatacacgtgataagggtaatgaggtgaacgcggagcgcatgaagctgctgcatcaagtctcacgggtgtggcgaacagacggactgtcttcctgttcctataaactggtcagtgtggaacataatccattatatattaacatcacagtagacttctggtttggagcgtag

SEQ ID NO: 210758 - DNA, 1035 bp, synthetic construct
  misc_feature 1..1035: note = Description of Artificial Sequence: Synthetic coding sequence
  source 1..1035: mol_type = other DNA
atgggcttcaacctgaccttccacctgagctacaagttccggctgctattgctgctgacattatgtctgacagttgtgggttgggcaacttctaactactttgtgggtgcaatccaggagattcccaaagccaaggagtttatggcaaattttcataagactctgatcctgggtaaggggaagaccctcacgaacgaagcttcgactaagaaggtcgagctggacaattgtccatccgtttccccctacttgaggggtcagagcaaactcatatttaaacctgatctgacactggaggaagtccaagccgaaaaccccaaggtcagcaggggacggtatagaccacaagaatgtaaagcactccagagagtggccatcctcgtgccccacaggaaccgggagaaacaccttatgtacctgctggagcacctgcatccctttctgcagaggcagcaactggattacgggatctacgtgatacaccaagccgaggggaaaaaattcaacagagctaaacttctaaatgtgggctacctggaggcccttaaagaggagaattgggattgttttattttccacgacgtggacctagtccccgaaaacgacttcaatttatacaagtgcgaggaacatcccaagcacctggttgttggccggaatagcaccggttaccgactaaggtactcggggtacttcggaggcgtgaccgcgctctcgcgggaacagtttttcaaagttaacggcttctcaaacaactattggggttggggaggggaggacgacgacctgaggctgagagtcgagctgcagaggatgaagatcagtcggcctctaccagaggtcggcaagtacactatggtttttcatacacgcgacaaaggaaatgaggttaacgcggagcggatgaagctgctgcatcaggtgagtagagtctggcggaccgacgggcttagttcatgtagctacaaactggtatcagttgagcacaatccactttatattaatattacagtggatttctggtttggtgcctag

SEQ ID NO: 210759 - DNA, 21 bp, synthetic construct
  misc_feature 1..21: note = Description of Artificial Sequence: Synthetic coding sequence
  source 1..21: mol_type = other DNA
atgggcttcaacctgacctag

SEQ ID NO: 210760 - skipped

SEQ ID NO: 210761 - DNA, 168 bp, synthetic construct
  misc_feature 1..168: note = Description of Artificial Sequence: Synthetic coding sequence
  source 1..168: mol_type = other DNA
atgggcttcaacctgaccttccacctgagctacaagttccggctgctgctgctgctgacattgtgtctcactgtggttgggtgggccacatccaactatttcgtcggcgcgattcaggaaatcccaaaagcaaaggagtttatggccaacttccacaaaactctgtag

SEQ ID NO: 210762 - DNA, 66 bp, synthetic construct
  misc_feature 1..66: note = Description of Artificial Sequence: Synthetic coding sequence
  source 1..66: mol_type = other DNA
atgggcttcaacctgaccttccacctgagctacaagttccggctgcttcttctccttacactctag

SEQ ID NO: 210763 - DNA, 411 bp, synthetic construct
  misc_feature 1..411: note = Description of Artificial Sequence: Synthetic coding sequence
  source 1..411: mol_type = other DNA
atgggcttcaacctgaccttccacctgagctacaagttccggctgctgctattactgacactctgtctgaccgtagtgggctgggctacgagcaattactttgtgggggccatccaagagatccccaaagctaaagagttcatggcaaacttccacaaaaccctgattttaggaaaggggaaaaccctgaccaatgaagccagcactaagaaagtggagctggacaattgtccatcagtctccccctacctacgaggtcagtccaagctgatttttaagcccgacttgacacttgaggaagttcaagccgagaaccccaaggtgtcgagggggaggtatagacctcaggagtgcaaagcactccagagggtggccatactggtgcctcatcgcaacagggaaaagcattag

SEQ ID NO: 210764 - DNA, 357 bp, synthetic construct
  misc_feature 1..357: note = Description of Artificial Sequence: Synthetic coding sequence
  source 1..357: mol_type = other DNA
atgggcttcaacctgaccttccacctgagctacaagttccggctgctgctgttgttaacactgtgtctcacggttgtggggtgggctacttctaattacttcgtgggcgctattcaagaaatccctaaagccaaggaattcatggcgaacttccataagaccttaatattagggaagggtaaaactctcactaatgaggcaagcactaaaaaagtcgagctggataattgtccctctgttagcccgtacctgaggggccaaagcaagttaatctttaagccagacctcaccttggaggaggtgcaagccgaaaaccctaaagtgagccgtggccgctatcgaccccaggagtgctag

SEQ ID NO: 210765 - DNA, 1035 bp, synthetic construct
  misc_feature 1..1035: note = Description of Artificial Sequence: Synthetic coding sequence
  source 1..1035: mol_type = other DNA
atgggcttcaacctgaccttccacctgagctacaagttccggctgctacttttgctcacactgtgcttgacagttgttggttgggccacatctaactatttcgtgggagccatccaggaaattccgaaggcaaaggaattcatggctaacttccacaaaaccttaattcttgggaaagggaagaccctaacgaacgaagcgtctactaagaaagtggaactagataattgcccttctgtaagtccatatctgcgcggacagtcaaagttgatctttaaacccgacctgaccctggaggaggtgcaggctgagaaccctaaggtctcacgggggcgataccgcccacaggaatgtaaggctcttcaacgagtggcaatcttggtcccccataggaatcgagagaaacatttgatgtacctcttagagcacctgcacccgttccttcagcgccaacaactagactacgggatttacgttattcatcaggcagagggtaaaaagttcaaccgcgcgaaacttctgaacgtgggctatttagaggccctaaaggaggaaaactgggactgttttatctttcacgatgtcgacctagtccctgagaacgatttcaacctgtataaatgtgaagagcacccaaagcacctggtcgtcggccgaaattccacaggctataggctgcgctacagcggatacttcgggggcgtcacagctctgtctagggaacagttcttcaaagtgaatggcttttccaacaactattggggctggggaggcgaggatgatgacctgcgtctccgggttgagctgcagaggatgaaaatttcccggccactgccagaggtgggcaaatacactatggtctttcatactcgggacaagggtaatgaggtaaatgccgagagaatgaagttactgcatcaggtgagcagggtgtggagaaccgacggcctctcttcttgtagctacaagttggtgtcagtggaacacaaccctctgtacattaacatcaccgtcgatttttggttcggagcttag

SEQ ID NO: 210766 - DNA, 129 bp, synthetic construct
  misc_feature 1..129: note = Description of Artificial Sequence: Synthetic coding sequence
  source 1..129: mol_type = other DNA
atgggcttcaacctgaccttccacctgagctacaagttccggctgttgctgcttcttaccttatgcctgaccgtcgtgggatgggctactagcaactatttcgtgggtgccatccaggagatcccgtag

SEQ ID NO: 210767 - DNA, 1167 bp, synthetic construct
  misc_feature 1..1167: note = Description of Artificial Sequence: Synthetic coding sequence
  source 1..1167: mol_type = other DNA
atgcgggcccggcggggcctgctgcggctgccccggcggagcctgttggcggctctgttcttcttctccttgtccagtagccttctctattttgtatacgttgcacccgggattgttaatacgtacctctttatgatgcaagcgcaggggatcctgatcagagataacgtgcgcaccattggggcccaggtgtacgagcaagtgctgagatctgcatatgctaagcggaatagtagcgtcaatgattctgactatccgctagacctgaaccactctgaaactttcctgcaaaccacgacctttttacccgaggactttacttacttcgcaaatcatacctgcccagaacgtctgccttccatgaaaggcccgattgatatcaacatgagcgagatcggaatggactatattcacgagctgttttcaaaagaccccaccattaagctgggaggccattggaagccaagcgactgcatgccgagatggaaggtggcaattctgatcccattcaggaaccggcacgagcatctcccagtcctgtttcgccacctacttcccatgctgcagagacaacggctccaattcgctttctatgtagttgaacaagtcggcacccagcccttcaatagagctatgctctttaatgtcggcttccaggaagccatgaaagacctggactgggattgcctgatcttccatgacgtagatcatattcccgaatccgacaggaactactatggttgtggacagatgcctaggcattttgcgaccaagttggataagtatatgtatttgttgccctatacggaatttttcggcggcgtttctggcctgacagtggaacagtttcgcaaaatcaacgggttccccaatgccttctggggctgggggggggaagatgacgacctctggaacagagtccagaatgcaggatactccgtttctcggccagaaggcgacaccgggaaatataaaagcatcccacaccatcacagaggtgaagtgcaatttctcggcagatacgcactcctccgaaagtccaaggaaagacaggggctggatggactcaacaacctgaactatttcgccaatatcacatacgatgctttgtacaagaatataacagttaacctaactccggagctagcccaagttaatgaatactag

SEQ ID NO: 210768 - DNA, 1032 bp, synthetic construct
  misc_feature 1..1032: note = Description of Artificial Sequence: Synthetic coding sequence
  source 1..1032: mol_type = other DNA
atgagcgtgctgcggcggatgatgcgggtgagcaaccggagcctgctcgcatttattttctttttctcactctcctccagttgcctgtactttatttacgtggcacccgggattgactatcccgagggtaataattcctctgactacttggtccagaccactacatacttaccagagaacttcacttatagcccttatcttccatgtccagagaagctcccctatatgagaggatttctgaatgttaacgtgagcgaagtgagttttgacgagatacaccagttgttctctaaggacctggacatagaaccaggaggacattggcgccccaaggattgtaagccccggtggaaggtcgctgtattgattcccttccggaatagacacgagcacttgcctatattctttctgcacctgatcccaatgctccagaagcagcgactggaatttgctttttacgtgatagaacaaacaggcacccagccatttaatcgggctatgctgttcaacgtcggctttaaggaggctatgaaagactctgtctgggattgtgtgattttccacgacgtagaccacctgccagaaaatgatagaaattactacggatgcggcgaaatgcctcgccatttcgccgccaagctggataagtacatgtacatactgccctacaaggagtttttcggaggagtgtccggactgacggttgaacagtttcgtaagatcaatggctttcctaacgctttctggggctggggcggcgaggacgacgacctctggaaccgggtccactacgctggctacaatgtcacacggcctgaaggagaccttggcaagtacaaatcaattccacaccaccacagaggagaggtgcagttcctgggccgttataagctgctaagatattccaaggagcggcagtacatcgatgggttgaacaacctgatttaccgcccaaaaatcctggtggaccgactgtacactaatatttccgtcaacttaatgcccgaattggcacctatcgaagattattag

SEQ ID NO: 210769 - DNA, 1149 bp, synthetic construct
  misc_feature 1..1149: note = Description of Artificial Sequence: Synthetic coding sequence
  source 1..1149: mol_type = other DNA
atgagcgtgctgcggcggatgatgcgggtgagcaaccggagcctgctggccttcatcttctttttctccctcagcagctcctgcctttatttcatctatgtggcaccgggaatagccaatacatacctgtttatggtccaggcccgcggcatcatgctcagggaaaatgtcaaaacgatcggccacatgatacgactgtatacaaacaagaactcaaccctgaacggaaccgactacccagaggggaataacagcagcgattacctggtccagaccactacttatcttccagagaattttacatactctccatatctgccatgtcctgagaagctgccctacatgagggggtttctgaacgtgaacgttagtgaagtgagctttgatgaaattcaccagctattctcaaaggatctagatattgaacctggagggcactggcgaccgaaggattgtaagcctagatggaaggtggcagttctcatccctttcagaaaccggcatgagcatttgccaatctttttcctccacttgattccaatgctgcagaaacagagattggagttcgccttttatgtgattgagcagactggcacacagcctttcaacagggccatgctgttcaacgtgggatttaaagaagccatgaaggattccgtttgggattgcgttatcttccatgacgtagaccatctgcctgaaaatgatcggaactactatggctgtggcgaaatgcccaggcatttcgcggctaagttggacaagtacatgtatattctaccctacaaggaattctttggtggggtgtccggacttaccgtagagcagttcagaaaaatcaatggctttcccaacgctttttggggatggggcggcgaggacgatgacctatggaatcgcgtacactacgcaggatacaacgtgacccggcccgagggcgatctaggcaagtataagagcataccacaccaccaccgcggggaagtgcaattcctggggaggtacaaattgcttcggtactctaaggagcgacagtacatagatggtctgaataacttgatctaccgccccaagatcctcgtggaccggctgtacaccaacatctcagtgaacctgatgcccgaacttgctcccatcgaagattactag

SEQ ID NO: 210770 - DNA, 1032 bp, synthetic construct
  misc_feature 1..1032: note = Description of Artificial Sequence: Synthetic coding sequence
  source 1..1032: mol_type = other DNA
atgagcgtgctgcggcggatgatgcgggtgagcaaccggagcctgttggcattcatctttttcttttctctgagttcaagctgtttatattttatttacgtcgccccaggcatcgccaatacatatctgtttatggtgcaagccagaggcattatgctgagggaaaatgttaagacaatcggtcacatgattcggctatacaccaataagaacagtacacttaacggtactgattacccagaaggtaataactcgagtgactacctggttcagacaactacttatctgcccgagaactttacatacagcccatatctcccttgtccagaaaagctgccctatatgagggggttcctaaatgttaatgtcagcgaggtgagctttgatgaaatccaccaactgttctccaaagacctagacattgaaccgggtggacactggaggcctaaggactgcaagccccgctggaaaactgggacccaaccgtttaatcgggctatgctgtttaatgtgggttttaaggaggctatgaaggactccgtttgggattgtgttatctttcacgatgtggatcacctgcctgaaaatgatcggaattactacggttgcggtgagatgccccggcactttgccgctaaactggacaaatacatgtacatcttaccctacaaagagttcttcggcggagtatcaggattgactgttgaacagttccggaagatcaacgggttcccaaacgccttctggggatggggtggggaagatgatgatctctggaaccgcgtacactatgctgggtacaacgttactagacccgaaggggatctcgggaagtataaaagcatcccccatcaccacagaggcgaggtccagtttctcggccggtataagctgctgcgctactcaaaggagagacaatatattgatggactcaacaacctgatctaccgtcctaaaatcctcgtggatagactgtatactaacatatccgttaatctgatgccggagttggctccgatcgaggattattag

SEQ ID NO: 210771 - DNA, 1047 bp, synthetic construct
  misc_feature 1..1047: note = Description of Artificial Sequence: Synthetic coding sequence
  source 1..1047: mol_type = other DNA
atggccgagaaggtgctggtgaccggcggcgccggctacatcggcagccacacggtcctcgaattacttgaggccggctatctgcctgtggttatagacaattttcataatgccttcaggggaggtgggagcttgccagaatccctgaggagagtgcaggaactgacaggccgatcagtggaatttgaggagatggacatcctggatcagggcgcactgcagcgtctgttcaagaagtacagttttatggccgtcatacatttcgcgggtcttaaggctgtgggtgagtcagtccagaaaccactggactattatcgagtgaatctgactgggaccattcagctcctcgagataatgaaagctcacggtgtgaaaaacctcgttttttcatcctctgccaccgtgtatggtaacccccagtatctgcccctagacgaggcacacccaaccggtggctgcacaaatccgtacggtaagagtaaatttttcattgaagaaatgatcagggatctgtgtcaagcagataaaacttggaacgccgttttattgcggtatttcaacccaaccggcgcacacgcatcaggttgcatcggggaggatcctcagggtatccctaataacctgatgccatacgtgagtcaagtagctattggtcgtagagaagccctcaatgtgtttggcaacgactatgatactgaggatggtacgggcgtgagggactacatccatgtggtagaccttgctaagggtcacattgcagctctacgaaagctgaaagagcagtgcggatgccgaatctacaatctgggaacaggcaccggctatagcgtccttcagatggtccaggcaatggagaaagcctcaggaaaaaagattccttataaggtggtggccagaagagagggagacgtggccgcctgttacgcgaatcctagtctggctcaggaggagcttggctggactgctgctctgggtttggatcggatgtgtgaagatttgtggaggtggcagaagcagaatcctagtggcttcggaactcaagcctag

SEQ ID NO: 210772 - DNA, 777 bp, synthetic construct
  misc_feature 1..777: note = Description of Artificial Sequence: Synthetic coding sequence
  source 1..777: mol_type = other DNA
atggacatcctggaccagggcgccctgcagcggctgttcaagaagtattcttttatggctgtgatacactttgctggactgaaggccgtgggcgaatccgtacaaaagcctctggactattatagagtcaatttgacaggcactatacaactcttggaaattatgaaagcacacggggtaaagaatctcgtcttttcttcaagcgccacagtatacggtaatccgcagtatctgccacttgacgaggctcatcccacaggaggctgtacgaatccatatggcaaatcgaagttcttcattgaagagatgattcgggacttatgtcaggcagataagacctggaacgccgtcctgcttcgttactttaatccaacaggggctcacgcttccggttgtattggggaggatccccaagggattccaaacaatttgatgccctacgtcagccaagtggccatcgggagacgtgaggctctcaatgtgtttggaaacgactatgataccgaagacggaacaggggttagggactacatccatgtggtggacctggctaaggggcatatagcagctctaaggaaactcaaagaacagtgcggctgcaggattccgtataaagttgtggcgcggagagaaggtgacgtggcggcctgctacgccaatcctagcctggcccaggaggagctgggttggaccgctgccctgggactggaccgtatgtgcgaagatctgtggagatggcagaaacagaatccttccggattcgggacccaagcctag

SEQ ID NO: 210773 - DNA, 684 bp, synthetic construct
  misc_feature 1..684: note = Description of Artificial Sequence: Synthetic coding sequence
  source 1..684: mol_type = other DNA
atggacatcctggaccagggcgccctgcagcggctgttcaagaagtattcctttatggctgtcattcactttgccggtctcaaagcagtcggagagtctgtacagaaaccgctcgattattatcgcgtaaatctgaccggcaccattcaattgctggaaatcatgaaggctcacggcgttaagaatttggtctttagctcctccgccaccgtttatggcaacccgcagtatttaccactagacgaggcgcatccaaccggaggctgtaccaacccctatggtaagagcaaatttttcattgaggagatgatcagagacctgtgtcaggccgacaagacgtggaacgctgtccttcttcggtacttcaaccctacaggggctcatgcgagcgggtgtataggcgaagacccgcaggggattcctaataatctaatgccttacgtatctcaggtggctatagggcgacgggaagcattgaacgtctttgggaatgactatgatactgaggacggtacaggagtccgcgactacattcatgttgtcgacctagccaagggacacattgcagcactacgaaaactaaaagagcagtgcgggtgcagaatttataatctgggcaccggaacggggtactctgtgcttcagatggttcaggcaatggagaaggcttccggaaagaagtag

SEQ ID NO: 210774 - DNA, 588 bp, synthetic construct
  misc_feature 1..588: note = Description of Artificial Sequence: Synthetic coding sequence
  source 1..588: mol_type = other DNA
atggccgagaaggtgctggtgaccggcggcgccggctacatcggcagccacactgttttagagttgttagaggcaggttacttgccagtggtcattgacaactttcacaacgcctttcggggaggaggctcactaccagaaagcctgcggcgggtgcaggaactgactgggagatccgttgaatttgaagagatggatattcttgatcagggcgctctccagcgcctctttaagaagtacagtttcatggcagtgattcactttgctggcttaaaagcggtaggagaatcggtacaaaaacccctggactactaccgggtgaaccttacgggcacaatacagttgctggagattatgaaagcacatggggtcaaaaatctcgtgttcagctcaagtgcaactgtctatgggaatccacagtatctgccattggatgaggcgcatcctacaggcggttgcaccaatccttacggaaagtctaaattctttatcgaagaaatgatcagggacttgtgccaggctgacaagacctggaacgccgtcttactccgctatttcaaccccactggcgcacatgccagtggctag

SEQ ID NO: 210775 - DNA, 720 bp, synthetic construct
  misc_feature 1..720: note = Description of Artificial Sequence: Synthetic coding sequence
  source 1..720: mol_type = other DNA
atggacatcctggaccagggcgccctgcagcggctgttcaagaagtattcctttatggctgtgatacacttcgccggcttgaaagcggtaggggagagtgtacaaaagccactggattattatagggtcaatctcaccggcacaatacaactgctcgagataatgaaggctcatggtgtgaagaaccttgtcttcagctccagcgcaaccgtgtacggcaacccccagtacctgcccctcgatgaggctcatccaacgggcggatgcacaaacccttatggcaagtctaagttctttattgaagagatgatccgtgacctgtgccaagccgacaaaacctggaatgccgtcctgctccgatactttaatcctaccggcgcccacgcgagcggttgtattggcgaggacccccagggcattccaaacaacttaatgccttatgtttctcaggtggccatcggacgacgtgaggcactgaatgtgttcggtaacgactacgacactgaagacggcactggagtcagagattacatccacgtggtcgacctcgccaaagggcatattgctgctcttagaaagctgaaggagcagtgcgggtgtaggatcccctataaagtcgtggcccgccgggagggggacgtggctgcatgttatgcgaatccgtccttggcacaagaggaactgggttggacagccgctctcggattggatcggatgtag

SEQ ID NO: 210776 - DNA, 585 bp, synthetic construct
  misc_feature 1..585: note = Description of Artificial Sequence: Synthetic coding sequence
  source 1..585: mol_type = other DNA
atggccgagaaggtgctggtgaccggcggcgccggctacatcggctctcacaccgtgctagaactgctcgaggcaggatacctgcctgtggtgatcgacaacttccacaacgcgttccgcggcggtggcagccttcccgaatccctccggcgggtgcaggaactaacgggcagaagcgtagagttcgaggaaatggacatccttgaccagggcgcgctccagcgcctcttcaaaaaatacagcttcatggctgtcatacactttgctgggttgaaagctgtgggcgaatccgttcagaaaccactagattattacagggttaaccttactgggaccatccagctgctagaaatcatgaaggctcacggcgtcaaaaacctggtgttcagctcctcagcgacagtttatgggaatccgcagtatctgcccctggatgaggcacatcccacaggtggctgcactaatccctacggcaagtctaaattcttcatcgaggagatgattcgagacctgtgtcaggcagacaaaacatggaatgcggtcctgcttaggtactttaacccaacaggagctcacgcctcatag

SEQ ID NO: 210777 - DNA, 327 bp, synthetic construct
  misc_feature 1..327: note = Description of Artificial Sequence: Synthetic coding sequence
  source 1..327: mol_type = other DNA
gtggccatcggccggcgggaggccctgaacgtgttcggcaacgactacgacaccgaagatgggactggggttcgcgactatatacacgtagtcgatctcgctaaaggacacatagcagccttaaggaagttgaaagaacaatgcggttgcaggatcccatacaaggttgtcgctagaagggagggagacgtggccgcctgctatgctaaccccagcctggcgcaggaggaactgggctggacagctgccctggggttggatagaatgtgcgaagacctgtggagatggcaaaagcagaacccttctggctttgggactcaggcttag

SEQ ID NO: 210778 - DNA, 1119 bp, synthetic construct
  misc_feature 1..1119: note = Description of Artificial Sequence: Synthetic coding sequence
  source 1..1119: mol_type = other DNA
atgaagtacctgcggcaccggcggcccaacgccaccctgatcctggccatcggcgccttcacacttttgctgtttagcctcctagttagtcctcctacatgtaaagtgcaggagcagccccctgccatccccgaggccttggcttggccaacgccacccacaagacctgcccccgccccctgtcatgcaaacacctctatggtgacgcacccagatttcgcaacccaaccacagcacgtgcagaatttcctcctttataggcactgtaggcactttccgttgctacaggatgtcccaccaagcaagtgtgcccaacccgtgttcctgctgctggtgatcaaatcttctcccagcaattacgtaaggcgtgaacttttgcgtcgaacttggggccgcgagagaaaggtgaggggcctgcagcttcgattgctatttcttgtcggaacagcctcaaatcctcatgaagcccgcaaagtgaaccgacttctggagctcgaggcacaaacccatggcgacatcctgcagtgggactttcacgactcgttttttaacctgactttgaaacaagtactgttccttcagtggcaagaaacacgatgcgcgaacgccagtttcgtgcttaacggggacgacgatgtcttcgcccacacagacaatatggtgttctacctgcaggaccacgatccaggaagacacctcttcgtggggcagctgatacagaatgtgggcccaatcagggccttctggtccaagtactatgtgccagaggttgtgacgcagaacgaacgttatccaccctactgcggaggggggggctttctgctgtcgcggtttacggccgccgctctgagaagagccgcccacgtgctggacattttccccatcgacgacgtgttcctcggcatgtgtctcgaactcgagggattaaaaccggcgtctcactcaggcattcggacctcaggcgtccgcgcaccgtctcaacggctgtcatcattcgacccctgtttttacagggatctgctgctcgtccatcggttcctgccttatgagatgctgctgatgtgggacgcactgaaccagcctaatctaacctgcggcaatcagacacagatttattag

SEQ ID NO: 210779 - DNA, 1137 bp, synthetic construct
  misc_feature 1..1137: note = Description of Artificial Sequence: Synthetic coding sequence
  source 1..1137: mol_type = other DNA
atgctgcccccccagcccagcgccgcccaccagggccggggcggcagatccgggttgttgcccaaaggtccggctatgctgtgtcgactgtgctggctggttagctattccctagcggtattgctcctggggtgtcttctgtttctccggaaagccgctaagccggccggagaccccacggcccaccagcctttttgggccccccctacaccacggcactcccgttgccctcccaaccacactgtttcgagtgcttctctgtcattgccatcacgtcacagacttttcctgacgtaccggcactgcagaaacttcagcatcctgctcgagcctagtgggtgctccaaagacacatttctgcttctggcaattaagtctcagcccgggcacgtagaacgacgcgcagctatcaggtccacgtgggggcgggtaggaggctgggcccggggcagacagctcaaacttgtgttcctgctaggcgtagcaggatccgccccccccgcccagcttctggcttacgagagtcgcgagtttgatgacattctgcagtgggattttactgaagacttcttcaatctcactctgaaggagctgcacctgcagcgctgggtggtcgcagcctgcccacaagcacactttatgctcaaaggtgacgacgacgtcttcgtccacgttcctaacgtcttagagtttcttgatggatgggatcccgcccaggacctgctggttggagatgttatcagacaggccctgcccaatagaaacactaaggtcaaatattttattccgccctcgatgtacagggcaacccactaccccccatacgccggtggcggaggctacgttatgagtcgggccacagtccgaaggcttcaggccatcatggaagacgctgagctgttcccaatcgacgatgtttttgtggggatgtgtctgcgtcggctgggcctgtcaccaatgcatcatgctggctttaagacattcggcatccggcgcccattggacccactagacccatgtctttacagaggactgttattggtgcacagattatctccccttgagatgtggacaatgtgggcacttgtcactgatgagggcttgaagtgtgcggcaggccctatacctcagcgctag

SEQ ID NO: 210780 - DNA, 1062 bp, synthetic construct
  misc_feature 1..1062: note = Description of Artificial Sequence: Synthetic coding sequence
  source 1..1062: mol_type = other DNA
atgctgtgccggctgtgctggctggtgagctacagcctggccgtgctcctgctgggttgcctgctcttcctccgaaaggctgccaagcctgccggcgacccaaccgctcaccaacccttttgggctcctccaacccctcgccactcgcgctgtccacccaatcacacagtgagctcagcctctctgtccttgcccagtagacacaggcttttcctgacttatcggcattgccgcaatttttccattttgctggaaccgtccgggtgtagtaaagatacctttctgttgctggcgatcaaaagtcagcccggacacgtggaaagacgcgcagctataagatcaacctggggcagggtgggcggctgggctcggggaaggcagctcaagctggtgttcctgcttggcgtcgcaggctctgcgccacctgcacagctgctggcctacgagtctagggaattcgatgatattttacagtgggactttactgaagactttttcaacttgaccctcaaagagcttcaccttcagagatgggtcgtggctgcctgtccccaggctcacttcatgctgaagggggacgacgacgtcttcgtccatgtgcctaacgtcctggaatttttggacggctgggaccccgcacaggatctgctcgtgggggatgtgatccggcaggccctgcccaacagaaatacaaaggtaaaatatttcatccccccctctatgtacagagccactcattatcccccatacgcagggggagggggatatgtcatgtctcgtgcgacagtcagacgcctgcaggcaattatggaggacgcagaactctttccaatcgacgacgtgttcgttgggatgtgtctgcggagactgggcttgtccccaatgcaccacgctggattcaagacattcgggatcagacggcctctagatcctctagacccttgcctgtaccggggactcctactcgtccaccgcctgtcacctcttgaaatgtggaccatgtgggcccttgtaacagacgagggcttaaaatgtgccgcaggcccaatcccgcagcggtag

SEQ ID NO: 210781 - DNA, 1062 bp, synthetic construct
  misc_feature 1..1062: note = Description of Artificial Sequence: Synthetic coding sequence
  source 1..1062: mol_type = other DNA
atgctgtgccggctgtgctggctggtgagctacagcctggccgtgcttctgttgggatgtctgctattcctcagaaaagctgcgaaaccagcgggcgatccgacagcccaccagcccttttgggccccgccaacccctcgacactccagatgtcctcccaaccataccgtcagcagtgcctccctgtcgttaccatcacggcacagactttttctcacttatcgacattgtagaaatttctccatccttttagaacccagtggatgcagtaaagatacctttttgctgcttgccattaagagccagcccggacatgttgaacgcagagcggcaattaggagcacttgggggcgagtgggaggctgggctcggggaaggcagctgaagcttgtgttcctactgggagtggctggaagcgctcctccagcgcagctcctggcgtacgaaagtcgggagtttgacgacatcctccagtgggactttaccgaagatttctttaaccttaccctgaaggagctgcaccttcagcggtgggtcgtcgctgcttgccctcaagcccatttcatgctcaagggcgacgacgacgtctttgtgcacgttcccaacgttctagaattcctggacggatgggatccagctcaggacctgctggtcggcgacgtgatcagacaggcgctgccaaatcgcaatactaaagttaagtattttatcccaccatcaatgtatcgcgcgacccattaccccccttatgccggggggggcggctatgttatgtcccgagccaccgttcggagacttcaagccattatggaggatgccgaattattccccatcgacgatgtgttcgttgggatgtgtctgcgtcgtttgggcctaagcccaatgcaccatgcagggtttaagacattcggaattagaaggccgctcgacccactagacccgtgcctgtatcggggccttctcttggtgcaccggctgtctccgttagaaatgtggactatgtgggccctcgtgacagatgaggggttaaagtgcgccgccgggcctattccccagcgttag

SEQ ID NO: 210782 - DNA, 1485 bp, synthetic construct
  misc_feature 1..1485: note = Description of Artificial Sequence: Synthetic coding sequence
  source 1..1485: mol_type = other DNA
atgttcgagatcaagaagatctgctgcatcggcgccggctacgtgggtggccctacctgctcggttatcgcacacatgtgcccagaaatccgcgtcaccgtggtcgatgtgaatgagtcaagaataaatgcctggaacagccccacactccccatttatgagcccggcctcaaggaagtggtggagagttgtcggggaaagaatctctttttctccacgaatatagacgacgccattaaggaagccgaccttgtatttatctcggtcaatacacccacaaagacctatggtatggggaaggggagggcggcggaccttaaatatatcgaagcttgcgctcggaggatcgtgcagaactcgaacggatataagattgtgactgagaagagtacagtacccgtgagagcagccgaatcaatccggaggattttcgatgctaatactaaaccaaacctcaaccttcaggttctttccaacccagagttcctggctgagggaaccgctatcaaagatctaaaaaaccctgaccgggttttgatcggcggtgatgaaacacccgaagggcaaagagccgtgcaagcattgtgtgctgtctatgaacattgggtccctagggagaagattctgacgacaaatacgtggtcctctgaactcagtaagcttgctgccaatgcttttctggctcagcgtatttcatcaatcaacagcatctcggctctgtgcgaggccacaggggctgacgtggaagaagttgctaccgccatcggtatggatcagcggatcggaaataagtttctgaaggcctcagttgggtttggaggctcatgcttccaaaaagacgtgcttaaccttgtgtacttgtgtgaagcattaaacttgccagaggttgctcgctattggcaacaggtcattgacatgaatgattatcaaaggaggcggtttgcctcacgaataatagacagtctgttcaatacagtgacagataagaaaatcgccatcctgggctttgccttcaagaaggataccggcgatacacgagagtcctccagcatttatattagcaagtatctaatggatgaaggcgcgcatctgcacatatatgatccgaaagtccctcgcgagcagatcgtagtggacctgtcacatcccggagtatcagaggacgatcaggtctcacgactggtgaccatctcaaaggatccgtatgaggcttgtgacggtgctcatgcagtggtcatctgcactgaatgggatatgttcaaagaactcgactatgagagaattcacaaaaagatgctgaagcccgcgtttatcttcgacggcagacgcgtactcgatggcctgcacaatgagctacaaactatcggattccagattgagacaatcgggaaaaaagtatcaagtaaacggatcccctacgctccctctggcgagattcccaagttctccctacaggatccacccaacaagaaaccgaaggtctag

SEQ ID NO: 210783 - DNA, 1284 bp, synthetic construct
  misc_feature 1..1284: note = Description of Artificial Sequence: Synthetic coding sequence
  source 1..1284: mol_type = other DNA
atgttcgagatcaagaagatctgctgcatcggcgccggctacgtgggcggcccaacctgttctgtgatagcgcacatgtgtcccgagattagggtgaccgtggtcgacgtgaacgaatctcgcattaatgcatggaactcccccacgttgccaatttacgagccagggttaaaggaggtggtggaaagctgcagaggtaagaatctttttttctccaccaatatcgacgatgccataaaggaagcggacttagtcttcatcagtgttctgtcaaatccagagtttcttgctgagggcacagctatcaaagacttgaagaaccccgatagagttctgataggcggggatgagacaccagagggccagcgcgctgttcaggcactctgcgcagtctatgaacactgggtcccacgcgagaaaattctaacaacgaacacgtggagttccgagctatcaaagttggccgccaacgcatttctggcccagcgcatctcctcaatcaattctatttcggcactgtgcgaggccactggtgccgatgtcgaggaagtagcgactgctatcggaatggaccaaagaatcgggaataaattcctgaaggcctctgtgggcttcgggggctcctgcttccagaaagacgtcctcaacttagtgtacttgtgtgaggccctgaacttgcctgaagttgcaaggtattggcagcaggttatcgatatgaatgattatcagcgtcgccggtttgcctccaggattatcgacagtctgtttaatacggtgaccgacaaaaagatcgccattctcgggttcgcctttaagaaggacaccggcgataccagggaatcatcgtccatttatatttccaagtatctcatggatgagggagcacatctccatatctatgatcccaaggtccctagagaacaaattgtggtggacttgtcccatccaggcgtatcagaggacgaccaggtgtcgcgcttggttaccatcagcaaagatccttacgaggcgtgtgatggcgcacatgccgtcgtgatttgcacagagtgggacatgtttaaagagctggattatgagcgcatccataagaagatgctgaagcccgcgttcatcttcgatggccggagggtactggacggtcttcacaatgaactgcaaacaattgggttccagatagaaaccataggcaagaaagtgtcttctaaaaggatcccatatgccccatccggcgaaatcccaaagttttccctgcaggatcccccaaataagaagccgaaggtttag

SEQ ID NO: 210784 - DNA, 168 bp, synthetic construct
  misc_feature 1..168: note = Description of Artificial Sequence: Synthetic coding sequence
  source 1..168: mol_type = other DNA
atgttcgagatcaagaagatctgctgcatcggcgccggctacgtggggggccccacttgcagcgtcatagcccacatgtgccccgagattagagtgaccgtcgtggatgttaacgaatctcggataaatgcatggaattcacccacattacccatatatgaagactag

SEQ ID NO: 210785 - DNA, 258 bp, synthetic construct
  misc_feature 1..258: note = Description of Artificial Sequence: Synthetic coding sequence
  source 1..258: mol_type = other DNA
atgttcgagatcaagaagatctgctgcatcggcgccggctacgtgggaggacctacttgtagcgtgatcgctcacatgtgtcccgagatccgggtcaccgtggtcgacgtgaacgagtctcggattaacgcatggaactccccgactctgcccatctatgagccaggcctgaaggaagtcgtggagtcatgtagaggcaagaacctgttcttcagtaccaatatcgatgatgctattaaggaggccgatctggtttag

SEQ ID NO: 210786 - DNA, 1485 bp, synthetic construct
  misc_feature 1..1485: note = Description of Artificial Sequence: Synthetic coding sequence
  source 1..1485: mol_type = other DNA
atgttcgagatcaagaagatctgctgcatcggcgccggctacgtgggcggtcccacttgtagtgtaattgcacatatgtgtcccgagattcgggttaccgtggtcgatgttaacgaatctcgcattaatgcatggaatagccctaccctgcccatctatgagcctggccttaaagaagtggtcgaaagctgcaggggtaaaaatctgttcttcagcactaacatcgatgacgccattaaagaggctgacctggtgttcatctctgtcaatactcctaccaaaacatatggcatgggaaaaggacgggcagccgacctgaagtatatcgaagcctgtgctaggcggatcgtccagaactcgaacggctataagatcgtcacagaaaagtcgacagtgcccgttagggcagcggaatcaattcgacggatcttcgatgcaaatacaaagcccaatctcaatcttcaagtgctcagtaatcctgaattccttgctgagggaaccgcgatcaaggatctgaaaaaccctgacagggtgctgatcggaggggatgaaacacctgaaggccaacgcgctgtacaagccctgtgcgcagtttatgagcactgggtcccacgggagaagatcctcaccactaatacctggtcatctgagctgtccaaactggccgctaatgcattcttggcccaacggatctcttctattaactccataagcgccctgtgcgaggctactggagccgacgtggaagaagtggccactgcaattggaatggaccagaggattggcaacaagtttctgaaggcaagtgtcggcttcggtggatcctgcttccagaaggacgtgctcaatctggtgtacctttgtgaggcccttaacctacccgaagtggcgagatactggcaacaggtcattgacatgaatgactaccaaaggcgacggttcgcgtcccggattatcgactctctgttcaacacagtgacggataagaagatcgcaattcttgggttcgcattcaagaaggacactggtgatacccgggagtcctcctccatctacatctccaaataccttatggatgagggtgcgcatctgcacatttacgatcctaaggttcctcgcgagcagattgtggtcgatctgtcccaccctggcgtgagtgaagatgaccaggtctcccgactggtgactatttctaaagacccatatgaggcatgtgacggcgctcacgccgtggtgatttgtaccgaatgggatatgtttaaagaactggattacgagcggattcacaagaaaatgctcaagcctgccttcattttcgacgggagaagagtgctggatggtttgcacaatgaactgcagaccattgggtttcagatagaaacaattggtaagaaggtgtcctctaaaagaatcccctacgccccttcgggtgagattcccaagttctcattgcaggatcctccaaacaaaaaaccaaaggtgtag

SEQ ID NO: 210787 - DNA, 1194 bp, synthetic construct
  misc_feature 1..1194: note = Description of Artificial Sequence: Synthetic coding sequence
  source 1..1194: mol_type = other DNA
atgggcaagggccgggccgccgacctgaagtacatcgaggcctgcgcaagaaggattgtgcagaatagtaacgggtacaaaattgtgaccgagaagtctaccgtgcccgtcagggccgctgaaagcattcgcagaatctttgatgccaacactaagccgaacctcaacctgcaggtgctctccaaccctgagtttttggcggagggaactgcaataaaggatctaaaaaatccggacagggttctgatcggcggagatgaaactccagagggacaaagggccgtgcaggcattgtgtgccgtatacgagcactgggttccccgggaaaaaatcttgaccactaacacctggagtagtgagctgtccaaactggcggccaatgcgtttctggcccagcgaatctcttctatcaattcaatttcggccctgtgtgaagctaccggtgcggacgtggaggaggttgccacggcgatcgggatggaccagcggatcggaaacaagttcctgaaggcatcagtgggattcggcggaagctgcttccagaaagatgtcctgaacctggtctatttgtgtgaagccttaaatcttccagaggtggcccggtactggcagcaggtcattgatatgaatgactatcagcggaggcgtttcgcatcccgtattatcgattcactcttcaacacagttactgacaagaaaatcgcaattttgggcttcgccttcaagaaggatacgggcgacaccagagaaagctcgtccatctacataagcaaatatttaatggatgagggggcccacctgcacatatacgatcctaaagttcctcgcgaacagatagtcgtcgacttgtcccaccccggagtcagcgaggatgaccaggtctctagacttgtgaccatcagtaaggatccttacgaggcctgcgacggtgcccatgcagtggtcatctgtactgagtgggacatgttcaaagagctggattacgagcgtatccacaaaaagatgctgaaaccagctttcatcttcgacggcaggcgcgtgctggacggactccacaatgaacttcagaccattggcttccaaatcgaaaccataggcaagaaagtctcatcaaagaggattccctacgcgccctcgggcgagattcccaagttcagcttacaggatcctcccaacaagaagccaaaagtgtag

SEQ ID NO: 210788 - DNA, 393 bp, synthetic construct
  misc_feature 1..393: note = Description of Artificial Sequence: Synthetic coding sequence
  source 1..393: mol_type = other DNA
atgttcgagatcaagaagatctgctgcatcggcgccggctacgtggggggccccacgtgctccgttatcgctcacatgtgtcctgagataagggtgaccgtggtcgatgttaacgagtcaagaattaacgcctggaattccccaacactccctatctatgaaccgggcctcaaagaagtggttgagtcctgccgcggcaaaaatcttttcttctctactaacatcgacgatgcaatcaaagaagccgacttggtgttcatctctgtcaacactccaactaaaacatatggtatgggaaagggtagagcggccgatctgaaatatatagaagcttgtgctaggaggatcgtccagaattcaaacgggtataagatcgtgactgagaagagctag

SEQ ID NO: 210789 - DNA, 162 bp, synthetic construct
  misc_feature 1..162: note = Description of Artificial Sequence: Synthetic coding sequence
  source 1..162: mol_type = other DNA
atgttcgagatcaagaagatctgctgcatcggcgccggctacgtgggtggtccaacgtgtagcgtcatcgcccacatgtgtcccgaaattcgggttactgttgtagacgtaaatgagtcccggattaatgcgtggaatagcccaacactgcctatctactag

SEQ ID NO: 210790 - DNA, 168 bp, synthetic construct
  misc_feature 1..168: note = Description of Artificial Sequence: Synthetic coding sequence
  source 1..168: mol_type = other DNA
atgttcgagatcaagaagatctgctgcatcggcgccggctacgtgggtgggcccacttgttccgtgattgcccacatgtgccccgaaattcgggtcactgtagtagatgtgaatgagagcaggataaacgcatggaattcacccaccctgccaatttacgaagactag

SEQ ID NO: 210791 - DNA, 462 bp, synthetic construct
  misc_feature 1..462: note = Description of Artificial Sequence: Synthetic coding sequence
  source 1..462: mol_type = other DNA
atgttcgagatcaagaagatctgctgcatcggcgccggctacgtgggaggacctacctgttccgtcattgcccacatgtgtcctgaaatcagagtgactgttgtggacgtgaatgaatctaggataaacgcatggaatagtcccaccttgcctatctacgaacccgggctgaaggaggtagtggagagctgtagagggaagaacctcttctttagcaccaacatcgatgacgcgattaaagaggccgacctggtatttatatctgttaacacaccaaccaaaacttacggtatggggaagggccgggccgctgatctcaagtacatagaagcttgtgcccgtaggatagtacagaacagcaacgggtataaaattgtgactgaaaagtcaaccgtcccagttagagctgccgagtccatacgcaggattttcgatgctaatacaaagcccaacctgaattag

SEQ ID NO: 210792 - DNA, 546 bp, synthetic construct
  misc_feature 1..546: note = Description of Artificial Sequence: Synthetic coding sequence
  source 1..546: mol_type = other DNA
atgtggagcagcggcctgctgatccaggacagcaccatcatgttcgaaatcaaaaaaatttgttgtattggagccgggtatgtcggcggaccaacatgtagcgttatcgcccacatgtgtcctgagattcgagtcactgtggtggacgtgaacgaatcccgtatcaacgcttggaattctcccaccctgccaatttacgaaccggggctgaaggaggtcgtggaatcctgcagagggaagaatctcttcttctctacaaacattgacgatgctatcaaagaagctgacctcgtttttatttccgtgaacacaccaaccaagacttatggcatgggcaagggacgggccgccgatttgaagtacatcgaagcgtgtgctcgaaggattgtgcagaactctaacgggtataaaatcgttaccgagaaatcaacagtccccgtccgagccgcagagagcatacgcagaatctttgatgcgaacaccaagcccaatctcaacctgcaggtgctcagtaatcctgagttcttagcagagggtaccgcttag

SEQ ID NO: 210793 - DNA, 1185 bp, synthetic construct
  misc_feature 1..1185: note = Description of Artificial Sequence: Synthetic coding sequence
  source 1..1185: mol_type = other DNA
atggccctgctggacctggccctggagggcatggccgtgttcggcttcgtcctcttcctggtgctgtggttaatgcatttcatggccattatctacacacgtttgcacctgaataagaaggcaacagacaagcaaccctattcaaaactgccaggggtgtccttacttaagcccctcaagggcgtcgaccccaacctaatcaacaacctggagacattctttgaactggactatcccaagtacgaagtactgctttgtgtccaggatcatgatgaccccgccatcgatgtatgcaagaaattgctcggaaagtaccctaacgtggacgcccgcctgttcattggtggaaaaaaagtgggtatcaaccctaaaattaataacctgatgcccggttacgaagttgccaagtacgacctgatatggatctgtgattccggcataagggtgatacccgacaccctgaccgacatggttaaccagatgactgagaaggtgggactcgttcatgggcttccgtatgtcgcagatcggcagggatttgctgctaccctggaacaagtgtactttggcacttcacatcccaggtattatatttctgccaatgtaaccggctttaagtgcgtgactggtatgagctgtctaatgcgcaaggatgtcctggaccaagccggcggtttgatagcctttgcccagtacatagcagaggattattttatggccaaggccatcgctgatcgaggctggcgcttcgcaatgtccacgcaggtggctatgcaaaatagcggctcctatagcatcagtcagttccagtcgcggatgattcgatggaccaagcttaggataaatatgctgcccgcaaccatcatatgcgagcccatctcagaatgcttcgtcgcatccctgatcatcgggtgggccgctcaccatgtgtttaggtgggatattatggtgttttttatgtgtcattgcttagcatggttcatcttcgactatatccagcttcgcggcgtgcagggcggaaccctttgtttttccaagctggactacgccgtcgcctggttcattcgggagtcaatgacaatctatattttccttagtgctctctgggatcccaccatctcatggagaacaggtcgatataggctgaggtgcggagggacggcagaagagattctagacgtatag

SEQ ID NO: 210794 - DNA, 4668 bp, synthetic construct
  misc_feature 1..4668: note = Description of Artificial Sequence: Synthetic coding sequence
  source 1..4668: mol_type = other DNA
atgggctgcaagggcgacgccagcggcgcctgcgccgccggcgccctgccagtgaccggagtttgttacaagatgggggtgttggttgtacttacagtcctttggcttttcagtagtgtgaaagccgatagcaaagcaataacaacctctctgactacgaagtggtttagtactcctctgctgctggaggcatctgaattcttggccgaggactcccaggagaaattttggaatttcgtggaagctagtcagaacatcggcagtagcgaccacgacggcacagactatagttactatcacgccattttggaggcagcattccagtttctcagcccgcttcaacaaaacttatttaaattttgcctgtcgctgagatcttactcagcaactattcaggctttccaacaaattgccgcggacgaacccccgccagaaggttgtaacagcttcttctcggtgcacggaaagaaaacctgtgaatctgacaccctggaagccctgctgctcacagcttcagagcggccaaaaccacttctatttaagggcgaccaccgctatcctagtagtaatccagaatcacctgttgttattttctactctgaaatagggtccgaggaattttccaacttccataggcagctgatttccaaaagcaatgccggtaaaatcaattatgtgttccgacattatatatttaacccccggaaagaacccgtgtatctgtcaggatatggtgtggaactggcgattaagtccaccgagtataaagcaaaggacgatacacaagtgaaaggaaccgaagtaaataccaccgtaataggcgaaaacgatccaattgacgaggtacaagggtttctgttcggcaaactgcgcgatctgcaccccgatctggagggacagttgaaggagctcaggaaacacctggtggagtccacaaacgaaatggcccctctgaaggtttggcagctgcaagatctctccttccagacagccgctaggattctggccagccctgtcgaacttgccctggtggtgatgaaagatctcagtcagaactttccaacaaaggccagggctatcaccaagacggctgtatcaagtgagctgcgaaccgaggtggaagagaatcaaaaatacttcaagggcaccctgggtctgcaacctggagacagcgccctttttattaacgggctccatatggacctggacacacaggacatattctcgctctttgacgtactgcgcaatgaagccagagtcatggaggggctgcatcggctcgggattgagggcctgtccctgcataacgtcctgaagctcaacatacagcccagcgaagcggactacgccgtagatattcggtctccagcaatatcctgggtgaacaacctcgaagtcgacagtagatacaacagttggccttcatcactacaggagcttctccgcccgacctttcccggcgtgattcgccagatcagaaaaaacttacacaatatggtctttatcgttgaccccgcacacgaaacaacggctgaactgatgaacactgccgagatgttcctatctaaccacatcccccttagaattggattcatttttgttgtgaatgacagtgaagacgtggacggtatgcaggatgctggcgtggctgtgcttcgcgcttataattacgtggcacaggaggtagacgattatcacgctttccaaacgttgacacatatctacaataaagtcaggacaggggaaaaggtgaaagtcgaacacgtggtctctgttctggagaaaaagtacccatatgtcgaagtcaactccattctcggaatagatagcgcctatgacaggaacagaaaggaggcccgtgggtactacgaacagacgggcgtaggccccctgcccgttgtcctcttcaatgggatgccctttgagcgcgagcaactggacccagacgaactggagactatcaccatgcacaagattctcgagacgactaccttctttcaaagggcagtgtacctcggtgagttaccccacgaccaggacgtggtagagtacattatgaatcaacccaacgtggtgccgaggattaacagccggatcctgacagcagaaagggactatctggatctgacggcctctaacaacttttttgtcgacgattacgcccgcttcaccatactcgattcgcaaggaaaaaccgcggccgtagccaatagcatgaattacctgacaaaaaaaggaatgagtagcaaagaaatatacgatgatagtttcatcaggccggtgacgttctggattgttggggatttcgatagtcctagcggccgccaactgctctacgatgccatcaagcaccagaagtcctccaacaacgtcagaataagtatgatcaacaatcctgccaaggaaatatcctatgagaatacacagatttctagggccatttgggcagcactccagacgcagacaagtaacgctgccaaaaactttatcactaagatggcgaaggagggtgccgcagaggcactggcggcaggcgccgatatcgctgagttctctgtgggagggatggatttctcgctctttaaagaagtgtttgagtcctcaaaaatggatttcattctgtcccatgccgtctattgccgcgacgtccttaagttaaaaaaaggccagagagctgtgattagcaatggccgcatcattggtcctctagaagactcagagctttttaatcaagacgactttcacttgctcgagaacataatcctgaaaacctccgggcagaagattaagtctcacatacagcagctgcgggttgaggaggacgtggcgagcgacctggtcatgaaggtggacgcactgctctctgcccagccgaaaggcgatcctcggattgagtatcagttctttgaggaccgccattctgcgataaagctgcgccctaaggagggagagacttatttcgatgtggtcgctgtggtggatccggtgactcgcgaagcgcaacggctggcaccactgctgctggtgctagcccaactgatcaacatgaatctccgggtctttatgaattgtcagagcaagctcagtgacatgccccttaagtcattctatcgatacgtacttgagcctgagatatcttttacttccgacaattcattcgccaagggaccaattgcaaaatttctagacatgccgcagagcccgctttttacgctgaacctcaacacccctgagtcctggatggtagaatcagtgaggaccccctacgacctggataacatatacctggaggaagttgattccgttgtggcggctgagtatgagctggaatacctgctcctcgaggggcattgttacgatatcaccacaggccagcccccgaggggactccagttcacattgggcacttctgccaatcccgtaatcgtggacactattgtaatggcaaatctcggctatttccagctcaaggctaatcctggcgcctggatcctccgactcaggaaaggcagaagtgaggatatttaccggatttacagtcacgatggaacagactccccacctgatgcggatgaagttgtcattgttctgaacaacttcaaaagtaagatcattaaggtcaaggttcagaaaaaggctgatatggtcaacgaagatctcctctcggatggaacatctgagaacgagagcggcttctgggactctttcaagtgggggtttacaggccaaaagacagaagaagttaagcaagataaggacgacatcataaacattttttcagtagcctccggccatctttatgagagattcttacggattatgatgctctccgtgctgaagaacaccaaaactcccgttaagttctggttcttgaagaactatctgtccccgacttttaaagagttcattccttacatggctaacgagtataatttccagtacgagcttgtgcagtataagtggccaagatggttgcatcagcagacagagaagcagagaattatctgggggtataagatcctgttcctcgacgtgctgttcccccttgtggtggataagttcctgtttgtggacgcagaccaaattgttcggaccgacctgaaagagctgcgcgattttaatctggatggggccccttacggttatactccattctgcgattcccgtcgggagatggacgggtaccgtttttggaaaagcggctactgggcatcacacctggcaggacgaaaataccacatctctgcactttacgttgtggatcttaaaaaattcaggaaaatagcagctggcgatagactacgtggacagtaccaaggcttatctcaggaccccaactccctaagcaaccttgaccaagatcttcctaacaatatgatccaccaggttcctattaagagcctgccgcaagaatggctttggtgtgagacatggtgcgatgacgctagcaaaaagagagccaaaactatagatctgtgtaataacccaatgaccaaagagccaaagctcgaggctgcagtgcggatcgttccggaatggcaggactatgatcaagagataaagcagctccagatcaggtttcagaaagagaaggaaactggggcactttataaagagaaaaccaaggaaccatctagggaagggcctcagaagagagaggagctctag

SEQ ID NO: 210795 - DNA, 4596 bp, synthetic construct
  misc_feature 1..4596: note = Description of Artificial Sequence: Synthetic coding sequence
  source 1..4596: mol_type = other DNA
atgggcgtgctggtggtgctgaccgtgctgtggctgttcagcagcgtaaaggcggactctaaagcgattactacctccctgaccaccaaatggttctcgacacccctactgcttgaggcatccgagttccttgctgaagattcccaggaaaagttctggaatttcgtagaggcgtcacagaatattgggtccagtgatcacgacggaaccgactatagctactaccacgctattttggaggcagccttccaatttttgtctcctcttcagcagaatctgtttaagttctgtctgtccctgaggtcttactcagccacgatacaagctttccagcagatcgccgccgatgagcctcctccagaaggctgtaacagctttttttccgtgcacggcaagaaaacttgcgaatccgacaccctcgaggcgctgttgctaacggcctcggaacggcccaagccgctgctgtttaagggtgatcacaggtatcctagctctaacccagagagtcccgtcgttattttttacagcgagattgggtccgaggagttttccaactttcaccgacagctgatttccaagagcaacgcaggcaagatcaactatgtgttccgacattacatttttaacccaagaaaggagcctgtgtacctgagtggatacggcgtggagctggctatcaaatccactgaatacaaagccaaagacgatacccaggtgaaagggaccgaggtgaacaccacagtgatcggtgaaaatgaccctattgacgaggtacagggctttctgtttggcaaactgcgcgacttgcatcctgacctggaaggacagctcaaagaactcagaaagcacctcgtagaatctaccaatgagatggccccattgaaggtatggcagctccaggatctaagttttcagacagcagcgcgtatactggctagccctgtggaattggcattggtggtgatgaaggatctatcgcaaaactttccaaccaaggccagagcgatcacaaaaaccgcggtatcttcagaactgaggactgaggtagaggaaaatcagaaatacttcaaggggacgctcggactgcagcctggggactctgcactgtttataaacgggctgcatatggacctggatacccaggacatttttagcctattcgatgttctccggaatgaggctcgggtgatggaaggcttgcataggctggggatcgagggcctctcattgcacaatgtgctgaaattgaacatccaaccatccgaagccgattatgccgtcgatatccgcagccccgccatctcttgggtgaataacctggaggtagatagcaggtacaactcctggccttcctctctccaagagctacttcgccccacattccctggagtaatccgtcagatacgtaagaacctgcacaacatggtattcatcgttgacccagcccacgaaaccaccgctgaacttatgaatacggctgaaatgtttcttagcaatcacatccctctgcggattggattcatatttgtagtgaatgactctgaggatgtcgacggaatgcaagacgctggggttgcagtgctgcgcgcctataattatgtggctcaggaagtagacgattaccacgccttccagacattgactcacatctataataaggtcagaactggagagaaggtgaaagtggaacacgttgtctcagtcttggaaaagaagtacccgtatgtagaggtaaatagcatattgggcattgattctgcatacgatagaaatcgaaaagaggcccggggctattacgaacaaacaggggtgggacccctgcctgtggtattatttaacgggatgccgttcgagagggaacagctcgatcccgatgaattagaaaccataactatgcataaaatcctggaaaccaccactttcttccagcgagcagtgtacctgggggagctacctcacgaccaggatgtcgtggagtacattatgaatcagcccaacgtggtcccaaggatcaattctaggatcctgaccgccgagagagattatctggatctgaccgcctccaacaatttttttgtcgacgattatgctcgcttcaccatattggacagccagggcaagacggctgccgttgccaattccatgaactacctgacaaagaaggggatgtcctccaaagaaatctatgacgacagctttatccgccccgtgaccttttggatcgtcggcgattttgacagtcctagcggacgccaactcctgtatgatgccattaagcaccaaaaaagcagcaataacgtgagaatcagcatgataaataacccagccaaagagatcagctacgaaaacacccagatcagtcgtgcgatctgggcagcactgcagacccagacatcgaatgccgccaaaaatttcattacaaagatggcgaaagaaggggcggccgaggctctcgccgctggggcggacattgctgagttctctgtcggaggaatggattttagcctgtttaaggaagtgttcgaaagttctaagatggatttcatacttagccatgccgtgtactgccgagacgtactaaagctgaaaaaggggcaaagggcggtgatctcaaacggccgaatcattggtcccctggaggactctgaactctttaaccaggacgacttccatctgttggagaacataatcttgaagacatcaggccaaaaaataaagagccatattcaacagctgcgcgtggaggaagacgtggcatcggatctggttatgaaagtcgacgccctgctgagtgctcagcctaagggcgacccacggattgagtatcagttcttcgaggataggcactctgccatcaagctgcggcctaaagagggtgagacatattttgacgtcgttgccgtggtcgatcccgtaacgagagaggcgcagcgtctggctcctctgctgctggtcctcgcccagcttatcaacatgaaccttcgcgtgttcatgaactgccagtccaaattatctgacatgccacttaagtccttctacagatacgtgttagagcccgaaatcagctttacaagcgacaacagttttgccaagggcccgatagctaagtttctggatatgccccaaagtcccctgttcacattaaatctgaatacacctgagtcgtggatggtggagagcgtacgaacaccgtatgacctggataacatttaccttgaggaggtggattcagtggtcgcagcagagtacgagctggagtatttgctgctggaagggcattgctacgacatcacaacagggcagcctcccaggggacttcagttcaccctaggcacgagcgccaacccagtcatagtcgacaccattgttatggctaatctaggttacttccagttgaaggcaaaccccggggcctggattttgagactgagaaagggtcggtctgaagatatttatcgcatttattctcacgatggtacagactcaccaccagatgccgacgaggttgttattgtgttaaataattttaagtcaaagatcatcaaagtgaaggttcaaaaaaaggcggatatggttaacgaggatctgctctcggatgggactagcgagaatgaaagcggtttttgggacagttttaaatgggggtttaccgggcagaagacagaggaagtgaagcaggacaaagacgatattatcaacatatttagtgtggccagcggacacctttacgagaggttcttgcgaattatgatgttgtctgtgctgaagaatactaagacaccagtcaagttctggttcctcaagaactatctttcgcctacgttcaaagagtttattccctacatggcaaatgaatataactttcagtatgaactggtccagtataaatggccaagatggttgcatcagcagaccgagaagcagcgcattatatggggctataagatactgtttctggatgtgttgtttccactggttgtggacaaattcttgttcgtggacgccgatcaaatcgtgcggaccgatttgaaggagctgcgtgatttcaacttggacggtgccccttatgggtacacacctttttgtgacagccggcgggagatggatgggtatcggttctggaagagcggatattgggcctcccacttggccgggagaaaataccacatctctgctctatatgtcgtagacctcaaaaagttccgaaaaatcgctgccggcgataggctgagagggcagtaccaggggctcagtcaggaccctaatagccttagcaaccttgatcaagatttgcctaacaacatgattcaccaggtgcccattaaatctttacctcaagaatggctgtggtgcgaaacctggtgtgacgacgcaagcaagaagcgggcaaagacgattgacttgtgtaataatcctatgacgaaagaacctaagctcgaagcagccgttaggattgtgcccgagtggcaggattacgatcaggaaataaagcagctacagattcggttccaaaaggagaaggagacgggggctctttataaagagaagacaaaggaacccagccgggaaggacctcagaaacgtgaggaactgtag

SEQ ID NO: 210796 - DNA, 843 bp, synthetic construct
  misc_feature 1..843: note = Description of Artificial Sequence: Synthetic coding sequence
  source 1..843: mol_type = other DNA
atggcccccgccaaggccaccaacgtggtgcggctgctgctgggctctaccgcactgtggctgagccagctaggttctggcacagtcgctgccagcaaaagcgttaccgctcatcttgctgccaagtggcccgagaccccactgctgctggaggccagtgaattcatggctgaggaatctaatgagaaattttggcagttcctagagacagtgcaagagctcgctatttacaaacagaccgagtccgattactcatactataatttaatactgaaaaaggccggccagtttctggataacctgcatattaatctgctgaagtttgcattttccatcagagcgtattcgcctgccatacagatgttccaacagattgcagccgacgaaccccctcccgacggatgcaatgcctttgtggttattcacaaaaaacatacatgtaagatcaatgaaattaaaaagcttctcaagaaggccgctagtcgtaccaggccctacttgttcaaaggagaccataaattcccaactaataaggaaaacttgccagttgttattctttacgccgagatgggaaccaggaccttctctgcctttcataaggttttgtccgaaaaggcacagaacgaagagatcttgtacgtgctcaggcactatattcaaaagccttcctcgaggaaaatgtacctcagcggctatggggttgaactggcaatcaaaagcactgagtacaaggccttggatgatacacaggtgaagaccgtgactaacactaccgtcgaagatgagaccgaaaccaatgaggtacagggcttcctctttggcaaactgaagctagtctactag

SEQ ID NO: 210797 - DNA, 837 bp, synthetic construct
  misc_feature 1..837: note = Description of Artificial Sequence: Synthetic coding sequence
  source 1..837: mol_type = other DNA
atggcccccgccaaggccaccaacgtggtgcggctgctgctgggctcgacggccctgtggctgtctcagctggggtccgggacagtggccgcttccaagtccgtaactgcccatcttgccgccaagtggcccgaaaccccattactgctggaggctagcgagttcatggccgaggagtcaaatgagaaattttggcagttcctggagacggttcaagagctggccatctataaacagacagaaagtgactacagctactataacctgatcctgaaaaaggccggacagtttctggacaaccttcacatcaatctgctcaaattcgccttctcgattcgggcctacagtcctgctattcagatgtttcagcagatcgctgctgacgaaccaccccccgacggatgcaacgctttcgtggttattcacaaaaagcatacctgcaaaatcaacgagataaaaaagctcttgaagaaggcagcctctcggactcggccctatttattcaagggagaccataagtttcccaccaacaaggagaacctgcctgtggtaattttgtatgcagaaatgggtacgcgcactttcagtgcatttcacaaggtactctcagaaaaggcccagaatgaggaaattctctatgtgctgagacactatattcaaaagccaagctcacggaaaatgtacctgtctgggtatggtgtggagctggccatcaagtcaacagaatataaggctttagacgacacccaggtcaagaccgtcacaaatacgaccgttgaggacgagaccgagacaaatgaagtgcagggttttctgttcgggaagttaaaatcttag

SEQ ID NO: 210798 - DNA, 786 bp, synthetic construct
  misc_feature 1..786: note = Description of Artificial Sequence: Synthetic coding sequence
  source 1..786: mol_type = other DNA
atggcccccgccaaggccaccaacgtggtgcggctgctgctgggctctaccgccctttggctttcgcagctcgggtccggaacagtggcggcctcaaagtccgtcactgcccatctcgcggctaagtggcccgaaacacccctgttactggaagcaagcgaattcatggctgaagagagcaacgagaagttctggcagttccttgagaccgtccaagagcttgcgatttacaagcagaccgaaagcgattattcctactacaatttaattctgaaaaaggccggtcaatttcttgataacctacatataaatctgctcaagtttgcatttagtatccgggcctactcccctgccatacagatgttccaacaaattgctgccgacgagcccccccccgatggttgtaatgctttcgtggtgatccacaagaagcacacctgcaagattaacgagatcaagaaactgctgaagaaagcagcaagtcgcacccggccctatcttttcaaaggcgatcataagttccccacaaataaggagaacttgcctgtggttatcttatatgccgaaatgggtacgcgcactttttcggcatttcacaaggttttatccgaaaaggcccaaaatgaagaaattttatacgtgttgcgacattatattcagaagccctccagccgcaaaatgtacctgagtggttatggggttgaactggcgatcaagagcaccgaatataaagctcttgatgacactcaggtcaaagtgttccaagatccagaggcttttttctag

SEQ ID NO: 210799 - DNA, 4551 bp, synthetic construct
  misc_feature 1..4551: note = Description of Artificial Sequence: Synthetic coding sequence
  source 1..4551: mol_type = other DNA
atggcccccgccaaggccaccaacgtggtgcggctgctgctgggctcgacagccctctggttatcacaattgggatcaggaaccgtggcagcttccaaatctgttaccgctcacttggccgccaagtggcctgagacccccctgctgctggaagccagcgagttcatggccgaggaatcaaacgagaaattttggcagttcctcgagactgtccaggaactggcaatttacaagcaaacagaatcagattatagctactacaacttgatcctcaaaaaagctggacagttcctggataacctgcatattaacttgcttaagtttgcattctctatccgagcttactcaccagccatccagatgttccagcaaatagccgctgatgaaccacccccagacggctgcaatgcttttgtcgttatccataagaaacatacttgtaagatcaacgagattaagaaattgctcaagaaagcagcaagcagaaccagaccatacttattcaagggtgaccacaaattccccactaacaaagagaatctgcccgtggttattttgtacgctgaaatgggaacgcgtaccttctctgcttttcacaaggtactgtccgaaaaagctcaaaacgaggaaattctgtatgttctgcggcactacatacagaaaccaagtagccggaagatgtacctgagtgggtatggcgtcgagctggctattaagtcgactgagtacaaggccctggacgacacgcaggttaagacggtgacaaacaccacagtggaagatgagacagaaacaaacgaggtccaggggttcctgtttgggaagctgaaagagatttactccgacctccgggacaatcttaccgcattccagaagtatctcattgagtctaacaaacagatgatgccattaaaggtctgggaactccaggatcttagcttccaggctgcctcacagattatgtcggcccccgtttacgattccataaaactcatgaaggacatttcccagaattttccaatcaaggctaggtctctcactcggatcgccgtgaaccaacacatgagagaggaaataaaagaaaatcaaaaagacctgcaggtgagattcaagatccagcccggagatgcaaggctctttattaacggcctgcgcgtggatatggatgtgtatgacgcattttctattctggacatgctgaaactggaaggcaaaatgatgaatgggctgcgcaatcttggaattaacggcgaagatatgtccaaattccttaaactgaatagccatatatgggagtacacatatgtccttgacatccggcattcctcaattatgtggatcaacgacttagagaacgacgatctctacattacctggcctacttcctgtcaaaaactgctgaagccggtgttcccgggatccgtgccctcaattaggcgaaactttcacaacctggtactgtttatcgatcccgcccaagaatacaccctggactttattaagctggcggatgtcttctactctcatgaggtgcctctgcggattggattcgtcttcatccttaatacagacgatgaggtcgacggtgccaatgatgctggagtcgccctttggcgggcattcaactacatcgcggaagaatttgatatttccgaagccttcatctcgattgtgcacatgtatcagaaggtcaaaaaagaccagaatatcctgactgtggacaatgtgaagtccgtgttacagaacacgttcccacatgcaaatatttgggacatcctaggtatacattcaaagtacgatgaagagcgcaaggcaggggctagtttttacaaaatgaccggcctggggccccttccgcaggcactatacaacggcgaaccttttaagcatgaggagatgaatattaaggagttgaaaatggctgtgttgcagcgaatgatggatgccagcgtctatcttcaacgagaggtgttccttggaaccctgaatgaccgaaccaatgctatagacttcctgatggaccggaacaatgtggtgccccgtattaataccctgatcctgcgaacaaatcaacagtacctgaacctgatctctacttctgtcactgcagatgtagaagactttagtactttctttttcctggatagtcaagacaaatctgcagtgatagcaaaaaatatgtactaccttacccaggacgacgagagcattattagcgcagttaccctttggatcatagctgactttgacaaaccctctgggcgtaagttactttttaatgccctgaagcatatgaaaacatcagtgcacagtagactggggattatatacaacccaacctctaagatcaatgaggagaatactgccatttcacgcggcatcctggccgccttcctcactcagaagaatatgtttttgagatctttcttgggccagctagcaaaagaggagatcgccaccgcgatatattccggggataaaattaagacctttctgatagagggaatggataaaaacgcgtttgaaaaaaaatacaatactgtcggagttaatatcttcaggacccaccaattgttctgtcaggacgtgctgaagctgagaccgggagaaatgggcatcgtctctaacgggagattcctgggccccctggatgaagatttttacgccgaagacttttacctgctcgaaaagatcacctttagcaacctgggcgaaaagattaagggcattgtagagaatatgggaatcaacgccaacaacatgagcgacttcatcatgaaagttgacgccctgatgtcgtccgtaccgaagcgagccagccgctacgacgtaactttccttcgagaaaaccactcggtgataaagacaaatcctcaggagaatgacatgttttttaacgtgatcgctatcgtggaccccctgactcgtgaagctcagaaaatggcccaactgctcgtggtgctcggtaagatcatcaacatgaagatcaaacttttcatgaattgtagggggcggctgagcgaggcgccattggagagcttctacaggtttgttctggagcccgaactgatgagtggcgccaacgatgttagctcactcggccccgtggctaagtttctggatataccagaaagcccactgctgattctgaatatgattactcccgagggctggttagtcgagaccgttcactcaaactgtgatttagacaacatccacctcaaagatacggaaaaaaccgtaactgcggaatacgagcttgaatacctcctgctcgagggccagtgtttcgacaaagtgactgagcagccccctcgaggcctacagttcactctcggtaccaaaaataaacctgctgtggtggacacgatagtgatggcgcaccacggctacttccagctcaaggcaaatcccggtgcctggatattgaggctgcatcaggggaagtcagaggacatctaccaaattgtagggcatgaaggtacagacagtcaagcagatctcgaggatattatcgtggtgctgaatagtttcaaatcaaaaatactcaaggtgaaggtgaaaaaagagacagataaaatcaaggaggacattttaactgacgaggacgagaaaacaaagggcctatgggacagtatcaaatcgttcaccgtttccctgcacaaagaaaacaaaaaagagaaggacgttttaaacattttttctgtggcgagcggacacctttacgaacggttcctgcgtataatgatgctatctgtgctgaggaacacaaagactcccgtcaagttttggctgctgaagaactacctcagtccaaccttcaaggaggttattccacacatggctaaggaatacggtttcaggtacgagctggtgcagtacaggtggcctcgatggctgcgacaacaaaccgagcggcagcgtatcatctggggttacaaaatactgtttctggacgtcttattcccccttgccgttgacaaaattatcttcgtcgacgccgatcaaatcgtgagacacgacctgaaggaactgagagattttgacctggacggcgccccctacggttatactccgttctgtgactcccgacgggaaatggacggctacagattttggaaaacgggctattgggcttctcacctactgcgtcggaagtaccatatatcggctctctacgtggtcgacctgaagaaattcaggcgtatcggtgctggggatagactgcgatcgcagtatcaggccctgagccaagacccaaactccttatccaatctggatcaggacctgcccaataacatgatctaccaggtcgcgatcaagagcttaccccaagactggctgtggtgcgaaacctggtgtgacgatgagtcgaaacagagggcgaagaccatcgacctgtgtaataacccaaagactaaagagagcaagttgaaggccgctgcccggattgtcccagaatgggtggagtacgatgccgaaattagacagttgttggatcacttagagaataaaaagcaagatactatcctgacacacgatgagctttag

SEQ ID NO: 210800 - DNA, 1119 bp, synthetic construct
  misc_feature 1..1119: note = Description of Artificial Sequence: Synthetic coding sequence
  source 1..1119: mol_type = other DNA
atggcccccgccaaggccaccaacgtggtgcggctgctgctgggctccaccgccctgtggctgtcacaactcggtagcgggaccgtagccgccagtaaaagcgttaccgcccatttggcagcgaagtggccagaaacacccttactgttggaagcgagtgaatttatggcagaggagtccaacgagaagttttggcagtttctagaaactgtccaggaactcgcaatctacaagcagactgaatctgattattcctactataatctcatcctgaagaaggcagggcagttccttgataacttacatattaatcttcttaagtttgccttcagcatccgggcgtactctcctgctatccagatgtttcaacagattgccgcagacgaacctccaccggacggctgtaatgctttcgtggtcattcataaaaaacacacgtgcaaaattaatgagatcaaaaagctgctcaaaaaagctgcaagtcggactcgtccatacctgtttaagggggaccacaagttcccaaccaataaggagaatctgcctgtggtgatcctgtacgctgaaatgggtacaaggacgttttcagcttttcacaaggtactttctgagaaggcccagaatgaagaaatcctatacgttttacgacactatatccagaagccttcatccaggaagatgtacctgtcaggatacggagtggagctggcaatcaagtccaccgagtacaaggccttagacgatacacaagtcaagaccgtaaccaacaccacggtagaggacgaaaccgaaacgaatgaggtgcagggattccttttcggtaagttgaaggaaatatactccgacctcagggacaatctcaccgcgtttcagaaatacctgattgagagtaacaaacaaatgatgccgcttaaagtgtgggagctgcaggacctcagctttcaggccgcctcccagatcatgtctgctcctgtgtacgactcgataaaactgatgaaggatatctcccagaacttccctatcaaggcccgcctgagaatgaatatcttaatatgtttgttccagtctactcttaacgtgaagaatctccgatctcggcacctctacaataagacttag

SEQ ID NO: 210801 - DNA, 1527 bp, synthetic construct
  misc_feature 1..1527: note = Description of Artificial Sequence: Synthetic coding sequence
  source 1..1527: mol_type = other DNA
atgagccggttcgtgcaggacctgagcaaggccatgagccaggacggtgcatcccagttccaggaagtgatccgccaggaacttgagttgtcagtcaaaaaagagctcgagaaaatcctgaccaccgcttcatctcatgagtttgaacatactaagaaagatctcgatggattcaggaagttatttcatcggtttttacaggagaaagggccatccgtcgactggggaaagatccagagacccccggaagattcaatccaaccttatgagaagatcaaagctcgcgggcttcctgataatatttcctcagtgctcaataagttagttgtcgtgaaactcaacggcggtttaggaacatccatgggttgcaaagggccgaagagcctaataggagttagaaatgaaaacacatttctggacttgacagtgcagcagattgaacatctcaataaaacctacaacacagacgttccgctcgtgctgatgaattcgttcaacaccgatgaggacaccaaaaaaatcttgcagaagtataaccactgtagagttaaaatttacactttcaaccagagccgatatccccggattaataaagagtccctcctgccagtcgccaaagacgttagctacagcggagagaataccgaagcttggtatccacccggccatggagacatctacgccagcttttacaatagcggactccttgatacctttattggagagggcaaggagtacatttttgttagcaacattgataatcttggggcaaccgtggacctttatatcctgaatcatcttatgaatccgccaaacggaaagcgatgcgagttcgtcatggaagtgacgaacaaaacccgcgccgacgtcaaaggcgggactctgacacagtacgagggcaaactacgcttagtggagatcgcccaagtccctaaggctcatgttgacgaatttaagagcgtcagtaagttcaaaatctttaatacaaataacctctggataagcctggccgctgtaaagcgacttcaggaacagaatgctatcgacatggagatcatcgtgaatgctaagacacttgatgggggactcaatgtgattcagttagagacggccgtcggggctgccattaaatcgtttgagaacagcctgggcatcaatgtcccgagaagtcgcttcctgccagtgaagacaaccagcgacctgctgctggtgatgtccaacttgtacagcctgaatgcgggcagtctcactatgtctgaaaagcgcgaattccccaccgtgcctcttgtcaagctgggctcctctttcactaaagtacaggattacctccggcggttcgagagtattccggatatgctcgagctcgaccatttgacggtgtctggcgatgttacgtttggaaaaaatgtgtccctcaaagggaccgtcattatcatcgctaaccatggggatcggattgacattcctccaggtgctgtgcttgagaataagattgtgtctggtaacctgcggattctggaccactag

SEQ ID NO: 210802 - DNA, 1494 bp, synthetic construct
  misc_feature 1..1494: note = Description of Artificial Sequence: Synthetic coding sequence
  source 1..1494: mol_type = other DNA
atgagccaggacggcgccagccagttccaggaggtgatccggcaggaactcgagctgagtgtgaagaaagagctggagaaaattctgacaactgcaagctcacatgaatttgagcatactaagaaagacttagacgggtttagaaagctgtttcaccgctttctccaggagaagggccccagtgtagattggggaaagatccagagacctcctgaggattctattcaaccctatgaaaagattaaggccagaggacttccggataacatctctagcgtgcttaataagctagtcgtcgtcaagcttaatggagggctagggacctcaatgggttgtaaaggcccaaaatccctgatcggcgtcaggaatgaaaatacgtttctcgacctgacagtgcagcagatcgaacatctgaacaagacgtataacacagatgtgcccctggtgctgatgaattcgttcaacacagatgaggacacaaaaaaaatccttcagaagtataaccattgccgcgtcaagatctacacatttaaccagagtcgataccccaggattaacaaggagagcttgttgcccgtagccaaggatgtgagttactctggcgagaatacagaggcttggtatccgcctggccacggggatatctacgcgagcttttacaactctggactccttgacacttttattggagaaggcaaagagtacatttttgtgtcaaatattgacaacctgggcgcaactgttgatctgtacatcttgaatcacttaatgaatccccccaatggcaagcgctgtgagttcgtgatggaagtgacaaacaagacacgcgctgacgttaaagggggtacactgactcagtacgagggtaagctgaggctggtggagatagctcaggtccctaaggcgcacgtggatgagttcaagtcagtgtccaaattcaaaatctttaacaccaacaacctctggatctctttggctgccgtgaaaagactgcaggagcagaacgccatagatatggagatcatcgtgaacgctaaaacccttgacggcggcttgaacgtgatccagttagagacggccgtgggagccgctattaagtcgttcgagaacagtctgggcataaacgtgccgcgctcccgattcctccccgtgaagacaacatcagatcttctgttagtaatgtcaaatttgtacagtttgaatgcagggagcctgacaatgtctgagaagagggagttcccaacagtccctctggttaagctgggctcctctttcaccaaagtccaggattatctgagacgtttcgagagtattcctgatatgttagagctcgaccacctgacagtgagcggagatgtcacctttgggaaaaatgtcagcttgaaaggaaccgtcattatcattgccaaccacggcgaccgaattgacattcccccgggtgctgtgttggagaacaaaatcgttagtggtaatctacggatccttgaccattag

SEQ ID NO: 210803 - DNA, 1554 bp, synthetic construct
  misc_feature 1..1554: note = Description of Artificial Sequence: Synthetic coding sequence
  source 1..1554: mol_type = other DNA
atgctgctgtaccccgccggcttcagcttcgccagcctgaagagcgatttgtcgaaagcaatgagccaagatggtgcaagtcaattccaagaggtgatccggcaggagctcgagctgtcggtgaagaaggagctggaaaaaatccttacgacagcatcctcccacgagtttgagcacaccaagaaggacctggatggttttcgcaagctgtttcataggttcctccaagagaagggaccctctgttgactgggggaagatccagagaccacctgaggactccattcagccttacgagaagatcaaggcgaggggactgccggacaacatctcttccgtactaaacaaactggtggtcgtaaaacttaatggaggcttgggcacatccatggggtgcaaggggcccaagtctctcatcggagttaggaacgaaaacacctttctcgacctgactgtgcagcaaatcgagcacctcaacaagacatacaacaccgatgtgcccctggtgctgatgaattccttcaatacagatgaagatactaagaagatcctgcaaaagtacaatcactgccgcgtgaagatctacacattcaaccagtcccgatacccccggattaacaaggagagtttgctcccagtggccaaggatgtaagctacagtggagagaatacagaggcttggtacccaccaggacatggcgacatatacgcctctttttataactccggcctgttagacacctttataggcgaggggaaggagtatatattcgtgtctaacatcgacaatctgggggcgacagtggacctgtatatcctgaaccacctgatgaatccccctaatggcaaacgctgtgaattcgttatggaggtgaccaataagacaagagcagatgtgaaaggtgggacactgacgcaatatgaggggaagctcagactcgtggaaatcgctcaggtcccaaaagcccatgtggacgaattcaaatcagtttctaaatttaagattttcaacaccaataacctttggatatctctggccgctgtgaagagattgcaggaacagaacgccattgacatggaaataatcgtgaacgccaaaactctggacggcgggttgaatgtcatacagcttgagactgctgtgggtgctgctattaagtcttttgagaactcgctgggcatcaatgtgccgcgcagtcgctttttaccagtgaagaccacaagtgacctactgctggtcatgtccaatctgtatagcctcaatgcaggctcattgacaatgtccgaaaagcgagagtttcccacagtacctctcgtaaagctaggatccagcttcaccaaggtccaggactaccttcggcggtttgagtccatccctgacatgctggaacttgaccatctgaccgtgagcggcgacgttacttttggaaaaaacgtgtctctgaaaggaaccgtgattattatcgccaaccacggcgataggattgacatcccaccaggggcagttctggagaataaaatcgtcagcgggaatctaagaattctggaccattag

SEQ ID NO: 210804 - DNA, 1494 bp, synthetic construct
  misc_feature 1..1494: note = Description of Artificial Sequence: Synthetic coding sequence
  source 1..1494: mol_type = other DNA
atgagccaggacggcgccagccagttccaggaggtgatccggcaggaattagagctcagcgtgaaaaaagagctggagaagattctgactacagcctccagccacgagttcgagcacacaaaaaaagatcttgacggtttcagaaaactgttccacagattcctccaggaaaaaggcccgtcagtggactggggtaagatccagcgaccccctgaagactccatccagccctatgagaaaatcaaggctcgcgggcttcccgataatattagttctgttttaaataaactcgtggttgtaaaacttaacggaggccttgggaccagtatgggatgcaaagggcctaagagcctcatcggtgtcagaaatgagaacaccttcctcgacctgactgtgcaacagattgagcatctgaacaaaacctacaacacagatgtacccttggtgctgatgaacagttttaacactgatgaggacacgaagaagatcctccagaagtacaatcattgtcgcgtgaagatctataccttcaatcagagtcggtaccccagaatcaataaggaaagcttactgccggtggctaaggacgtttcttactctggtgaaaacacagaggcatggtacccgccaggtcatggcgacatctacgcatctttttacaattccggactgctggacacatttatcggggagggcaaagagtacatcttcgtatctaacatcgataatctgggggctaccgtagacttatatatcctcaaccatctgatgaatccgccaaatggtaagaggtgtgagttcgtgatggaggtcactaataaaacccgcgccgacgtcaaagggggcactctgacacagtatgaggggaagctgagattagttgaaatcgctcaggtccctaaggcccacgtggatgaatttaaatcagtgtcgaagttcaagatttttaacacgaataacctttggatcagtctggccgccgttaagcgcctgcaggagcagaacgcaattgatatggagataatcgtcaatgccaagaccctggatggaggcctcaacgtcattcagctcgagactgcggtcggcgctgcaatcaagagcttcgagaactctctgggaataaatgtgcctcggtctcggttcctccccgtcaagacgacatcagatctcctcctggtgatgtccaatctgtactctctgaacgccggatcactgactatgtcagaaaaaagagaatttcccacggtgcccctggtcaaactgggaagcagcttcaccaaggttcaggattaccttcggcgctttgagagcatcccagacatgctcgagctggaccacctgaccgtttccggcgatgtgacattcggaaaaaatgtctccctgaaaggtacggtcatcatcattgcgaaccacggcgataggatcgacataccaccaggtgcagttctggaaaacaaaatcgtatctggaaatctcagaattctcgaccattag

SEQ ID NO: 210805 - DNA, 453 bp, synthetic construct
  misc_feature 1..453: note = Description of Artificial Sequence: Synthetic coding sequence
  source 1..453: mol_type = other DNA
atgagccaggacggcgccagccagttccaggaggtgatccggcaggaattggaactctccgtaaaaaaggagctggagaagatcctcacaacagcaagctctcatgagtttgagcataccaagaaagacttggatgggtttcgcaaactgttccatcgatttcttcaggagaagggtccaagtgtggactggggtaagatacaaagacctccagaagattctatccaaccttacgagaagatcaaggctcgcgggctgcccgacaatatctccagcgtgctcaacaagctggtcgtggtgaagctgaatggagggctggggacctcaatgggctgcaagggtcctaagtcactgataggagtgagaaacgagaacaccttcttagatctcacagtccaacagatcgaacacctgaacaagacctacaacaccgacgtgccactggtcctctag

SEQ ID NO: 210806 - DNA, 516 bp, synthetic construct
  misc_feature 1..516: note = Description of Artificial Sequence: Synthetic coding sequence
  source 1..516: mol_type = other DNA
atgagccaggacggcgccagccagttccaggaggtgatccggcaggaactagagctgagtgtgaagaaggaactagagaagattcttactaccgcttcatcccacgaattcgaacacaccaagaaagacctcgacggcttcagaaagctgttccaccggtttctacaggagaagggcccctcggttgactggggcaagatccagagacctccggaagattctatccagccatacgagaagatcaaagcccggggccttcccgataacatctcatcagtgctgaacaaacttgtagtggtgaagctgaacggtggactcggcacatctatgggatgcaagggccccaagtccttgatcggcgtgcgcaatgagaacacatttctcgacctgaccgtgcaacaaattgagcaccttaacaagacatacaacaccgacgtcccactggtgttgatgaactctttcaacactgatgaggacactaaaaaaattctgcaaaaatataatcactgtcgttag

SEQ ID NO: 210807 - DNA, 117 bp, synthetic construct
  misc_feature 1..117: note = Description of Artificial Sequence: Synthetic coding sequence
  source 1..117: mol_type = other DNA
atgagccaggacggcgccagccagttccaggaggtgatccggcaggagctggagctcagcgttaagaaagagttggagaaaatcctgacaactgcatcatctcacgaattcgagtag

SEQ ID NO: 210808 - DNA, 318 bp, synthetic construct
  misc_feature 1..318: note = Description of Artificial Sequence: Synthetic coding sequence
  source 1..318: mol_type = other DNA
atgagccaggacggcgccagccagttccaggaggtgatccggcaggaactcgaactgtccgtgaagaaagagttggaaaagattttaacgacagctagcagtcatgaatttgaacacacaaaaaaagacttggatggcttcagaaaactgttccatcgcttcctgcaggagaaaggcccgagtgtcgactgggggaaaattcaacgcccgccagaggattcaattcaaccttatgagaaaattaaggcacggggtctcccggacaacatcagctcagtcctgaacaagctcgtggtggttaagctgaatggcggttag

SEQ ID NO: 210809 - DNA, 150 bp, synthetic construct
  misc_feature 1..150: note = Description of Artificial Sequence: Synthetic coding sequence
  source 1..150: mol_type = other DNA
atgagccggttcgtgcaggacctgagcaaggccatgagccaggacggggcctcacagttccaggaggtgataagacaggaactggaactgagtgtgaaaaaggagttagagaagattctgactaccgcttctagtcacgagtttgaatag

SEQ ID NO: 210810 - DNA, 408 bp, synthetic construct
  misc_feature 1..408: note = Description of Artificial Sequence: Synthetic coding sequence
  source 1..408: mol_type = other DNA
atgagccaggacggcgccagccagttccaggaggtgatccggcaggaactggaactgtccgtgaaaaaggagctggaaaagattttaactaccgccagctcccacgaattcgaacacactaagaaggacctcgacgggttccggaagttgttccaccgcttcctccaagaaaagggaccctctgtggattggggtaaaattcagaggcctccagaggattccatccagccttacgagaagatcaaggcccgggggctgcctgataacattagctcagtgctgaataaactggtcgtagtaaaattgaatggtggactgggcacgagtatgggctgtaaagggcccaaatcacttataggcgtgcgcaatgaaaacactttcttagacctgacagtacagcagatctag

SEQ ID NO: 210811 - DNA, 642 bp, synthetic construct
  misc_feature 1..642: note = Description of Artificial Sequence: Synthetic coding sequence
  source 1..642: mol_type = other DNA
atgagccaggacggcgccagccagttccaggaggtgatccggcaggagttagaattaagtgtgaagaaggagctggaaaaaattctcaccacggctagctcccatgaatttgagcacacaaagaaggatctggacgggttcaggaagctttttcaccgcttcttgcaggagaaaggcccttctgtggattggggaaagattcagcgcccaccggaggacagtatacaaccatacgaaaagataaaggcccgaggcttgcccgataacatctctagcgtcctgaataagttagttgtcgtaaagctcaacggtggcttaggcaccagtatgggatgcaaaggcccaaagagcttgatcggcgtcagaaacgagaatacatttctagatcttaccgtgcaacaaatcgagcaccttaataagacctataacaccgatgtaccactggtgctgatgaactcattcaatacggacgaggacacgaagaagatcctgcagaaatacaaccactgccgtgtcaagatttacacgtttaaccagtcacgctatccaagaatcaacaaagaatcgttactgcccgttgctaaggacgtgagctacagcggcgagaatacagaggcttggtatccacccgggcacgggtag

SEQ ID NO: 210812 - DNA, 1278 bp, synthetic construct
  misc_feature 1..1278: note = Description of Artificial Sequence: Synthetic coding sequence
  source 1..1278: mol_type = other DNA
atggtgagcaaggccctgctgcggctggtgagcgccgtgaaccggcgcaggatgaagcttctgcttggaatcgccctccttgcctatgtggcctcagtttgggggaatttcgtcaatatgagctttctgcttaaccgtagcattcaggaaaacggagaactcaaaattgaaagcaaaatcgaagagatggtcgagcctctaagagaaaaaatccgcgatctagagaaatcttttacccagaaatacccacccgttaagttcttgagcgagaaggatcggaaacggattttgatcacaggcggggccggcttcgtcggctcccacttgacagacaagttgatgatggacggacacgaagtgacagtcgtggacaacttttttaccgggcgcaagaggaacgtcgagcactggattggacacgaaaacttcgaactcatcaatcatgatgttgtggaacctttgtatattgaggtagaccaaatataccacctcgctagccccgccagtccacccaactacatgtacaacccaatcaagaccctcaaaactaataccatcggtactctcaatatgcttgggctcgccaagagagtgggtgcgcgcctgttgcttgcctcgacaagcgaagtgtacggggacccggaagtgcacccccagtctgaagactactgggggcacgtgaatccgatcgggccccgggcatgttacgacgaagggaaaagagtggccgaaacaatgtgttacgcctacatgaaacaggaaggcgtggaagttagagttgcgcggatttttaacaccttcgggcctcgtatgcacatgaacgacggcagggtggtgtcaaactttattttgcaggccctacagggggagccactgacagtctatggaagtggcagtcagacacgcgcttttcagtacgtcagtgatcttgtcaacggcttagtggccttgatgaacagcaacgtgtcctcacccgtcaatctcggtaacccagaagagcatactattctggaattcgcccaattgatcaagaacctggttggatcaggctccgaaattcaatttctctccgaggctcaggacgacccccagaagcgcaaaccggacatcaaaaaagccaaactgatgctaggctgggaacctgtggtgccacttgaggaaggtctcaataaggcaattcactatttcaggaaagagctagaatatcaggctaacaaccagtacatcccgaagccaaaacctgctagaatcaaaaaaggtcgcacaagacactcttag

SEQ ID NO: 210813 - DNA, 759 bp, synthetic construct
  misc_feature 1..759: note = Description of Artificial Sequence: Synthetic coding sequence
  source 1..759: mol_type = other DNA
atgtacaaccccatcaagaccctgaagaccaacaccatcggcaccctgaacatgctgggactggctaagagagtaggtgcacgcctactgctggcatccacgtccgaagtctacggggatcctgaggtccacccacaaagtgaggactattgggggcacgtgaatcccatcggccctcgagcctgctacgacgagggtaagagagttgcagagaccatgtgctatgcatatatgaagcaggagggggtcgaagtgcgcgtcgcacggatttttaacacatttggtccccgtatgcacatgaatgatggtcgagtcgtgagtaactttatcttgcaggccctccagggcgaaccactgacagtatacgggagcggttcccagacacgggcgttccaatacgtttctgaccttgttaacggccttgttgcactgatgaatagcaacgtgtcgtcccccgttaatctcggcaatccagaggaacatactatcttggagtttgcacagctaatcaaaaaccttgtgggttccggttccgagatccagtttctgagtgaagcccaggacgatccccagaaacgtaaaccagatatcaagaaggctaagctgatgctcggctgggaaccagtggtgccgctggaggagggcctcaataaggcgatccattactttcgaaaggagctggagtatcaggcgaacaaccagtatatccccaaacccaaacctgcgaggatcaagaaagggcggacgagacatagttag

SEQ ID NO: 210814 - DNA, 1263 bp, synthetic construct
  misc_feature 1..1263: note = Description of Artificial Sequence: Synthetic coding sequence
  source 1..1263: mol_type = other DNA
atggtgagcaaggccctgctgcggctggtgagcgccgtgaaccggaggagaatgaagttgcttctgggaattgcactgttggcctacgtcgcttctgtctggggaaacttcgtgaatatgcgctccatacaagaaaatggggagctgaagatcgagagcaagattgaagaaatggtggagcctctcagagagaaaattcgagaccttgagaagtccttcacccagaagtacccccccgtgaaatttctgagtgaaaaggaccggaagaggattctgattaccgggggtgctggcttcgttgggagccacctcactgataaactgatgatggatgggcacgaggtgaccgtggtggataatttttttactgggcggaaacgcaacgtggaacattggatcggccacgagaacttcgaactcatcaatcacgatgtggtcgagcctctgtatattgaagtggatcaaatatatcatctcgctagtccagcatcccctccaaattatatgtacaatccaattaaaaccctgaaaacgaatacaataggtactttgaacatgcttggattggcgaagcgcgttggcgctcgtcttctgttagccagcacttctgaagtgtatggcgacccagaagtacatccccaatcagaggattactggggacacgttaaccctattgggcctagagcctgttatgacgagggaaagcgagttgccgaaactatgtgttacgcttacatgaaacaggagggcgtggaagtgagagttgctcggatcttcaacacgttcgggcccaggatgcacatgaatgatggaagagttgtttccaatttcatcctgcaggcactccagggagagccattgactgtctacggctctggatcacagactcgggccttccagtatgtctcagacctggttaacggactggtagctctgatgaacagcaatgtgagcagtcctgtgaatcttggaaaccctgaggagcataccatacttgagtttgcgcagcttatcaagaatcttgttggcagcggatctgagatccagttcctgagcgaggcccaggatgacccccagaaacggaagcctgatatcaagaaagctaagctaatgcttggctgggagcccgtggtgcctctagaggaagggctaaataaggccattcactatttccgaaaagaactggagtaccaggctaacaaccagtatattcccaagcccaagcctgctcgaataaagaaaggcaggacgcgccatagctag

SEQ ID NO: 210815 - DNA, 405 bp, synthetic construct
  misc_feature 1..405: note = Description of Artificial Sequence: Synthetic coding sequence
  source 1..405: mol_type = other DNA
atgtacaaccccatcaagaccctgaagaccaacaccatcggcaccctcaatatgctcggactggccaagcgggtgggtgccagactcttgctggcatcaacaagtgaagtctatggggatccagaggtacacccccagtcagaggattactggggccatgtgaatccaataggccctagagcctgctatgatgagggtaagagggtcgcggaaaccatgtgctacgcctacatgaaacaagagggagtagaagttcgcgtggccaggatattcaacactttcggtcccaggatgcacatgaacgacgggagagtcgtatcaaatttcattcttcaagccttgcaaggggaacccttgacagtgtacggtagcggatcccagacgagagccttccaatacgtgtag

SEQ ID NO: 210816 - DNA, 558 bp, synthetic construct
  misc_feature 1..558: note = Description of Artificial Sequence: Synthetic coding sequence
  source 1..558: mol_type = other DNA
atggtgagcaaggccctgctgcggctggtgagcgccgtgaaccggcgaagaatgaaactcttgctgggcattgctctcctcgcttacgttgcatggcttgcaaagcgggtgggagcacgacttctgctggcaagcacctctgaggtgtacggggatccagaagtgcacccacagtcagaagattattggggacatgttaatccgatcggacctagggcttgttacgatgagggaaaacgggtggctgagactatgtgctacgcatacatgaaacaagagggcgtggaggtgagggttgctcggatattcaatacgtttggacctagaatgcacatgaacgatggtagggttgtatcaaattttattctgcaggccctgcaaggtgagccactgaccgtttacgggtctggcagtcagacacgcgcttttcagtatgtgtcagacctggtcaacggactggtagctctgatgaactcaaacgtctcaagccctgtgaacctggtgtccgcgccactgcctccactatgcagaacggctcagacatttgtacatctgtag

SEQ ID NO: 210817 - DNA, 159 bp, synthetic construct
  misc_feature 1..159: note = Description of Artificial Sequence: Synthetic coding sequence
  source 1..159: mol_type = other DNA
atgtacaaccccatcaagaccctgaagaccaacaccatcggcaccctgaacatgttgggcctggccaagcgcgtgggagctcgcctgctgctagcctccacctctgaagtgtatggcgatccagaagtgcacccacagtcggaagattactggggttag

SEQ ID NO: 210818 - DNA, 366 bp, synthetic construct
  misc_feature 1..366: note = Description of Artificial Sequence: Synthetic coding sequence
  source 1..366: mol_type = other DNA
atgtacaaccccatcaagaccctgaagaccaacaccatcggcaccctgaacatgctaggcctggcaaaacgagtaggtgccaggctgctgctggcaagcacatccgaggtgtatggagatcctgaagtgcaccctcaatccgaagactattggggtcacgtcaatccgataggacccagagcctgttatgacgaaggcaaacgggtggcggagactatgtgttacgcctatatgaagcaagaaggggtcgaagtcagggtcgctcgcatcttcaataccttcggccctagaatgcatatgaatgatggccgggttgtctctaatttcattttgcaggcccttcaaggagagcccctgacagtatag

SEQ ID NO: 210819 - DNA, 1092 bp, synthetic construct
  misc_feature 1..1092: note = Description of Artificial Sequence: Synthetic coding sequence
  source 1..1092: mol_type = other DNA
atggtggagcccctgcgggagaagatccgggacctggagaagagcttcacacaaaagtatccccccgtaaaattcctctctgaaaaagacaggaaaagaatcctgataaccgggggcgctggctttgtcgggtctcacctaaccgataagctgatgatggatggacatgaagtcactgttgtggacaattttttcacgggtaggaagaggaatgttgaacactggatcgggcacgaaaacttcgagctgatcaaccatgacgtagttgaaccactgtacattgaggtggaccagatttaccacctcgcatccccagcaagtccccctaactacatgtacaatccaatcaaaaccttgaagacgaatactatcggcacactaaatatgttggggctggcaaaaagagtaggagctaggcttcttctcgcctccacttctgaggtttacggcgaccctgaggtccaccctcaaagtgaagactattggggacacgttaacccaatagggccccgagcctgctacgacgaagggaaacgcgttgcagaaactatgtgttacgcctacatgaaacaggaaggtgtggaggtgagagttgctcgcatctttaacacatttggaccacgaatgcatatgaacgacggcagagttgtaagcaactttatcctccaagccctgcaaggtgagcctttaactgtctatggctctgggtctcagactagagcctttcaatatgtatcagatctcgtgaatggtctcgtggcgttaatgaatagcaacgtaagcagcccagtgaatctgggcaaccctgaggaacataccattctggaattcgcccagcttataaagaacctggtgggatcgggtagcgaaatccagtttctcagcgaggctcaggatgacccgcagaagcgaaagcctgatattaaaaaagccaagctgatgcttgggtgggagccagttgtaccgttagaggaaggtctgaataaggcaatccattatttccgcaaggagctggaataccaggccaacaaccagtacataccaaagcccaagcctgcccgaattaagaagggccgcacaagacattcctag

SEQ ID NO: 210820 - DNA, 1680 bp, synthetic construct
  misc_feature 1..1680: note = Description of Artificial Sequence: Synthetic coding sequence
  source 1..1680: mol_type = other DNA
atgcggaagttcgcctactgcaaggtggtgctggccaccagcctgatatgggtgttactggatatgtttttgctgctatatttcagcgaatgtaacaaatgcgacgagaaaaaggagcgcggactgcccgccggagatgtgttggagcccgtgcagaaacctcatgaagggccaggagaaatgggaaagcccgtggtgatccctaaggaggaccaggagaaaatgaaagagatgttcaagatcaaccagttcaatttgatggcatccgagatgattgctctaaacagatcactgccagatgtccggctggagggatgtaaaacgaaggtctatccagataaccttcctacaacatctgtggttatagtcttccacaacgaagcttggtctactctgctccgcaccgtgcactctgtaattaatcgctctccccgccatatgatcgaggagattgtcttggttgatgatgcttctgaaagagacttccttaagcggcccctggaatcttacgtcaaaaagctgaaggtcccggtccacgtaatcaggatggaacagcgctccgggttgattcgggccagactgaaaggggctgccgtcagcaagggccaggtgatcactttccttgacgcgcattgtgagtgtaccgtgggttggctggagcctctcctggccaggattaaacatgatcggcgtactgtggtttgtcccatcatagacgtgattagtgacgataccttcgagtatatggccggctctgacatgacttacggaggatttaactggaagttaaattttagatggtatccggttccgcagcgggagatggaccgcaggaaaggggatcggaccttgcctgtacggacccctacaatggcagggggtctcttctcaattgaccgggattacttccaggagattggcacatacgacgcaggtatggacatctggggaggggagaatttggagatctcttttcgcatttggcagtgcggtggcaccttggagatcgttacctgctcacatgttggacacgtattcaggaaagccaccccctatacattccctggcgggactgggcagataattaataagaacaaccgccgcttggccgaagtctggatggacgagttcaagaactttttctacattatctctccgggggttaccaaagtggactatggcgacatttcctcgcgggtgggacttagacacaagctgcagtgtaaacccttctcatggtacctggagaatatttatccggatagtcaaatacccaggcactacttttccttaggggagatcagaaacgtggaaacgaaccagtgcctggataatatggctcgaaaagaaaatgagaaggtggggatatttaactgtcatggtatgggtggtaatcaggtgttctcatatactgccaacaaggagatcaggaccgatgatctgtgcctggacgtgtcgaaattgaacggccctgtaactatgttgaagtgtcatcacctgaagggcaatcagctatgggagtatgatccagtgaagctgaccttgcagcatgttaattctaaccagtgcctggacaaagccacagaagaggatagtcaggttcctagtatcagagactgcaacggatccaggagtcagcagtggcttctgcgaaatgttaccctgccggagatcttttag

SEQ ID NO: 210821 - DNA, 1500 bp, synthetic construct
  misc_feature 1..1500: note = Description of Artificial Sequence: Synthetic coding sequence
  source 1..1500: mol_type = other DNA
atgggcaagcccgtggtgatccccaaggaggaccaggagaagatgaaggaaatgttcaagatcaaccagttcaatctcatggcctcggaaatgattgctctgaatagatccctgcctgacgtgcggctcgagggctgcaagacgaaagtgtaccccgacaacctacccacgaccagcgtcgtcatcgtgttccacaatgaagcctggtcaactttgctccggaccgtccacagcgttatcaaccggtcccctagacatatgatagaagagatcgtactggtagatgatgccagcgaaagagactttctgaagaggcccctcgaatcatacgtgaagaaacttaaggtgcccgtgcacgtgatccgcatggagcaacgctcaggattgattcgggcccggttgaagggggctgctgtcagcaaaggacaggtcatcaccttcctggacgcccactgcgaatgcactgttggttggctggaacctctgcttgcaagaataaagcacgaccgcaggacggtcgtgtgtccgatcatcgatgtgataagcgatgacaccttcgagtacatggcaggctcagatatgacctatggagggttcaactggaagttaaactttcggtggtatccagtaccacagcgtgaaatggacaggcggaagggcgatcggaccctgcctgttcggactccgacaatggctgggggcttgttttctatagatagggactatttccaggagatcgggacttacgatgccgggatggacatatggggcggcgagaacctggagatttccttcaggatttggcagtgtgggggtacgttagagatcgtgacttgctcacacgtgggccacgtgtttcgcaaggcaacgccctatactttccctgggggcacaggtcagattataaataaaaacaaccgcagacttgccgaggtgtggatggacgagtttaagaactttttttatataatctcccctggtgtcactaaagtggattatggagatatatcctctagggtaggccttagacacaaactgcagtgcaagcctttctcatggtacctggagaatatctacccggattcccaaataccccgacactacttttctctgggggaaatacgtaacgttgaaacaaatcagtgtctggacaacatggccaggaaagaaaatgaaaaggtcgggatctttaactgccacggaatgggagggaatcaggtcttttcctataccgccaacaaagagatcagaactgatgacctctgtctcgacgtcagcaaacttaacggacctgtgacaatgttgaaatgtcatcacttgaaaggtaatcaattatgggaatacgaccccgtgaaactgactctgcagcatgtaaatagcaaccagtgtttggacaaagctactgaagaggattcacaggtgccaagtataagggactgtaatggtagccgatctcagcagtggttacttcggaacgttacactcccagagattttttag

SEQ ID NO: 210822 - DNA, 1680 bp, synthetic construct
  misc_feature 1..1680: note = Description of Artificial Sequence: Synthetic coding sequence
  source 1..1680: mol_type = other DNA
atgcggaagttcgcctactgcaaggtggtgctggccaccagcctgatttgggttctgctggatatgttcctattattgtatttcagcgagtgcaataagtgcgacgagaagaaggaacgtgggctccccgcgggcgatgtgcttgaaccagtgcagaaaccccacgagggtcctggcgagatggggaaaccggtggtcatcccgaaagaggaccaggaaaaaatgaaggagatgttcaaaattaaccaattcaaccttatggcgtccgaaatgattgcgttaaatagatctctgccagacgtccgtctggagggctgcaagacgaaggtctaccctgataacctgcccactacctctgtcgtgatagtatttcacaatgaggcctggtctaccctgttgcgcacagttcattctgtgattaaccggtccccgaggcacatgatcgaggaaatcgttctcgtcgatgacgctagcgagcgcgattttctaaaacgccctctggagtcatacgtgaagaaactcaaagtgccggtgcatgtgatcagaatggagcagcgaagcggattgattcgggcacggctcaaaggtgcggcggtgagcaagggccaggttataaccttcctggacgctcattgtgagtgtacagtggggtggctggagcctttactagcacgtataaagcacgacaggcgcactgtagtttgccccattattgacgtgatatccgacgatacctttgagtatatggccgggtccgacatgacatacggtggcttcaactggaaactgaatttccgctggtatccggtgccgcaaagggagatggaccgaaggaaaggtgacaggacactacccgtccggaccccaaccatggctggaggcttgttttccatagaccgagactacttccaggagatcggcacttacgacgcaggtatggacatctgggggggcgagaatctggagatcagcttcaggatctggcaatgtggcggaaccctggaaattgtgacatgttcccacgttggccatgtgttccgcaaggccacaccttatacatttcctggcggtacaggtcagatcattaataagaataatcgtcggctggctgaggtgtggatggacgaatttaagaatttcttctatatcattagccctggggtcactaaggtggactatggagatattagtagccgggtcggtctgcgccacaaactgcagtgtaaacctttctcctggtatttggaaaatatctatcctgacagccagattccacgccattattttagtctaggtgagattaggaacgttgaaaccaatcagtgtctggataatatggctcgcaaggagaatgagaaagtagggatctttaactgtcacgggatgggagggaatcaggttttttcctacaccgccaacaaagaaatcagaaccgatgacttatgcttggacgtctctaagctgaacgggcccgtgacaatgctgaaatgccaccacttgaagggaaaccagctgtgggaatacgatcctgttaaactgaccctgcagcatgtcaattccaaccagtgccttgacaaggcaaccgaggaagatagccaggttccgagcatccgggactgcaacgggtctcgatcacagcagtggctgcttagaaatgtaacactccctgaaatcttttag

SEQ ID NO: 210823 - DNA, 1812 bp, synthetic construct
  misc_feature 1..1812: note = Description of Artificial Sequence: Synthetic coding sequence
  source 1..1812: mol_type = other DNA
atgcggcggaaggagaagcggctgctgcaggccgtggccctggtgttggctgccctcgtcctcctccccaacgtcggtctgtgggcactctatcgtgaacgccagcccgatggaactcctggaggaagcggcgcggccgtggcgcctgcggcgggtcagggatcacactcgcgccagaaaaaaacttttttcctaggcgatggtcaaaagctgaaagactggcatgacaaagaggccattcgaagggacgcccagcgtgtcggtaatggggaacaaggacgtccctacccaatgacagatgccgaacgcgtagaccaggcttacagggaaaacggctttaatatatacgtgtccgataaaattagcctgaacaggtccttgccggacattcgacatcccaattgcaatagtaaaagataccttgagactctgcccaatacgagcatcattatcccttttcataacgagggctggtcctccctgctgaggacggtgcattcagtgcttaacagatcacctccggaactcgtggctgagattgtgcttgtggatgatttctctgaccgggaacaccttaagaagcccctggaggactatatggcactattcccctcggtacggattctgcgaacaaagaaaagagaaggtctaataagaactagaatgcttggtgcctccgtggccacaggcgatgtgattactttccttgattctcattgcgaggcgaatgtgaactggctgccacctttgcttgatagaattgcgcgcaacagaaaaactattgtgtgcccgatgatagatgtgatcgaccatgacgacttccgttatgagacacaagcgggggacgccatgcgcggggcatttgactgggagatgtactacaaacggatccctatccctcctgagttgcagaaagctgatcccagtgacccatttgagagccctgtaatggccggggggctcttcgcggtggaccgaaaatggttctgggaactcggggggtatgaccccggcctcgagatttggggaggcgaacagtacgagattagttttaaggtttggatgtgcgggggccgaatggaagatattccttgttctcgggtgggccacatataccggaagtacgtcccttataaggtgcccgcaggcgtttccctcgctcgcaatctgaagcgggtcgcagaggtgtggatggacgaatacgcagagtacatttaccagagacgtccagaatatcgacatctgtcagccggcgacgtggccgtccagaaaaagttgagatcgagcctcaattgcaaaagcttcaagtggttcatgacgaaaatcgcatgggatcttcccaagttttatccccctgtggagcccccagcggccgcttggggggagatccggaatgtcgggacagggctgtgtgcagacacaaagcatggagctctcgggtctcccctgagactggagggatgtgttagagggaggggcgaggctgcttggaataacatgcaggtcttcacctttacttggagagaagacatccggcccggcgacccacaacacactaagaagttttgctttgacgccatcagccatacatcaccagtgacactttatgattgccactcgatgaagggaaaccagctgtggaaatatcggaaggataagacactgtatcatcccgtgagtggaagttgcatggattgttcggagagcgaccataggatcttcatgaacacttgcaaccctagttcactgacacaacagtggctgttcgaacacaccaacagcacggtgttggagaaattcaataggaattag

SEQ ID NO: 210824 - DNA, 831 bp, synthetic construct
  misc_feature 1..831: note = Description of Artificial Sequence: Synthetic coding sequence
  source 1..831: mol_type = other DNA
atgctggcctggcgggacggcgagctggaggccgagaccagcagctccctttttctcttggccatgcaggtttggatgtgcggtggacgtatggaagacataccatgttccagggttggccacatttacaggaaatatgtgccatacaaagtgccggctggcgtgagtctcgccagggtgagaaacctaaaacgcgtggccgaggtgtggatggatgagtacgccgaatacatctatcagagaaggccggaataccgacacctaagcgccggcgacgtggcagtccagaagaagctccggagttcactgaattgcaagagtttcaagtggtttatgactaagattgcatgggacctgccaaagttctatccacccgtggagcctcctgctgcggcctggggggaaatccgaaatgttggcacaggtctgtgtgcagacactaaacacggggccctgggttctcccctgaggttggaaggatgcgttcgggggaggggcgaagcagcatggaacaacatgcaggttttcacctttacctggagagaggacattaggccaggcgatccccagcacaccaagaaattttgtttcgacgctatcagccacacctccccagtgactttatatgactgtcacagcatgaagggtaaccagctttggaagtaccgaaaggacaagacgttgtatcatcctgtgtcaggctcatgtatggactgcagcgagagcgatcaccgcatattcatgaacacatgcaatccgtctagcctgacgcagcaatggctgttcgaacatacaaacagcacagtgctggagaaatttaaccgaaactag

SEQ ID NO: 210825 - DNA, 1626 bp, synthetic construct
  misc_feature 1..1626: note = Description of Artificial Sequence: Synthetic coding sequence
  source 1..1626: mol_type = other DNA
atgcggcggaaggagaagcggctgctgcaggccgtggccctggtgctagcggcgctggtgctgctcccaaacgttgggctgtgggcgctttacagagaacgccagcctgatggtacacccgggggctctggagccgcggtcgcaccagccgctggacaggggagtcactcacgacagaagaaaaccttttttttgggggacgggcagaagctcaaggattggcatgacaaggaggcaatacggagggacgctcagagagttggcaatggcgaacagggacggccatatcctatgacagacgcagagagagtggaccaagcgtacagagagaacggctttaacatctatgtctccgataagataagcctcaataggtctttgcccgacattcgtcatcccaactgtaatagcaagcggtatctcgagactctaccgaatacaagcattatcattccattccacaacgagggttggagcagtctgctgaggaccgtgcatagcgtcctgaatcggtcaccgccagagttggttgccgaaatcgtcctggtggatgacttttccgacagagatcggattgccagaaatagaaaaacaatagtgtgtcctatgatcgatgtgattgaccatgacgatttccgctacgaaacacaagctggcgatgccatgcgcggagcattcgactgggagatgtattataagagaataccaatcccacccgaactccagaaggctgacccctctgacccatttgagagccccgtgatggccggtggcctgttcgctgtggaccgtaagtggttttgggagcttggcggctacgacccggggttggaaatttggggcggcgagcagtatgagatctctttcaaggtttggatgtgcggcggccgtatggaggacattccctgtagccgggttggtcacatctatagaaagtatgttccgtacaaggttcctgccggggtgagtctggccaggaacctaaagcgcgtggccgaagtgtggatggacgagtatgcagagtatatttatcaaagacgccctgaatacagacatctttccgctggcgatgtggccgtgcagaagaaacttcgctcctcgttaaattgtaagagcttcaaatggttcatgacaaaaatagcgtgggacttgccaaaattctatccgccagttgaaccaccagccgctgcttggggcgagatccggaacgtcggcaccgggctatgcgcagatacaaagcacggagccctcggctctccacttcggctggagggatgcgtacgaggtcgtggggaagctgcctggaacaatatgcaggtattcacttttacatggcgggaagatatccgtcccggagacccacagcatacaaagaagttctgcttcgatgcaatatcacacacatcacctgttactctgtacgactgccacagtatgaaggggaaccagttgtggaagtatcgaaaggataaaacgctgtatcatccggtgtctggatcctgtatggactgtagtgagtctgatcataggatctttatgaatacttgcaatccgagttctctgacccaacagtggttgttcgaacacacgaattcaacagttctggagaagttcaacaggaattag

SEQ ID NO: 210826 - DNA, 1101 bp, synthetic construct
  misc_feature 1..1101: note = Description of Artificial Sequence: Synthetic coding sequence
  source 1..1101: mol_type = other DNA
atgcggcggaaggagaagcggctgctgcaggccgtggccctggtgctggcggctctggtcctgttgccgaatgtcggcctctgggctctctatagggagcgccagcccgatgggacacctgggggctctggtgctgcggttgcacccgcagccggccagggcagtcactctcgacagaagaagacgttcttcttaggtgatggccaaaaactaaaggattggcatgacaaggaggcaattagaagggatgcccagagggtcggcaacggcgaacagggcaggccatatcccatgacggatgcagaacgcgttgatcaagcctatcgcgaaaacggtttcaatatctacgtaagtgataagatatctctgaaccggtctctgcccgacatccgacatccgaactgcaatagcaagaggtacttggaaacccttcccaacacctctatcatcattccatttcataacgaggggtggtcatcgctcctccgcaccgtccactctgttctgaatcggtcgccccccgagctggtggcagaaattgtcctcgtggatgacttttctgatcgggagcacctaaaaaaaccactggaagactacatggcccttttcccttcagttaggattcttcggaccaagaaacgggaaggacttatacgaactcgaatgctcggtgctagtgtggccacgggggacgtgatcacgttccttgatagccattgcgaggccaatgtgaactggctcccccccctgcttgataggattgcccggaacaggaagacaatcgtgtgtcccatgatcgacgtcatagatcatgacgatttcagatatgagacacaggccggtgacgctatgaggggtgcatttgactgggagatgtactacaaaaggatccctattcccccagaactacaaaaagcagacccctcagaccctttcgagagccccgtaatggcaggaggactgtttgcagttgataggaaatggttttgggagctgggcgggtacgacccgggacttgagatatggggtggcgagcagtacgagatatcatttaaagtctcccaactatcccgccgacccgtgctgggtactgcatcttag

SEQ ID NO: 210827 - DNA, 1746 bp, synthetic construct
  misc_feature 1..1746: note = Description of Artificial Sequence: Synthetic coding sequence
  source 1..1746: mol_type = other DNA
atgtggggccggaccgcccggcggcggtgcccccgggagctgcggcgaggtagggaggccctgttggtcttgttggcgcttcttgcactggctggcctgggcagcgtgctacgggcccaaagaggtgcaggggctggtgcagcggagcctggtccccccagaaccccacgacccggcagaagggaaccggtcatgcccaggcctcccgttccggctaacgccctcggcgcgcgcggagaggccgtgagactgcagctgcaaggagaggagctcaggctgcaggaagaaagtgtgcgactgcaccaaatcaatatttatctgtccgacagaatcagcctccacagacgccttcccgagagatggaatcccctgtgcaaggagaaaaagtacgattacgacaacctgcctcgaacgtctgtcatcattgccttctataacgaggcttggtctacactcctgagaaccgtgtactctgtgttagagacctcaccagatattctgctggaagaagtaatcctggtggacgactacagcgacagggagcacctgaaggagcggctcgccaacgaactcagtgggctccccaaagtcagactgatacgagcaaataaacgcgagggactagtgagagcacgactgctaggtgcctccgccgcaaggggagacgtcctgacgtttctggattgccattgtgaatgccatgagggttggctcgaacccctgttgcagagaatacatgaagaggagagtgcagtcgtgtgccctgtgatcgacgtgattgattggaatacctttgaatacctgggcaacagcggcgaaccccagatcggcggattcgattggcgactcgtcttcacgtggcatactgtgcccgagcgagaacgcattaggatgcagagccccgttgatgttatcagatcccctaccatggccgggggtctgttcgccgtttctaaaaaatatttcgagtatcttgggtcctacgataccgggatggaagtttggggcggcgagaatcttgaattcagcttcaggatttggcagtgcgggggggtgcttgaaacacatccatgctcccacgtcgggcatgtctttccgaaacaggcgccttatagcagaaacaaggccctagcaaactccgtacgcgccgccgaggtgtggatggacgaattcaaagaactgtactaccataggaatccacgcgcccgcttggagccctttggagatgtaacagaacgaaagcagcttcgggacaagctccagtgtaaggatttcaagtggttcctcgaaaccgtgtatcctgaacttcatgttcctgaggatcgccccggattttttgggatgctgcagaacaaggggctcaccgattactgcttcgattacaaccctcccgatgagaaccagattgttggtcaccaggtcattctctatctgtgccacggcatgggccagaatcaattcttcgagtacacatcccagaaggagatccggtataacacgcaccaaccagaggggtgcattgccgtagaagctggaatggacacactgattatgcatttgtgtgaggaaaccgctcctgaaaaccagaagttcattttgcaggaggacggtagcttgttccacgagcagagcaaaaaatgtgtccaggccgcacgcaaagagagctcggattcttttgtgccgctactacgcgattgtactaatagtgaccatcagaaatggtttttcaaggagcgcatgctctag

SEQ ID NO: 210828 - DNA, 1671 bp, synthetic construct
  misc_feature 1..1671: note = Description of Artificial Sequence: Synthetic coding sequence
  source 1..1671: mol_type = other DNA
atgcggcggttcgtgtactgcaaggtggtgctggccaccagcctgatgtgggtactggtagacgttttccttctgctgtacttctccgagtgcaacaaatgcgacgacaaaaaggaacgctccctgctaccggctcttcgtgccgtcattagccggaaccaagaagggcccggagagatgggcaaggctgtgctcattcccaaagatgaccaagaaaagatgaaggaacttttcaaaatcaatcaatttaacctcatggcctcagacctcatcgccctgaatagatccctgcctgacgtccgattagagggctgcaaaacgaaggtctaccccgatgagttacctaatactagcgtcgtgatcgtattccacaatgaagcctggtctactctactgaggacggtgtactctgtgataaaccggagtccccactatctgctgagcgaggttatcctcgttgacgatgcctcggagcgcgatttcctgaaactgacactcgagaattatgtgaagaacctggaggttcctgtaaaaataatccgcatggaagaacggtcaggcttgatccgcgctcggctccgaggcgcggcagcgtccaagggacaagtaatcacatttttagatgctcactgcgaatgtacgctgggctggctcgaaccactgcttgcacggattaaagaggatagaaagactgtcgtatgtcctatcatcgatgttatttcggacgatactttcgagtatatggccggtagtgatatgacttatggcgggttcaactggaaattaaattttaggtggtacccagtcccgcagagggagatggataggcggaagggagataggacacttccagtccggaccccaactatggctggaggcctgttcagcattgaccggaactactttgaggaaattggcacgtatgacgcaggtatggacatttggggaggggagaacctggagatgagtttcaggatctggcagtgcggaggaagtcttgaaattgtaacttgctcccacgttggacatgtcttccggaaagccaccccgtacaccttccccggcggtacgggtcacgtaattaataaaaataatcggcgcctggccgaggtctggatggacgagtttaaggactttttttacatcattagccctggtgtagtgaaagtggattatggcgatgtatcagtccgcaaaaccttgcgcgaaaacctaaaatgcaagcctttcagctggtaccttgagaatatttatcctgactcccagatcccacgtagatactacagcctgggtgaaattcgcaatgtcgagactaatcagtgtcttgacaacatgggccgtaaagaaaatgagaaggtcgggatctttaactgtcacggcatggggggaaaccaagtcttcagttatactgcagacaaagaaataagaaccgatgatctctgtctcgacgttagccggctgaacgggccagttattatgctgaaatgtcatcacatgagaggtaaccaactgtgggagtacgacgccgaaaggttgaccctgcggcacgtgaacagcaaccagtgcctggatgagcctagtgaggaggataagatggtcccgaccatgcaggattgttccggatcaaggtcgcaacagtggctgctccgtaacatgacccttggcacctag

SEQ ID NO: 210829 - DNA, 1686 bp, synthetic construct
  misc_feature 1..1686: note = Description of Artificial Sequence: Synthetic coding sequence
  source 1..1686: mol_type = other DNA
atgcggcggttcgtgtactgcaaggtggtgctggccaccagcctgatgtgggtattggtggatgtgttcctcctgctttactttagtgagtgtaacaagtgtgatgataagaaggagcgcagtttgctcccggcccttagggccgttatatcaaggaaccaggagggcccaggagagatgggcaaggcagttcttatacctaaggatgaccaggagaagatgaaggagttgtttaagatcaatcaatttaacctaatggcttctgatctgatagccttaaatcgaagcttgcccgatgtgcggctcgaaggatgtaagactaaggtgtatcccgatgagctgcccaacacctctgttgtaatcgttttccataacgaagcgtggtctactctgcttagaacagtttattccgtcatcaatcggagtcctcactacctgctgtcggaggtgatattagttgatgacgcctccgagagagattttttgaaactcaccctggaaaattatgtcaaaaacttggaagtcccagtgaagataattagaatggaggagcgctccggactgattagagctcgcttgaggggcgctgccgcgagcaaaggccaagtgattacattccttgacgcacattgtgaatgtacccttggatggctcgaaccattgctggcgcggatcaaagaggataggaaaacagtcgtatgccctattatcgacgtcatttccgacgatacttttgaatatatggccggatcggatatgacttatggcggctttaattggaaacttaatttccggtggtatccagtaccgcagagagagatggaccggagaaagggggaccgcaccctaccagtgcgcacaccaaccatggccggcgggctcttcagcatcgatagaaactactttgaggagatcggtacttatgatgccggaatggatatttggggaggagagaaccttgagatgagcttcagaatctggcaatgcggggggtctctggaaatcgtgacctgttcccacgtggggcatgtgtttaggaaggctactccgtataccttccccggcggcactgggcatgtgatcaataagaataaccggaggctggcagaggtgtggatggatgagtttaaggacttcttttatatcatctccccaggcgtggttaaggtggactacggcgatgtgtctgttagaaagaccctgagggagaacctgaaatgtaagcccttttcatggtatctggagaacatctaccccgattcccagatccccaggcgatactatagtctgggagaaattcgaaacgtggaaaccaatcagtgtctggataatatgggacggaaagaaaatgagaaggttgggattttcaattgccacggtatgggagggaaccaggtgttcagctatactgccgacaaagagatccgaacagatgacttatgcctagatgtgagtcggttgaacggtccagtcataatgcttaagtgtcaccacatgcgaggcaaccagctgtgggagtatgatgctgaatcctgccttagcgtgaataaggttgccgacggctcccagcaccccaccgtcgaaacatgtaacgactctacgctgcagaaatggctgttgcgcaactacaccagaatggagattttcaggaacatcttcggaaactctaccgactatattctgtag

SEQ ID NO: 210830 - DNA, 60 bp, synthetic construct
  misc_feature 1..60: note = Description of Artificial Sequence: Synthetic coding sequence
  source 1..60: mol_type = other DNA
atgcggcggttcgtgtactgcaaggtggtgctggccaccagcctgatgtgggtgctgtag

SEQ ID NO: 210831 - DNA, 1659 bp, synthetic construct
  misc_feature 1..1659: note = Description of Artificial Sequence: Synthetic coding sequence
  source 1..1659: mol_type = other DNA
atgcggcggctgacccggcggctggtgctgcccgtgttcggcgtgctgtggattacagtgctattgtttttttgggtaacaaaaagaaagctggaggtgcccacagggcccgaggtccagaccccaaaaccatctgacgccgattgggatgacttgtgggatcagtttgacgagcgtagatacctcaacgccaagaaatggcgcgtgggggacgacccttataaactttatgccttcaatcagcgcgagtctgaacgcattagcagcaatcgggccatccccgataccagacatctgagatgcacactgctcgtttactgcacggatcttcccccaactagcatcatcataacgtttcataatgaagcacgttctacactcctccggacgatcaggtcagtgctgaatcgaacgcccacacacttaatccgtgagattatactggttgacgacttctccaatgacccagacgactgtaagcagctgatcaaactgcccaaagtgaaatgcctaaggaataatgagcgccaggggcttgtccgcagcaggatccgcggggctgatattgctcaggggacaaccctcacctttctggatagtcactgcgaggttaatcgcgactggctgcagcccctgctgcatcgggttaaagaggactacacaagggttgtgtgcccagtgatcgatattatcaacctggacacatttacgtacattgagagtgccagtgagctgcgcggtggattcgattggtcgctccacttccagtgggagcaactttcaccagaacagaaagcacgccgactggaccccactgagcccatacggactccaatcatcgccgggggcctttttgttatagacaaggcatggttcgattacctgggtaaatacgacatggatatggacatctggggaggtgaaaacttcgaaatctcttttcgcgtctggatgtgcggaggcagcctcgagattgttccttgctcccgtgtaggacatgttttccgcaaaaagcacccatacgtgttcccggacggcaacgctaatacttacatcaaaaacactaagcgtaccgcggaagtgtggatggatgaatacaaacaatattactacgcagctcgtcccttcgccttagaacggccctttggtaatgtcgagtcacgcctcgacctacgcaaaaatctccggtgtcagtcctttaaatggtatctggaaaacatctatccggaactgagcataccaaaagagtctagcattcagaaggggaatatccggcaacggcagaagtgtctcgagtcacaacgtcagaataatcaggagacccccaacctgaagttaagcccttgcgccaaggtaaaaggggaggacgctaagagccaagtatgggcatttacttatacgcagcaaatcttacaggaagagctatgtctgtccgtaattaccctgttccctggggctccagtggtgctcgtactctgcaaaaatggcgacgacaggcagcagtggaccaagaccggcagccacatcgagcacatagctagccacctgtgccttgacaccgatatgttcggcgatgggactgaaaatggcaaggagatcgtcgtcaacccatgtgaaagctctctgatgagccagcattgggacatggtgagtagttag

SEQ ID NO: 210832 - DNA, 1560 bp, synthetic construct
  misc_feature 1..1560: note = Description of Artificial Sequence: Synthetic coding sequence
  source 1..1560: mol_type = other DNA
atgcggcggctgacccggcggctggtgctgcccgtgttcggcgtgctatggatcactgtcctattattcttttgggtgactaaacggaaactggaggttcctacaggcccggaagtgcagacgcctaagccaagcgatgccgactgggacgatctgtgggatcagttcgacgaacgcagatacttaaatgccaagaaatggcgcgttggcgacgatccatacaagctgtatgcctttaaccagagagaatctgagcggatcagttcaaatcgggccatcccagacacacgtcatctcagtgtgcttaatcgaacccctacgcacctgataagagagatcatcttggtagatgacttttcaaacgaccctgatgattgcaaacagcttataaaactcccaaaggtcaaatgcctgcgcaataacgaacggcagggtttagtacgatcccgaatccggggagccgatattgcccagggaactactcttacattcttagatagccattgtgaagtgaatcgtgattggttacagcccttgctacatagagtgaaagaagattacactagggttgtgtgtcccgtgattgacattataaacctggatacttttacttacatcgaatcagcctccgaactgcggggcgggttcgattggtctctgcactttcagtgggagcagctctctcctgagcagaaggccagacgactggaccccacagaacccataaggacccctatcatcgccgggggtctcttcgtgatcgataaggcctggtttgactatttagggaaatatgacatggatatggatatatggggcggagaaaacttcgagatcagctttcgcgtatggatgtgcggtgggagcctagagattgtgccctgctcgcgagttgggcatgtatttcgaaagaagcatccatacgttttcccagacgggaacgctaacacgtatattaagaacaccaaaaggactgccgaagtctggatggatgagtacaagcagtactattacgctgcgaggccctttgcccttgaacgtcctttcggtaacgtcgagagccgccttgatctaaggaagaacctgagatgccagtccttcaaatggtaccttgaaaacatatacccggagctatctattcccaaagagagctccatccagaaaggaaatatacggcagagacagaagtgcctggagtctcagcgccagaacaatcaggagacacctaatctgaagttgtctccatgtgcaaaggttaaaggcgaggacgcaaagtcacaggtttgggcatttacatatacacagcagatcttgcaggaggagctgtgtctgtcggtaataaccctgtttccgggggccccagtggtgttagtgctatgcaagaatggtgatgatcggcagcaatggacgaaaacaggaagccacattgagcatattgctagtcatttatgcttagataccgatatgtttggagacggaaccgaaaacgggaaggagatcgtcgtaaacccatgtgagtcaagtttgatgagccagcattgggatatggttagtagctag

SEQ ID NO: 210833 - DNA, 1599 bp, synthetic construct
  misc_feature 1..1599: note = Description of Artificial Sequence: Synthetic coding sequence
  source 1..1599: mol_type = other DNA
atgagcttccccatgagcctggcccggagcagcgtgcccttcgccgatagtggactgagcagtagccagcccagcgatgcggattgggatgacctgtgggaccaattcgatgaacgcagatatctgaacgccaaaaaatggagggtaggggacgacccttacaaactgtacgcattcaatcagagagagtcagaacgcatcagttccaaccgagcgatccctgataccaggcaccttcggtgtaccctgctcgtttactgtaccgaccttccgcctacaagcatcatcatcactttccataacgaggcacgaagcaccttgctgcgtacgatccggagtgtgctgaaccgaacaccaacacacttaattcgcgagattatcttggtggatgatttctcaaacgacccagacgactgtaaacaactgattaaactccccaaagtaaaatgcctacgaaataacgaacgccagggattagttcgaagccggatccggggcgccgatattgcccagggtacaacgctcacctttctggacagtcactgtgaggtgaatcgcgactggctgcaaccgctcctacatagggtgaaagaggattatactcgcgttgtctgccctgtcattgatatcatcaacctggatacatttacttacatcgagtccgcttccgagctgcggggagggttcgattggtcactgcatttccagtgggagcagctgtctcccgaacaaaaggcaagaaggctggatcctaccgaacccattcgaactcctataatagctggcgggttatttgtcattgacaaagcgtggttcgactacctcggcaaatacgatatggacatggacatctgggggggtgaaaattttgaaatttcgttcagggtgtggatgtgcggcggcagtcttgagattgtgccatgctctcgcgtaggccatgtcttccggaagaaacacccttacgtattccccgatggaaacgccaatacctacataaaaaatactaagcgaaccgcagaagtgtggatggatgagtataaacagtactattacgccgcccgtcctttcgctttggaaagacccttcggtaatgttgaaagtaggttggacttgaggaaaaaccttaggtgtcagagctttaagtggtacctggaaaacatttatcctgaactttccatccccaaggagtcttcaattcaaaaggggaacattagacaacggcagaaatgtctggaaagccagaggcaaaacaaccaggaaacacctaacctgaaactttctccctgtgccaaagtcaagggtgaggatgctaaaagtcaagtatgggcttttacgtacacacagcagatccttcaggaggaactctgcctgtctgttatcacccttttccccggcgcacctgtggtgctggttctgtgcaagaacggagacgacaggcagcaatggacgaaaacaggcagccacatagagcacattgcttcacacctgtgcctggacaccgacatgttcggcgacggtacagagaatggtaaagagatcgttgtgaatccttgcgaaagctccttaatgtcccagcattgggatatggtatcatcttag

SEQ ID NO: 210834 - DNA, 1554 bp, synthetic construct
  misc_feature 1..1554: note = Description of Artificial Sequence: Synthetic coding sequence
  source 1..1554: mol_type = other DNA
atggcccaggacgagagctgcccccccagcgacgccgactgggacgacctttgggaccagtttgatgagcgacggtatctgaatgccaaaaagtggcgcgtgggagatgacccatacaagctatatgccttcaaccagagggagagcgaacggattagctcaaaccgggccatcccagatactcggcatctgaggtgtacattgctggtgtactgcaccgacttacctcccacctccataatcatcacctttcataatgaagcccggagtacactgctaaggaccatccgctccgtgctgaatcgtactcctacccatctaatcagggaaatcattcttgttgatgatttcagcaatgatccagatgactgcaaacaattaatcaaactgcccaaggtgaagtgtttgagaaataatgaaagacagggactggtccgaagtagaatcaggggagcagatattgcccagggcacaaccctgacatttctggattcccattgtgaagttaatcgggactggctacagccccttctgcaccgtgtgaaggaagactacactagggtcgtgtgtccagtcatcgatataatcaacctagatactttcacttacattgaaagtgcctctgagcttagaggaggtttcgactggtcactccactttcagtgggaacagctcagccccgaacagaaggcccgccggctcgacccaacggaacctatcagaacccccatcatcgcagggggacttttcgtgatcgacaaggcttggtttgactacctagggaaatacgacatggacatggatatctggggcggggaaaatttcgagatttcctttagggtttggatgtgcggcggatctttagaaattgtgccttgttctagggtggggcacgtgttcaggaaaaaacacccttatgtgttcccggacggtaacgccaatacctatattaaaaacactaagcgaacggccgaagtttggatggatgagtacaagcagtactactatgcagcccggccattcgccttggaaagaccatttgggaacgtggaatccagactggacctgcggaagaatctgagatgtcagagcttcaagtggtacctggaaaacatctaccctgaactgagcatccctaaagaatcaagcatccagaagggcaacatccggcaacgacagaaatgcctcgaaagccagcgccaaaataaccaggaaaccccaaacctgaaacttagcccctgcgctaaggtaaagggcgaagacgctaagtcacaggtctgggccttcacgtacactcagcagatccttcaggaggaactctgcttgtcagttattaccttgttccctggggcccctgtggttttggttctgtgtaaaaacggggatgatcgacagcaatggaccaagaccggcagccacattgaacacatcgccagtcatttgtgcctcgacactgacatgtttggtgacggtaccgagaacggcaaagagatcgttgttaatccttgtgagagttcattgatgtctcagcattgggacatggtctccagctag

SEQ ID NO: 210835 - DNA, 1674 bp, synthetic construct
  misc_feature 1..1674: note = Description of Artificial Sequence: Synthetic coding sequence
  source 1..1674: mol_type = other DNA
atgcggcggctgacccggcggctggtgctgcccgtgttcggcgtgttatggatcaccgttcttctcttcttttgggtgacgaaaaggaagttagaggtcccaactggacctgaagttcagactccaaaggtgtggtccctgttcttcaaggtagccgggatgagcccatgggcacctcaggtccctgtcagcccaaccccaccataccagagggggcatctgcctactggtggccatctggcagtctgtcactttccgtgccttttacaagaggcccagtttcacctccagactcaggttttcctgcaggtgcggtgcaccctgctggtctattgtacagacctcccccctaccagtatcattataacattccacaacgaagcaaggtctacattgttgcggacaattaggtcagtactgaatagaacacctacccacctgatccgcgaaataatcctggtggacgattttagcaacgaccctgacgattgtaaacaactcataaagctgcctaaagtgaagtgtcttaggaacaatgagcgacaaggtcttgttaggagcagaatcaggggcgccgatattgcccagggcactacactgacttttctagactcccactgtgaagtgaacagagattggctccagccccttctgcaccgtgtaaaggaggattacactcgcgttgtgtgccctgtgattgatatcatcaatctggataccttcacctatattgaatctgcatccgaattgcgtggagggttcgattggtcactgcacttccagtgggagcagcttagtccagagcagaaggccagaagactcgatcccaccgagcccattcgcacacccattattgccggaggactctttgtgattgacaaggcatggttcgattacctggggaagtacgacatggatatggacatctggggaggggagaattttgagataagtttcagggtgtggatgtgtgggggcagcctcgaaattgtgccttgttctcgcgtgggccatgtcttcagaaaaaagcatccatatgtgtttcccgatggcaacgcgaacacatacattaagaatactaagcgaaccgccgaagtatggatggacgaatataagcaatattactacgccgctcgacccttcgccctggagagaccctttgggaacgtagagtcgcgtcttgatctgcggaaaaaccttagatgtcagagctttaagtggtacctggagaacatttatccagaattgtcgatcccaaaggaatcatcaatccagaagggcaacattcgccagcgccagaagtgcctagaatcccagaggcaaaacaaccaggagacccccaacctgaaacttagcccttgtgccaaagtgaagggagaggatgccaaatctcaagtgtgggcatttacttacactcagcaaattctccaggaggaactgtgtctgtccgtgatcactttgttccctggggcccctgtggtgctcgttctgtgtaaaaacggggatgaccgccagcagtggactaaaacaggctcccacatcgaacatattgccagccatctttgcttagatacagatatgtttggggacggtaccgaaaacggcaaagagattgtggtgaatccctgtgagtcatccctgatgtctcaacactgggacatggtgtccagctag

SEQ ID NO: 210836 - DNA, 1716 bp, synthetic construct
  misc_feature 1..1716: note = Description of Artificial Sequence: Synthetic coding sequence
  source 1..1716: mol_type = other DNA
atgcggcggcggagccggatgctgctgtgcttcgccttcctgtgggttctgggcatcgcttattatatgtactccgggggcggaagcgctctggccggcggggcaggcggtggagccgggcgcaaagaggactggaatgaaatagatccaattaaaaagaaggacttacatcactccaacggcgaggagaaggcccagtccatggagacactgccgccaggtaaggtgagatggcctgacttcaatcaggaagcttacgtcgggggcacgatggttaggtcgggccaggatccctacgcccggaacaagttcaaccaggtggaaagtgataaattgcgaatggaccgcgccatccctgacacacggcacgaccaatgccagcgcaaacaatggcgcgtggacctcccggccacctcagtggtgatcacctttcacaacgaggcccgatccgcactgcttcggacggtggtctccgtccttaagaagtcgcctccacaccttattaaagaaatcattttggtcgacgattactcaaatgatccagaagacggagctctgctcgggaagattgagaaagtacgtgttttgcgaaacgatcggcgggaaggactgatgcgtagcagagtgcgtggagccgacgctgcccaggccaaggtcctgacattcctggactctcattgcgagtgtaacgaacattggcttgagcccctgttggagcgggttgccgaagacagaacgcgagttgtaagcccaatcattgatgttattaacatggacaactttcaatacgtaggggcatcagcggaccttaaggggggcttcgattggaacctggtgttcaagtgggattacatgacccctgagcaaagacgctctcgccagggcaatcccgtggcccccataaagaccccgatgattgccggcggactattcgtcatggacaaattttactttgaggaactagggaagtatgacatgatgatggacgtgtggggcggggaaaatttggaaatcagttttcgggtttggcagtgtggaggctccctggagattattccctgttcgcgtgtcggacacgtgtttcggaagcagcatccctacacattccctggaggcagtgggactgtattcgctcgaaatacccgccgcgccgcagaagtgtggatggacgagtacaaaaacttctattatgcagcggtcccctcagccaggaacgtaccatatgggaacattcaaagtcgccttgaattacgcaagaagctgtcatgcaaacctttcaagtggtacctagaaaacgtgtaccccgagcttcgggtgccagatcatcaggacatcgccttcggggctctgcaacaaggcaccaattgcctagacaccctgggacactttgccgacggcgttgtgggtgtatacgaatgccacaatgcaggcggcaaccaggagtgggctctgacaaaggaaaagagtgtcaagcatatggacctttgcctcacggtagtagacagggcgccaggatcactaataaaacttcaggggtgcagagagaatgactcccggcagaagtgggagcaaattgagggaaatagtaagttgcgccatgtgggatctaacttatgccttgactctcggacggccaagtcaggaggtttaagcgtggaagtatgcggcccagctctgagccagcagtggaagtttaccctgaacctccagcagtag

SEQ ID NO: 210837 - DNA, 798 bp, synthetic construct
  misc_feature 1..798: note = Description of Artificial Sequence: Synthetic coding sequence
  source 1..798: mol_type = other DNA
atggtgcggagcggccaggacccctacgcccggaacaagttcaaccaggtcgaatccgacaaactgcgaatggaccgagcaattcctgacacccggcatgaccagtgtcagcggaagcagtggcgagtggatctgcctgcaacctccgtggtgatcactttccacaatgaggctcgctcagccttgttacgtaccgtcgtttcagttctgaagaaaagccctcctcatctaattaaggagataatccttgtagatgattacagcaacgaccctgaagacggggccttacttggaaagatcgagaaagtacgcgtgctccggaacgaccgtagggagggactcatgaggagcagagtgcgaggcgcagacgcggcccaggccaaggtgctcacattcctggacagccactgcgagtgtaacgaacactggctagagcctttgctggaaagggtggccgaggatcgtactcgggtagtgagccctattatcgacgtcattaacatggacaactttcagtacgtgggtgcatcagcagacctaaaaggggggtttgactggaacttggtttttaagtgggactacatgacacccgaacagcgtcggtctagacagggcaaccccgttgctccgatcaaggatctcgtgccccgcgtggccgtgtggtggcagccaggggatcacccagtccagccctgcgggacccgagttccagaggccgctcccctccatgtcccgggttggcagtggcactgcctgtgccccaagcacccccctggtagcagagggctggacggctag

SEQ ID NO: 210838 - DNA, 1086 bp, synthetic construct
  misc_feature 1..1086: note = Description of Artificial Sequence: Synthetic coding sequence
  source 1..1086: mol_type = other DNA
atgcggcggcggagccggatgctgctgtgcttcgccttcctgtgggtcctcggaatcgcatattacatgtactccggtggcggtagtgccttggccgggggagcagggggaggggcaggccgcaaggaggattggaatgagattgaccctattaaaaaaaaggacctgcaccatagcaacggtgccgaggacggtgctctcctcggtaagatcgaaaaggtgagagtgttaaggaatgacaggcgggagggacttatgcgttcccgcgttcggggagccgacgccgctcaggctaaagtattgacatttctggactcccattgtgagtgtaacgaacattggctagaacctctgttagaacgcgttgctgaggacaggacaagagtggttagtccaattattgacgtgatcaacatggataacttccaatatgtcggtgcctccgccgaccttaaaggcggcttcgactggaatttagtttttaagtgggattacatgactcccgagcaaagacgctccagacaaggtaaccccgtggcacccatcaagacgccgatgattgccggggggctctttgttatggataagttttattttgaagagctgggcaaatatgacatgatgatggatgtgtggggaggggaaaatctggaaattagcttcagggtgtggcagtgcggtggctcactggaaattatcccgtgctcgcgcgtgggtcatgtattcaggaaacagcacccctatacattccctggggggtccggaaccgttttcgctagaaataccaggagagcagccgaggtgtggatggatgagtataagaatttctattatgctgccgtgccctcggcgcggaatgtgccgtacggcaacatccagtccaggctggaactgcggaaaaagctgagctgtaaaccgttcaaatggtatctggagaatgtgtaccctgagcttcgggtgcccgatcatcaagacatcgcattcggcgctttgcagcagggcactaactgcctcgatacactcggacacttcgccgatggggtggtgggcgtgtatgagtgccatgtggcggggttaagacaatag

SEQ ID NO: 210839 - DNA, 1602 bp, synthetic construct
  misc_feature 1..1602: note = Description of Artificial Sequence: Synthetic coding sequence
  source 1..1602: mol_type = other DNA
atggccgaccgggaggactggaacgagatcgaccccatcaagaagaaagatctgcatcatagcaatggagaagagaaagcgcagtcaatggagactttgcctcctggaaaagtgcggtggcctgacttcaaccaagaggcttacgtgggcggaaccatggtacgctctggtcaggatccctatgccagaaataagtttaatcaggtggagagtgataagctgagaatggaccgcgccatacccgacacgaggcatgatcagtgccagagaaaacagtggcgtgtcgatctgccggccacaagcgtggtgatcaccttccataacgaagctcggtccgcactgctcagaacagtggtgtcggtcctgaagaagtccccccctcatctcataaaggagatcatcctcgtggacgactattctaacgaccccgaagatggcgcgcttctcggtaaaatcgagaaggttagggtattgcgcaatgaccgccgcgagggactaatgcgctctcgcgtgcgtggcgctgacgctgcccaggccaaggtacttacctttcttgacagtcactgtgaatgcaatgagcactggcttgaacccctcctggaacgtgtggcggaagatcggaccagggtggtgagcccaatcatagacgtgataaacatggacaatttccagtatgtgggcgcctcagcagacctcaaaggcggcttcgactggaatctggtgttcaaatgggattacatgacaccagagcaaagacgtagcagacaagggaatccagtagccccaattaaaacacccatgattgccgggggtctctttgtaatggacaagttctatttcgaggaactaggcaagtacgatatgatgatggatgtgtggggcggcgagaatttagaaatttcatttagggtctggcagtgtggtggcagtctggaaatcattccatgctcacgtgtgggccacgtattccggaagcagcacccttatacatttccaggaggatctgggacagtgttcgcccgcaacacccggcgcgctgcggaggtctggatggatgaatacaaaaacttttattatgcagcggtcccgagcgctcgtaacgtgccatatgggaacatccaaagcaggctcgaattacggaagaaattgagctgcaaacctttcaagtggtatcttgaaaacgtgtaccctgaactgcgcgttcctgaccatcaggatatagccttcggcgcactgcagcaggggaccaattgtctggacacactgggtcatttcgcagacggcgtggttggggtctacgagtgccacaacgctggggggaaccaggagtgggccctcaccaaggagaaaagcgttaagcacatggacctatgcctcacggttgtcgatagagcacccggatctctgataaagctgcaggggtgccgcgagaacgactctagacagaaatgggagcaaatcgaaggcaactccaagttgcgacacgttggctccaatctgtgcctggatagccggacagccaagtctggcgggttgagcgttgaagtttgtgggccggctctgtcccaacagtggaaatttactctcaacctccagcagtag

SEQ ID NO: 210840 - DNA, 1902 bp, synthetic construct
  misc_feature 1..1902: note = Description of Artificial Sequence: Synthetic coding sequence
  source 1..1902: mol_type = other DNA
atggcccacctgaagcggctggtgaagctgcacatcaagcggcactatcacaaaaagttctggaagctgggggcagtcatatttttctttataatcgtgctcgtgctaatgcagcgtgaggtctccgttcaatatagcaaagaagagagcagaatggagagaaatatgaaaaataaaaataaaatgctggaccttatgttggaggctgtgaataacatcaaggatgcgatgccaaaaatgcagatcggggcccccgtgcgccagaatatcgacgccggagagcgcccatgcctgcagggctactacacggcagcagagctgaaacccgtgttggacaggcctcctcaggactccaacgcccctggggctagcggtaaggcattcaaaacaactaacttgtccgtggaggagcaaaaagagaaggagcggggtgaggctaaacactgtttcaatgcattcgcgtctgataggatatcgctccacagggatctgggcccagacactcgcccacccgagtgtattgagcagaagttcaaacgttgccctcccttgcccaccacatctgtgatcattgtgtttcacaacgaagcatggtctaccctcctgaggacagtgcatagcgtgctgtacagttcccctgccatcctgttaaaggagattatcctggtggacgacgccagcgtcgatgaatacttgcacgataagctggatgaatacgtgaaacagttcagtatcgtcaagatcgttcgccagcgggagcgcaaagggctgattaccgcccggcttctgggcgccaccgtggctacagcagagacccttacctttttggacgcacattgtgagtgcttttacggctggctcgagccacttctggcacgcatcgccgagaactacacagctgtcgtcagtccagacatcgcatccatagaccttaatacatttgaatttaataaacccagcccctacggtagcaaccacaaccgcggcaacttcgattggagtctgagctttggctgggagtccctgccagaccatgagaagcaacggaggaaggacgaaacttatcccattaagacccctaccttcgcaggaggattgttcagtatcagcaaggagtattttgaatatattggttcgtatgacgaggaaatggagatctggggcggagaaaacatcgagatgtcattccgggtgtggcaatgtgggggtcagttggagataatgccatgttcagtggttggtcatgtgttccggagcaagagtccacacagctttcccaagggaacgcaggtgatagcacgaaaccaagtcaggctggccgaggtctggatggacgagtacaaggaaatcttctatagacggaatactgatgcggccaagattgtgaagcagaaggcatttggtgacctctcaaaacgctttgagatcaaacatagactccagtgtaagaatttcacctggtatcttaacaacatttatccggaggtatacgtgcctgacctgaacccagtgatttccgggtatattaagtctgtgggccagcctctctgtctagacgtgggtgagaacaatcaaggaggcaagccactcataatgtacacatgccatggattgggcgggaaccagtacttcgagtatagtgcacaacatgagatcaggcacaatatccaaaaagaactgtgtttacacgccgcccagggcttggtccagttgaaggcttgcacttacaaaggacacaagacagtcgtcactggggaacagatttgggaaatacaaaaggatcagctgctgtacaacccattcctgaagatgtgtctgtccgccaacggggagcatccttctctcgtgtcctgcaacccctccgaccctctgcagaaatggatcctgtcccagaatgattag

SEQ ID NO: 210841 - DNA, 1395 bp, synthetic construct
  misc_feature 1..1395: note = Description of Artificial Sequence: Synthetic coding sequence
  source 1..1395: mol_type = other DNA
atggcccacctgaagcggctggtgaagctgcacatcaagcggcactatcacaaaaagttctggaaactgggagccgttatttttttctttatcattgtactggtgttgatgcagcgcgaagtgtccgtgcaatattccaaggaggagagtagaatggagcgcaacatgaaaaataaaaataagatgttggacttgatgctcgaagcagtcaataacattaaggatgctatgcctaagatgcagattggggcaccagtcagacagaacatcgacgccggcgaacgaccatgtctacaaggctattacaccgccgcagaactgaagcctgtgttagacaggcccccccaggacagtaatgccccaggggcgagcggaaaggcttttaaaacgactaatctgagtgtggaggagcagaaggagaaagaaagaggagaggcaaaacattgttttaacgctttcgctagcgatagaatcagcttgcaccgcgatctcggtcctgacacaagaccccccgaatgtatcgagcagaagttcaagcgctgtcctcccctacccacaacatccgtgattatcgtttttcataacgaggcctggtccaccttacttaggacagttcactcagtgctgtatagcagcccggctatcctcctgaaggagatcattctggtggacgacgctagtgttgatgagtacctgcacgataagctggacgagtacgtgaagcagttctcaattgtgaagattgttcgtcagcgggagaggaaaggcctaataaccgcccggctcctgggggccaccgtggccaccgccgaaacattgacatttcttgacgcacattgcgaatgtttttatggctggctggagccgctcctggcaagaattgccgagaattacactgccgtagtctcccctgatattgcatccattgatctaaataccttcgagttcaacaaaccctcaccgtacggttccaatcacaatagggggaactttgattggtccctctccttcgggtgggaatcactccccgaccacgaaaagcaaagaaggaaagatgagacctatcccatcaagaccccaacctttgctggcgggttattttctatttcaaaagaatactttgaatatatcggatcttatgatgaggaaatggagatctgggggggcgagaatatcgagatgagcttccgggtttggcaatgcgggggacagttggagataatgccctgctcggtggtcggtcatgtctttaggagcaagagtccacattctttcccgaaggggacccaggtgatcgcccgcaaccaagtccgcctggccgaggtgtggatggatgagtacaaggagatcttctaccgaaggaacacggatgcagcgaagatcgtgaagcagtag

SEQ ID NO: 210842 - DNA, 174 bp, synthetic construct
  misc_feature 1..174: note = Description of Artificial Sequence: Synthetic coding sequence
  source 1..174: mol_type = other DNA
atggcccacctgaagcggctggtgaagctgcacatcaagcggcactaccacaagaagttctggaagctcggcgcagtgatcttctttttcatcatcgtgcttgtcttgatgcagagagaagtcagcgtccaatactccaaggaggagtctaggatggagcgcaatatgaaatag

SEQ ID NO: 210843 - DNA, 78 bp, synthetic construct
  misc_feature 1..78: note = Description of Artificial Sequence: Synthetic coding sequence
  source 1..78: mol_type = other DNA
atggcccacctgaagcggctggtgaagctgcacatcaagcggcactatcataagaagttctggaaactgggtgcctag

SEQ ID NO: 210844 - DNA, 273 bp, synthetic construct
  misc_feature 1..273: note = Description of Artificial Sequence: Synthetic coding sequence
  source 1..273: mol_type = other DNA
atggcccacctgaagcggctggtgaagctgcacatcaagcggcactatcacaaaaaattctggaaactgggagccgtgatattttttttcattatcgtgctggtcttgatgcagagagaagtgtctgttcagtactctaaggaagaaagtagaatggaacgaaatatgaaaaataaaaacaagatgctcgaccttatgctagaagccgtgaacaatatcaaggacgccatgcctaaaatgcagatcggcgccccagtgcggcagaacatatag

SEQ ID NO: 210845 - DNA, 36 bp, synthetic construct
  misc_feature 1..36: note = Description of Artificial Sequence: Synthetic coding sequence
  source 1..36: mol_type = other DNA
atggcccacctgaagcggctggtgaagctgcactag

SEQ ID NO: 210846 - DNA, 1737 bp, synthetic construct
  misc_feature 1..1737: note = Description of Artificial Sequence: Synthetic coding sequence
  source 1..1737: mol_type = other DNA
atggccgtgcggtggacctgggccggcaagagctgcctgctgctggcctttctgacagtggcatatatcttcgtagagcttctggtgtctacatttcatgcctctgccggcgccggacgcgccagggagctgggaagtaggaggctgtctgatctgcagaagaacacagaggacctcagtcgacccctatacaaaaagccgccggctgattcccgagcactaggcgaatggggtaaagcgtcaaagcttcagttgaatgaggatgaactgaagcagcaggaggaactaatagaacggtacgctatcaacatttatctgtcggaccgaatcagtttacatcgtcacatcgaagataaaagaatgtatgagtgcaaaagccagaaattcaattacagaacccttccgacaacctctgtgatcatcgcattttacaacgaggcctggagcacactcctgagaaccatccatagcgtcctggagacaagccccgcagtgctgctgaaggagatcatcctcgtggacgaccttagcgatagggtgtacctgaagacgcagcttgaaacatacatttccaatctggaccgggtaagactgatcaggacgaataagagagaggggttagtgagagctcggctgatcggagccaccttcgctaccggtgacgtgctgacattcctggattgtcactgcgagtgcaatagcggctggctggagcccctgctcgagcggatcggccgtgatgaaactgcagtagtttgccctgtgattgacacgattgactggaacacatttgagttttacatgcaaattggcgaacccatgattggcggattcgattggcgtctcacttttcagtggcatagtgtccctaagcaggaacgcgacaggagaatcagtaggatcgatccaataagatccccgaccatggctggcggtctatttgcagtgtcgaagaaatatttccagtacctcggcacctacgatactggtatggaggtgtgggggggtgaaaacctggagctaagctttagagtctggcaatgtggtggtaagctggaaatccatccctgtagtcacgtcggccacgtgtttcccaagcgtgctccatatgcacgccccaactttctgcaaaatactgcccgcgcagccgaagtgtggatggacgaatataaggagcacttctacaacaggaatcctcccgctcggaaggaagcctacggcgatattagcgagcggaagttgttacgcgaaaggctaagatgcaagtctttcgattggtatctcaagaacgtgttcccaaacctccacgttccggaagataggcctggttggcacggggccatacggtctcgcggaatcagttcagagtgtctggattacaatagccctgacaacaacccaacaggagctaacctgagcctgtttgggtgtcatggacaggggggcaatcagttcttcgaatacacctccaacaaggagatccgcttcaactcagtgacagagttgtgtgccgaggtacctgagcagaagaattatgtgggcatgcaaaactgtccaaaggatggattcccagtgcctgctaacatcatttggcactttaaagaggacggcaccatttttcatccgcattctggtttatgcctctcagcctataggacacctgaaggcaggcccgacgtccagatgaggacctgcgacgctttggataagaaccagatttggtcatttgaaaagtag

SEQ ID NO: 210847 - DNA, 1869 bp, synthetic construct
  misc_feature 1..1869: note = Description of Artificial Sequence: Synthetic coding sequence
  source 1..1869: mol_type = other DNA
atgcggctgctgcggcggcggcacatgcccctgcggctggccatggtcgggtgcgcctttgtgctgttcctgtttctcctgcatcgcgatgtgtcctcccgggaggaagccaccgaaaaaccgtggttaaagtccttggtgtctcgcaaagaccacgtattggaccttatgttagaagctatgaataatctgcgggacagtatgccgaagctccagatacgggcccccgaagcccagcagactctgtttagcatcaatcagtcatgccttcccgggttctacacgccggccgagctgaagccattttgggaaaggccgccacaggaccctaatgcgcctggcgccgacggtaaagcttttcagaagtctaaatggacgcctttagagacccaagagaaggaagaaggatataagaaacactgctttaacgcatttgcctccgaccggatctcactacaacggtctttgggtcccgacacgaggcctccagagtgtgtggaccagaaattccggcgatgtcctcctctggccacgacgtccgtgattatcgtgtttcacaatgaagcctggtccaccctgttgaggacggtgtattcagttctgcacaccacacctgctatcctcctgaaggagatcattctggtagatgacgccagcacggaagagcacctgaaggaaaagctcgaacaatacgttaagcaactacaggttgtgagggtggttaggcaggaagaacgtaagggccttatcacagcccggctgttaggcgcgagcgtcgcccaggcagaggttttaaccttcctagacgcccactgtgagtgcttccatggctggctcgagcctcttctggccagaattgcagaggataagactgttgtggtgtccccggatatcgtgacgatcgacttgaataccttcgagtttgccaagcccgtacagagaggcagggtgcattcgaggggcaacttcgactggtcactgaccttcgggtgggaaacactgcctcctcatgaaaaacagcggaggaaagacgaaacatatccaatcaaatcacctactttcgctggcgggctgttttccatctccaaatcttacttcgagcatattggcacatatgacaaccagatggagatttggggcggagagaacgtggagatgagctttcgagtgtggcagtgtgggggtcagcttgagattatcccatgtagcgtagtggggcacgtgttccgaacaaagtcaccccatacgtttcctaaaggaacgagcgtcattgctcgtaatcaggtccgattggccgaggtttggatggactcttacaaaaagattttttaccgtcgtaatctgcaggctgctaagatggctcaagagaaaagctttggggacataagcgagcgcctgcagctgcgcgaacagctgcattgccacaattttagttggtatctccataatgtttacccggaaatgtttgtgcccgatctaacccctaccttttacggcgccattaagaatttggggaccaaccagtgcctggacgttggcgagaataacagaggaggcaagcctttgattatgtattcctgccacggtctgggcggaaaccagtatttcgagtacaccacccagagagatttgcgtcacaacatcgccaaacaactgtgcctccatgtttctaagggcgcactcggccttgggagctgccatttcactgggaagaatagccaagtccccaaagacgaggaatgggagctggcccaagaccagctgattcgaaattccggttcaggaacttgcctgacctcgcaggataaaaagcccgctatggcaccctgcaatccttccgacccacatcagctgtggttgtttgtgtag

SEQ ID NO: 210848 - DNA, 1869 bp, synthetic construct
  misc_feature 1..1869: note = Description of Artificial Sequence: Synthetic coding sequence
  source 1..1869: mol_type = other DNA
atgcggctgctgcggcggcggcacatgcccctgcggctggccatggtcggctgcgcatttgtcctgttcttgttcctgctacaccgggacgtgtcctcgcgggaggaagccaccgaaaaaccctggctcaaaagcttggtctcaagaaaggaccatgtcctagacctcatgttagaagcgatgaacaatctccgtgactctatgcctaaactgcagattagggctcccgaagctcagcaaacactatttagtatcaatcagtcgtgcctgcccggattttatacccccgccgagctgaaacctttctgggaaagaccccctcaggatcccaacgcccctggcgcggatgggaaggcctttcagaaatccaagtggaccccgctcgagacacaggaaaaggaggagggttataagaagcactgctttaacgcattcgcatcggatcgcattagcttacagaggtcacttggacccgatacacgacctcctgaatgtgtggaccagaaatttcgacgatgtccgcctctcgcaacaacaagcgtgattatcgtgtttcacaacgaggcctggagtacgctcctaaggaccgtgtacagcgttctgcatactacccctgctatcttgctcaaagaaataatcctcgttgatgatgcgtctaccgaggaacatttgaaagagaaattggaacagtacgtcaaacaactgcaggtggtgcgggttgtgcggcaagaggaaaggaaaggccttatcaccgctcgtctgctgggagcctctgtcgcccaagcagaagtcctcacgtttttggatgcgcactgtgaatgtttccatggttggctggaaccactccttgcccgcattgccgaggataagacagtggtggtgtctcctgatatcgtgacaatcgacctaaatacatttgaattcgcgaagcctgtccaaagggggagggttcactcaagaggcaattttgactggtctttgaccttcggctgggaaaccctacccccacacgagaagcagagaaggaaggacgaaacatatccaatcaagtcgccaaccttcgctggcggactgtttagcatttctaagtcatatttcgagcatattggaacatacgacaatcaaatggagatttggggcggagagaacgtagaaatgtcatttcgagtttggcagtgtggaggccagctcgaaatcatcccttgcagtgtggttgggcatgtgttccgcaccaaatccccccatactttccccaagggtacctccgttattgctcgcaaccaggtccgacttgccgaagtctggatggactcatataagaaaatcttctatcgccggaacctccaggctgctaagatggctcaggaaaagtcgttcggcgacatatctgagcggctccagctcagggagcagttgcactgtcacaacttttcttggtatctgcacaacgtgtaccctgagatgttcgtgcctgatctgactcctacattttatggcgccattaagaacctggggacaaatcagtgcctagacgtgggagagaacaacagaggggggaaacccctgatcatgtattcttgtcatgggctcggagggaaccagtacttcgaatacaccacgcaaagagacctgcggcacaatatagcgaagcaactgtgcttgcatgtttcgaaaggcgcacttggcttgggctcctgccacttcactggaaaaaattcacaggtacccaaggacgaagagtgggagctggcgcaggaccagctcattcgtaacagtggctccggtacctgtttgacaagccaggataagaaacccgctatggctccttgcaaccccagtgacccccaccagctgtggttgttcgtgtag

SEQ ID NO: 210849 - DNA, 1812 bp, synthetic construct
  misc_feature 1..1812: note = Description of Artificial Sequence: Synthetic coding sequence
  source 1..1812: mol_type = other DNA
atgcggctgctgcggcggcggcacatgcccctgcggctggccatggttggctgtgcttttgtactctttctgtttctgctcgtaagtagaaaggatcacgtattggatctcatgcttgaggcaatgaataatctgcgtgactcaatgcctaaattacagatccgagcgcctgaggcccagcagacactgtttagtattaatcaatcctgcctgccagggttctatacccctgccgagcttaagccattctgggaaaggccacctcaggaccctaatgctccaggcgccgatggcaaggctttccagaagtcaaagtggacaccactggagacacaggaaaaggaggaaggctacaaaaaacattgcttcaacgcctttgcttctgacaggatttcattgcagagaagtctcggccccgatacgaggcctcccgagtgtgtcgaccagaagtttaggcggtgcccaccactagccactactagcgtgatcatcgtgttccataatgaagcctggtcaaccctgttacgaactgtttactctgtgctgcatacgactccagccatactgttgaaggagatcatcctggtggacgatgcttcaaccgaggagcatttgaaagagaagttggagcagtacgtgaagcagttacaggtcgtacgggtggttcgacaagaagagagaaaggggttgatcaccgcccggctgctgggggccagtgtagcgcaggcagaggtacttacttttttagatgcacactgcgaatgcttccacggatggttggagccactactcgccagaatcgctgaggacaagaccgtggtcgtgtctccagacattgtgacaatcgacctaaataccttcgagttcgccaaacccgtgcagcgagggcgggtgcactctcggggaaacttcgattggagcctcacttttggctgggaaacactccctccgcacgaaaagcagaggaggaaagacgagacataccctatcaaaagccccacttttgccggtggcctcttctcaatttcaaaaagctatttcgagcacattgggacgtacgataatcagatggaaatttggggaggtgagaacgtagaaatgtccttcagagtctggcagtgtggcggtcaactggaaatcatcccttgcagtgtagtggggcacgtgttcagaacgaaaagtccacacacatttcctaaggggacgtctgtgatagctcgcaaccaagttcgcctggctgaagtctggatggactcatataagaagatcttctacagacggaatcttcaggcagccaaaatggcacaggaaaagagctttggagacatcagcgaacgcctgcagctacgagagcagttgcactgtcataatttctcctggtacctgcacaatgtatatcccgaaatgtttgtccccgacctgactccaaccttctacggcgccattaagaatttggggacaaatcagtgtttggacgttggcgaaaataacaggggagggaagcctctgatcatgtactcctgtcacggactgggcggaaaccagtactttgaatataccactcagcgcgatttgagacacaatatcgctaaacagctgtgtctccacgtctctaaaggagccctggggcttggatcatgccactttaccggcaagaactcccaagttcccaaagacgaggagtgggagctggctcaggatcagctcatccgaaactctggaagcggaacatgcctcacttcacaggataaaaagccagccatggccccctgcaacccaagcgacccccatcagctgtggctcttcgtgtag

SEQ ID NO: 210850 - DNA, 1974 bp, synthetic construct
  misc_feature 1..1974: note = Description of Artificial Sequence: Synthetic coding sequence
  source 1..1974: mol_type = other DNA
atgcggctgaagatcggcttcatcctgcggagcctgctggtggtgggctcttttctcggactggtggtgctgtggtcatcgctgacaccgcggcctgatgatcctagtcccctgagtcgtatgagagaagatagggatgtgaacgaccctatgcctaaccggggtggtaacgggctggcccctggcgaagacagatttaaacccgtagtgccgtggcctcacgtggaaggggttgaagtggatcttgagtcaattaggcggatcaataaggcgaaaaatgaacaggagcaccacgcaggaggtgattcccaaaaggatatcatgcagagacaatatctcaccttcaagccccagacattcacctaccatgaccccgtgttacgacctggtatattaggtaatttcgagcctaaagagccagaacctccaggggtagtcgggggccctggtgaaaaggctaagcctctcgtcctggggcccgaatttaagcaggctatacaggcctccatcaaagagttcggcttcaacatggttgcttctgatatgatatccctggataggtccgtcaacgatctaagacaagaggagtgcaaatactggcattacgatgaaaaccttcttactagctccgtcgttattgtgtttcataatgaaggctggtctacgctgatgcgcacagtccatagtgtgatcaaacgcacaccccgtaagtacctggcagagatcgtgctaatagatgactttagcaataaagaacaccttaaggaaaagctggatgaatacatcaaactgtggaatggcttggtgaaggttttcagaaacgaaagacgcgaaggattaatccaagctaggtccatcggggctcagaaggccaaactgggtcaagtcttgatttatttagatgcgcactgcgaggtagcggtgaactggtacgctccactggtcgctccaatcagcaaggacaggacaatctgcacagtgcctcttattgatgtaattaatgggaatacttacgagatcatcccccagggcgggggagacgaagacgggtacgcccggggtgcctgggattggtccatgctgtggaagcgggtccccctgaccccccaggaaaaacgactaagaaaaactaagaccgagccatacaggtctcccgcgatggcaggcggcttgttcgcaattgaaagagagttcttctttgaattggggctgtatgatccaggccttcagatttggggaggtgaaaactttgagatcagctataagatatggcaatgcgggggaaagttgctatttgtgccctgcagcagagtaggccacatttaccgcttggagggttggcaggggaatcccccgcctatctatgtcggttccagtcccactttaaagaactatgtcagagtggtggaagtctggtgggacgagtacaaggattatttctacgcgagccggcccgaatcacaggctttgccttacggggacataagcgagctgaagaagtttcgggaagaccataactgtaaaagcttcaagtggttcatggaggagattgcatatgacataaccagtcactaccccctgccccccaaaaatgtggattggggtgaaatacgtggtttcgaaactgcctactgcatcgattccatgggcaagaccaacgggggatttgtcgagcttggtccttgtcatcgtatgggagggaatcagctatttcgaataaacgaggccaaccaactaatgcagtatgaccaatgcttgaccaagggggcggacggctccaaagtcatgatcacacactgtaatctgaatgagttcaaagaatggcagtacttcaaaaacttgcacagattcacccacattccatctggcaaatgtctggatcgcagcgaagtccttcatcaggtgtttatcagtaattgtgactctagcaagactacccagaagtgggaaatgaataacatccactccgtttag

SEQ ID NO: 210851 - DNA, 717 bp, synthetic construct
  misc_feature 1..717: note = Description of Artificial Sequence: Synthetic coding sequence
  source 1..717: mol_type = other DNA
atgcggaccgtgcacagcgtgatcaagcggaccccccggaagtacctggctgaaatcgtcctgatcgacgacttttccaataaggagcacctcaaggagaaactggacgaatatatcaagctctggaacggtctggtgaaggtctttcggaacgagcggcgggagggcttgatacaggcacggtccattggcgcgcagaaggccaaactgggccaggtgctgatctatctcgacgctcattgtgaggtggcagttaattggtatgcaccactggtggcacccatctcaaaggataggacaacctgcacggtcccactgattgattacattgacgggaacgattacagtatagaaccacagcaggggggtgacgaagacggtttcgcacgcggcgcatgggattggagccttctatggaagcggattcccctctcccataaggagaaggctaagagaaaacacaagactgagccgtatcggtcccccgcaatggccggaggcctcttcgcaattgagcgtgaatttttttttgagctgggcctgtatgatcctggcctccaaatatgggggggaaaaaccctgagaagccacacgcgttatggtagcgtggtggcaaactattacctcttcttggtccttgttctggatatcagtacggtgcttcgggcagggaaggagatacttaggccgttcatgctgggcctgctgcaactgtag

SEQ ID NO: 210852 - DNA, 1914 bp, synthetic construct
  misc_feature 1..1914: note = Description of Artificial Sequence: Synthetic coding sequence
  source 1..1914: mol_type = other DNA
atgatgttctggcggaagctgcccaaggccctgttcatcggcctgacactggccatagcagtgaacttacttttggttttctcctccaaagggactctccagaacttatttaccggaggtctacatcgggaattaccccttcaccttaataagcgatacggggccgtcattaaaaggttatcacatctagaggttgagctccaagacctgaaggagagtatgaaactcgcccttagacagcaggaaaatgtaaactctacgttgaaaagggccaaagatgaagttcgcccccttttaaaagcaatggaaaccaaggtgaacgagaccaagaagcacaaaactcaaatgaagctgtttcctcactcacaactgttccgtcaatggggagaagatctctccgaggctcagcagaaggcggcacaagacctgtttcgcaaattcggctacaacgcttacctgtctaatcagctgcctctcaatcgcaccatccccgatactcgggactacagatgtctcaggaagacatacccctctcagctgccgagccttagcgttatccttatctttgtgaatgaagcgctatcgattattcaacgagccattacctcgataataaaccgtaccccttcccggttactcaaggaaattatccttgtggacgatttttcttccaacggggaactcaaagtccatctagatgaaaagattaagctgtacaaccaaaaataccccggtttactcaagatcattcgccatcctgagcgaaaggggctggctcaagcgagaaacactggttgggaggctgcgacagccgatgtggtcgctattctcgacgcgcatattgaagttaatgttggctgggcagaacccatcctggcacggattcaggaagaccgcaccgtcattgtgtctcccgtttttgataatattaggtttgacactttcaagctagataagtacgagctggcggttgatgggtttaattgggaactttggtgtaggtacgatgccctgcctcaggcttggattgatcttcacgacgtgacagcacccgtcaagtctcctagcataatgggaatccttgctgctaatagacatttccttggagagattggctcattggacggtgggatgttaatctacgggggggagaacgtagagttaagcctgcgggtgtggcaatgcggggggaaagtggaaatcctcccgtgctcacgtatagcccacctggaacgacaccataagccgtacgccttggacctcacggcggcactgaaaagaaacgctcttagggtggctgaaatctggatggatgaacacaagcacatggtgtatcttgcctggaacatacccctgcaaaattcaggtatcgatttcggtgacgtttcttcacgaatggcactccgcgagaaactcaagtgcaagacattcgactggtacttaaaaaatgtctacccattgttgaagccacttcacaccattgtgggctatggccgaatgaagaatttattggacgaaaacgtctgtttggatcagggacctgtgccagggaacacccctatcatgtactactgtcatgagttttcatctcagaatgtctattatcatctaaccggcgagctctacgttggtcagctgattgcggaggcaagtgctagcgatcgatgtctcaccgaccccggcaaggccgagaagccgaccctggagccatgctctaaagccgctaaaaaccgactccacatctattgggacttcaagcctggcggggcggtgataaaccgggacaccaaacggtgcctcgagatgaaaaaggaccttctgggtagccacgtcctcgttcttcagacctgcagcactcaggtatgggagattcaacatacagtacgggattggggtcaaactaactcccagtag

SEQ ID NO: 210853 - DNA, 648 bp, synthetic construct
  misc_feature 1..648: note = Description of Artificial Sequence: Synthetic coding sequence
  source 1..648: mol_type = other DNA
atggagttcgactgcgagggcctgcggcggctgctgggcaagtacaagttccgcgatctcaccgtcgaagaacttcgaaacgtgaacgtctttttccctcattttaaatactcgatggatacttacgtgtttaaagatagctctcagaaggacttgctgaatttcaccggcactatccccgtgatgtaccaaggaaacacttataatatcccgatcaggttctggatacttgactcacatccttttgctccaccgatttgcttcctaaagccaactgcaaacatgggcatcctggtggggaagcacgtcgacgcacaaggacgcatctatctgccctatttacagaattggtctcaccccaaaagcgtgatagtaggcctcatcaaagagatgatagcgaaatttcaagaagagctaccaatgtacagtttgagcagttccgatgaggccaggcaggtcgacctgctggcttacatcgccaaaataacagagggggttagcgataccaatagcaaaagctgggccaatcacgagaataagactgtgaataagattaccgtggtgggtggcggggaactcgggatcgcctgtacgctggctatcagcgccaaagtggagtccagaagcgttacacaggcgggggtctag

SEQ ID NO: 210854 - DNA, 1416 bp, synthetic construct
  misc_feature 1..1416: note = Description of Artificial Sequence: Synthetic coding sequence
  source 1..1416: mol_type = other DNA
atggagttcgactgcgagggcctgcggcggctgctgggcaagtacaaattcagggatctgacagtggaggaactgaggaacgttaatgtatttttccctcatttcaagtactcaatggacacttacgtctttaaagactcctcacagaaggatctgctcaattttaccgggacgatcccagtcatgtatcagggcaacacctacaatattcctattcgcttttggatacttgattctcacccgtttgctccacccatctgcttcctgaaaccaactgccaatatggggatcctggtcggcaaacacgtcgacgcccagggccgcatttatcttccctacctgcagaactggagtcaccccaaaagcgtcattgtggggcttataaaggaaatgatagccaagttccaggaggagttgccaatgtactccctgagcagcagtgatgaggctcgccaggtggatctgctggcatacatcgccaaaatcacagaaggagtgtctgacactaactccaagtcgtgggcaaatcatgaaaataagaccgtcaacaagatcacagtggtgggcggaggagaacttgggatagcttgcaccctggctattagcgctaagggaatcgctgatagactggtgctcctagacctgtccgaaggcaccaagggggccactatggatttagagatcttcaacctacccaacgtcgagattagcaaagaccttagcgcttccgcacactctaaggttgtgatcttcaccgtaaatagcctgggtagcagccaaagctatctggacgtcgtgcagagcaacgtggacatgttcagagcattagtcccagccctaggccactatagtcaacattctgtactgttggtggcctctcagcccgtagagataatgacatacgtgacctggaaactgtctacgtttccagctaatagagtgattggcatagggtgcaatcttgatagtcagagactgcagtatattatcaccaacgtgttaaaggcccagacctcaggcaaagaggtgtgggtgatcggcgagcaaggcgaagataaggtgcttacgtggagcggccaggaggaggtggtaagtcacaccagccaagtgcagctgtcaaacagggccatggagctgttgagagtgaaggggcagaggtcatggagcgtgggcctgtccgtggccgatatggtcgattctatcgtgaataataaaaagaaggtgcactccgtctcagcactcgcaaaaggctattacgatatcaatagtgaagtcttcctgagcctgccttgcatcctgggaaccaacggagtctctgaggttattaagactacccttaaggaggatactgtcactgaaaagctgcagagctcagcatctagtattcactctttacagcagcagctcaagctgtag

SEQ ID NO: 210855 - DNA, 747 bp, synthetic construct
  misc_feature 1..747: note = Description of Artificial Sequence: Synthetic coding sequence
  source 1..747: mol_type = other DNA
atggacctggagatcttcaacctgcccaacgtggagatcagcaaggacctgagtgcaagcgcacattcaaaagtggtaatattcaccgtgaattccttggggtcttcccagtcttatctggacgtggttcagagcaatgtggatatgtttagggctctggtccctgcgctgggccactattcccaacacagcgtcctactagtggccagtcaacccgtggagatcatgacgtatgtcacttggaaattgtcaacatttccagccaatcgcgtcattggtatcggctgcaacctcgattctcagcggctgcagtacataatcaccaatgtccttaaggctcagacctctggtaaggaggtgtgggttatcggcgagcagggcgaagataaagtcctgacatggagtggtcaggaagaggttgtgagtcacaccagccaagtccaactgtccaatcgggctatggaacttttaagggtgaagggacagcggtcttggtccgtgggcctttccgtcgctgacatggtcgactcaatcgtcaataataagaagaaggttcactctgttagcgcgctggccaaaggatattatgacatcaactcggaggtcttcctgtccctgccatgcattttaggaaccaatggggtaagcgaagtgattaaaacaacgctgaaggaggatacagtgaccgagaagctccagtcgtccgctagttccatccactccttgcagcaacagcttaaattatag

SEQ ID NO: 210856 - DNA, 1140 bp, synthetic construct
  misc_feature 1..1140: note = Description of Artificial Sequence: Synthetic coding sequence
  source 1..1140: mol_type = other DNA
atggagttcgactgcgagggcctgcggcggctgctgggcaagtacaaattcagggacctaaccgtagaagaactgcgaaatgtaaatgtgttcttcccgcattttaaatatagcatggatacatatgtgtttaaggactcaagccagaaggatctgcttaactttacgggaacgattccagtgatgtaccagggaaatacgtataacatacccatccggttttggatcctggacagccaccccttcgcccctcccatctgttttctgaagcccacggcaaacatgggcatcttggtgggcaagcacgtcgatgcacagggaagaatctacctgccatatctgcagaactggtcacaccccaaaagtgtgatcgtggggcttatcaaggagatgattgccaagttccaggaggaactacccatgtactccttgtcatccagcgacgaggcccgacaggtcgatctcctggcatacatcgctaagataacagaaggtgtatctgacacaaattctaagagttgggcaaaccacgagaacaagaccgttaataagattaccgtagtgggagggggcgagctagggatagcctgtaccctcgccatctccgctaagggaatcgctgatcgcctagttctcctagacttgagtgaagggactaagggagccactatggacctggaaatcttcaatctcccgaatgtggaaatctctaaagatctgagcgccagtgctcactcgaaagtcgtgatttttactgtgaatagtctgggctccagccagtcctacttggatgtcgtccaaagcaatgtggacatgtttcgcgccttggtcccagcactcggccactatagtcagcactctgtgttacttgtggcatcccagcccgtggagattatgacctacgttacatggaaactctccacttttccagctaacagggtcatcgggatcggctgcaatctcgactcacaaaggttacagtatattatcacgaacgtgctgaaagcccagacctcaggcaaagaggtttgggtgataggagaacagggtgaggacaaagtgctgacctggagtgggcaggaggaagtggtgtcacacactagccaagtgcagctgagcaatcgcgacataatgatctag

SEQ ID NO: 210857 - DNA, 1350 bp, synthetic construct
  misc_feature 1..1350: note = Description of Artificial Sequence: Synthetic coding sequence
  source 1..1350: mol_type = other DNA
atggagttcgactgcgagggcctgcggcggctgctgggcaagtacaaattccgggacctgacagttgaagagcttcgcaatgtcaacgtcttcttccctcactttaagtatagcatggatacgtacggcaacacatataatattcctataaggttctggattttggattcgcacccttttgccccgcccatctgctttctgaaacccacagcgaatatgggcatcttggtcggcaaacacgtggatgctcagggaaggatatacctgccatatttacagaattggtcccatcctaaaagtgttattgtcggtcttatcaaggaaatgatcgcgaagtttcaggaagaactaccgatgtacagcctgtcctcaagcgatgaagcccgccaggtggacttacttgcctatattgctaagatcacagagggggtatctgacacaaattccaagtcatgggctaaccatgagaataagacggttaacaagataaccgtagttggaggcggtgaactcggaatcgcctgcacccttgcaatctccgcaaaggggatcgccgacaggctggtgctccttgatctatccgagggcaccaaaggagcaaccatggatttagagatctttaacctcccgaatgttgaaatcagcaaagatctgtccgcttccgcccacagcaaagtagtcatttttaccgtgaactcactgggctcaagccagtcctatttggacgtcgtgcagtccaatgtggacatgttccgcgcgctcgtccccgccctgggtcattattcacagcactcagtcctgcttgtggcctcacaacctgtggaaattatgacctacgttacatggaagttatcgacgttcccagctaatcgcgtgattggaattggctgtaacttggactcacagagattgcagtatattatcacaaacgtgcttaaggctcagacatcggggaaagaagtatgggtcataggggagcagggagaggataaggtgttgacgtggtccgggcaggaagaggtggtatcccatacatctcaagtacagttatctaatagggccatggaactcctgagagtgaagggccagagatcatggagcgtaggcctttctgtcgctgacatggtagattctatcgtaaacaataaaaaaaaagtccactctgtctccgctctcgccaagggctactatgacataaatagcgaagttttcctgtccctcccttgcattctgggtaccaacggggtcagcgaggtcatcaagacaaccctgaaggaagacacggttacagagaagctacaaagcagtgcttcctcaattcattcactacaacaacaactcaagctgtag

SEQ ID NO: 210858 - DNA, 429 bp, synthetic construct
  misc_feature 1..429: note = Description of Artificial Sequence: Synthetic coding sequence
  source 1..429: mol_type = other DNA
atgggcgacaagccccccggcttccggggcagccgggactggatcggctgcgtggaagcttcactctgcctcgctcactttggcggcccccagggtcggctttgccatgtacctcggggagtgggactgcatggtgagctggagcgactgtactctcacttcgccggcggcgggggaccggttatggtggggggcgacgccgacgcccgaagtaaggctctcctgggggtgtgtgtgggctcagggacagaggcctacgtgttagttctcgatccccactactggggaacccctaagtccccgtctgagctccaggcagctgggtgggtagggtggcaggaggtgtccgccgctttcgacccaaattccttctataatctgtgcttgacctcgctgagcagccagcagcagcagcggaccttagactag

SEQ ID NO: 210859 - DNA, 1410 bp, synthetic construct
  misc_feature 1..1410: note = Description of Artificial Sequence: Synthetic coding sequence
  source 1..1410: mol_type = other DNA
atggtgatcagcgagagcatggacatcctgttccggatccggggcggactagacctcgctttccaactggccaccccaaatgaaattttcctgaaaaaggccctgaaacacgttctctctgacttgtccactaagctcagttccaatgctttggttttcaggatttgccactccagcgtgtacatttggccctctagcgacatcaatacaatccctggtgagctgaccgacgcatccgcttgtaaaaacattttgcggtttatccagtttgagccggaggaggacattaagaggaagttcatgcggaagaaagataagaagttgagcgatatgcaccagatagtcaacattgacctgatgctagagatgtctacgagtctagcagccgtcacccccatcatagaacgcgagagcgggggtcaccattacgtgaacatgacattgcccgtggatgccgtgatctccgtcgctcccgaggaaacctggggcaaagtacgtaaacttctcgtggacgccatccataatcagctcacggatatggaaaaatgcatcctgaaatatatgaagggtacatctatcgtggttcctgaacctttgcatttcctgcttccgggcaaaaagaacctggtcacgatctcctaccccagcgggattcctgatgggcaactacaggcgtacagaaaagaactgcacgatttgttcaaccttccacacgataggccctactttaagagatctaacgcatatcacttcccagatgagccgtacaaagacggatacattaggaatccgcatacctaccttaatccgcctaatatggagaccggcatgatttacgtggtgcaggggatctacggatatcatcactatatgcaagacaggattgacgacaacggttggggctgcgcctatcggagccttcagaccatttgttcctggttcaaacaccagggctatactgagaggagcattcccacacaccgggaaattcagcaggctcttgttgacgctggagacaagccagcaaccttcgtcgggagcaggcagtggattggctcgatcgaggtgcagctggtccttaatcagctaatcggtatcactagcaagatcctctttgtatcccaggggtcagaaattgcttcacagggccgtgaactggcgaaccatttccagtcagaaggcactccagttatgatagggggaggcgtcttagcccacacaatcctgggagttgcttggaacgagatcacaggacagatcaagttcctgatattagatccgcactacactggcgcggaggacctacaggtgattttagagaagggatggtgcggatggaaggggcctgacttttggaacaaggatgcctactacaacctgtgtctgcctcagaggcccaacatgatctag

SEQ ID NO: 210860 - DNA, 2484 bp, synthetic construct
  misc_feature 1..2484: note = Description of Artificial Sequence: Synthetic coding sequence
  source 1..2484: mol_type = other DNA
atggtggtgcagaagccccacggcaccatggagtacaccgccggcaaccaggacacattgaattccattgccctgaaattcaatatcacccctaacaaactggtggagctcaataaactgtttacccataccattgtcccgggccaggtgctgttcgtgcctgacgccaatagtcctagtagcacgctgaggctgagttccagctcacctggagccaccgtttcccccagcagctctgacgccgaatacgataagctccctgacgcagacctggcccggaaggccctgaagcctattgaacgtgtcctgagtagtacatcagaggaagacgagccgggggtggttaagttcttaaagatgaactgccggtacttcaccgacgggaagggggtggttggaggcgttatgattgtgactcctaataacatcatgttcgatccacacaagagcgatccactcgtcattgagaacgggtgcgaggaatacggcctgatttgccccatggaggaagtggtgtcaatcgccctatacaacgacatctctcatatgaagattaaggacgctctgccttcccccggggaatgggaagacctggccagcgagaaggatataaatcccttttccaagtttaagagtattaataaagagaagaggcagcagaacggagaaaagattatgacgagcgacagccgccccatagtgcccctggaaaagtccacaggccacacaccaacaaaaccctcaggtagctccgttagcgagaagttgaagaaattggacagctcacgggagacgagtcacggatcacctacagtgactaaactgagcaaggaaccttcggataccagtagcgcctttgaatcaaccgcaaaggagaacttcctcggggaagacgacgactttgtcgacctggaagaactgtcctctcaaacaggaggtggaatgcacaagaaggacactctgaaggagtgcctgtcactcgatccggaggagcggaaaaaagccgagagtcagattaacaacagtgccgtggagatgcaggtgcagtccgcccttgccttcctggggaccgaaaacgatgtggaactaaaaggggccctagaccttgagacttgcgagaagcaggacatcatgcccgaagtggacaaacagtccggtagccccgagagccgcgtagaaaacacattgaacatccacgaggatctcgataaagtgaaactcatcgagtattacctaaccaagaacaaggaaggccctcaggtcagcgagaacctgcagaaaaccgaactgtccgacggtaagtctatcgaacctggcggtatcgacattactttatcgagcagcctttcccaggccggcgatcccatcacagaaggcaacaaggaacctgacaagacctgggtgaaaaagggcgaacctctacccgtgaaactgaatagttcaaccgaggctaacgtgataaaggaagccctcgactcgtctcttgaaagtaccttggataattcttgtcaaggcgcccagatggacaacaaaagcgaagtgcagctctggctgcttaagcgaattcaggtgcccatcgaggatatcttgccctctaaggaggagaagtctaagacccccccaatgtttctatgcatcaaggtgggaaagcccatgaggaagtcctttgcaacccacaccgccgctatggtccaacaatatggtaagcgaagaaagcagccagaatattggtttgctgtaccccgggaacgcgtcgaccacttgtacaccttctttgtccagtggtcaccagatgtatatggaaaggatgccaaggagcaaggcttcgtggtcgtagagaaagaggagttgaatatgatcgataacttcttctctgaacctaccaccaagtcctgggagatcatcaccgtggaggaggctaagcgccggaagagtacctgttcttactacgaggatgaggacgaggaggtactgccagtactgaggccacattcggccttgttggagaacatgcatattgagcagctcgcgcggagactgccagcaagggttcagggatacccctggcggctcgcttattctactctcgagcatgggactagcctgaaaactctctacaggaaatccgcctctctggacagcccagttctattagtaattaaagacatggataaccagattttcggtgcttacgccacacatcctttcaagttcagcgaccattattatggaacaggcgaaacatttctttacaccttctccccacatttcaaggtgtttaaatggagcggagaaaactcttatttcattaatggagacattagtagcctggagctcggtgggggtggaggaagatttggtctctggctggatgccgacctgtatcatgggaggagcaattcctgttcaacattcaataacgatattctcagtaaaaaggaagatttcatcgtccaagatctggaggtgtgggcattcgattag

SEQ ID NO: 210861 - DNA, 735 bp, synthetic construct
  misc_feature 1..735: note = Description of Artificial Sequence: Synthetic coding sequence
  source 1..735: mol_type = other DNA
atggccgccgccgccagccccgccttcctgctgtgcctgcccctgctgcacctcctgtcgggatggtcacgagcagggtgggtggatactcattgtctctgctatgacttcatcatcacacctaagagcaggccagagccacaatggtgtgaagtccaggggctcgtggatgaaaggccattccttcattacgactgcgttaaccacaaagctaaggcgttcgcatcccttggtaagaaggtgaatgtaacgaaaacctgggaggagcagacagaaacactgagggacgttgtcgattttctcaagggtcagttgttagacattcaggttgagaacctcattcccatcgaacccctgaccctgcaggctcggatgagttgcgagcacgaggcgcacggccatggccgcggcagctggcaattcctgtttaacgggcagaaatttcttctgtttgactcaaacaacagaaagtggaccgccctgcacccgggggctaagaaaatgactgagaagtgggagaagaaccgcgatgtgacaatgttcttccaaaaaatctccctcggagactgcaagatgtggttagaagagttcctaatgtactgggaacagatgctcgaccccaccaaaccaccttccctggctcctgggaccacccagccaaaggcgatggccaccactctttccccctggtctctcttgatcatatttctctgcttcattcttgctggcagatag

SEQ ID NO: 210862 - DNA, 741 bp, synthetic construct
  misc_feature 1..741: note = Description of Artificial Sequence: Synthetic coding sequence
  source 1..741: mol_type = other DNA
atggccgccgccgccgccaccaagatcctgctgtgcctgcccctgctgctgctacttagtgggtggagccgagccggacgcgccgacccacattccctctgctatgatatcacagtcatccctaagtttaggcctggcccccgctggtgcgcggtgcagggccaggtggacgaaaagacctttctgcattatgactgtggcaataaaacggtaacaccagtgagccccctaggcaaaaaactgaatgtgacgaccgcttggaaggcccaaaaccccgtcctgcgcgaggtcgtggatatcctgaccgaacagttgagagatattcaactcgagaactatacaccaaaggagccgctgacgctacaggcaagaatgagctgtgaacagaaggctgagggccactccagtggctcatggcagttcagcttcgacggacaaatttttttgctgtttgactccgaaaagcgcatgtggacaacagtgcaccccggagcccggaaaatgaaagaaaagtgggaaaacgacaaggttgttgcgatgtccttccactacttctctatgggggactgtatcggatggctcgaagacttccttatgggaatggactcaaccctagagccttcagctggcgccccactagccatgtcctctggaaccacacaattgcgtgctacagccaccacacttattttgtgctgtctcctaattatcctgccgtgttttatccttcccgggatctag

SEQ ID NO: 210863 - DNA, 510 bp, synthetic construct
  misc_feature 1..510: note = Description of Artificial Sequence: Synthetic coding sequence
  source 1..510: mol_type = other DNA
atggccgccgccgccagccccgccatcctgccccggctggccatcctgccctacctcttatttgattggtccgggactggccgggccgacgctcatagcttgtggtataattttactattatccatctcccaaggcacggacagcagtggtgcgaagtgcagtctcaggttgaccagaagaatttcctctcatatgattgcgggtccgataaggttctctccatgggacacctcgaagagcagctctacgccaccgacgcttggggtaaacagttagagatgctcagagaagtcggacagcggttgcggttggagctggcggataccgagttagaggattttactccgtctggccctctgacactgcaagtaagaatgtcttgcgagtgcgaggctgacggttatatccggggctcttggcagttctcctttgatggaaggaagttcctgctgtttgacagcaataatagaaagtggactgtcgtgcatgctgggctggggacttcctag

SEQ ID NO: 210864 - DNA, 735 bp, synthetic construct
  misc_feature 1..735: note = Description of Artificial Sequence: Synthetic coding sequence
  source 1..735: mol_type = other DNA
atggccgccgccgccagccccgccatcctgccccggctggccatcctcccctatctcctgttcgactggtctgggacaggcagggctgacgctcatagcttatggtacaattttacaatcatccacttacctagacacggccaacagtggtgcgaagtccagagccaggtcgaccaaaaaaacttcttgtcttatgattgcggaagtgacaaggtgctctctatgggtcacttggaagagcaactttacgcaaccgacgcctgggggaaacagctggaaatgctccgtgaggtcggacagcgcctgaggttagagctcgccgacactgaattagaggatttcacccctagcggtccactgacactgcaagtcaggatgtcctgcgagtgcgaggccgacggctacattcgggggtcctggcagttttcatttgatggcagaaaatttctgctgtttgattccaataatcggaaatggacggttgtccacgccggcgctagaaggatgaaagagaagtgggagaaagatagcggattgacaacctttttcaagatggtttctatgcgggattgcaaatcatggctacgtgacttcctgatgcaccggaaaaagcgcttggaacccacagccccccctaccatggctcctggactggctcagcccaaggcaattgcaactactctgagtccctggtctttcctcatcattctgtgtttcattctgcccggcatctag

SEQ ID NO: 210865 - DNA, 393 bp, synthetic construct
  misc_feature 1..393: note = Description of Artificial Sequence: Synthetic coding sequence
  source 1..393: mol_type = other DNA
atggccgccgccgccagccccgccatcctgccccggctggccatcctcccatacctgctgttcgattggtctgggacgggcagagccgaagaacagttgtacgcaacggacgcgtggggcaaacagctcgaaatgctgcgtgaggtgggtcagcgcttacggctcgagctagccgacactgaactggaggactttacccccagcggaccattaacgttacaagtgcgaatgtcttgcgaatgcgaggctgatggttacattcgcgggtcttggcagttctccttcgacggaaggaagtttctgctgttcgacagcaacaaccggaaatggaccgtcgtccacgccggcgcacggcgcatgaaggaaaaatgggaaaagtcacatctcgagtag

SEQ ID NO: 210866 - DNA, 735 bp, synthetic construct
  misc_feature 1..735: note = Description of Artificial Sequence: Synthetic coding sequence
  source 1..735: mol_type = other DNA
atggccgccgccgccagccccgccatcctgccccggctggccatcctaccatatctgttgtttgattggtcaggcaccggccgcgcagatgcccattcgctgtggtacaacttcacgatcattcacttgccaagacacggccagcagtggtgcgaagtacagagtcaggttgatcagaagaacttcctgagttacgattgcggcagcgacaaagtcctctctatgggtcacctggaagagcagctatatgccacggacgcctgggggaaacagcttgagatgctcagggaagtaggccaacgcctcaggcttgaactcgctgacacagaactggaggatttcacgccctcaggacctctgactctgcaggttagaatgtcttgcgaatgcgaggctgacgggtatattcgaggctcgtggcaattcagttttgacgggcgtaagttcctattattcgactctaacaaccggaaatggactgtcgtccacgctggagctagacgcatgaaggaaaagtgggagaaggactcaggcttgacaaccttcttcaagatggtgagcatgagggactgcaagagctggctgagagactttcttatgcaccggaagaaacgactagagcccacagcccctccgacaatggcccccgggctcgcacagcccaaagcaatcgccactaccttatccccatggtctttcctcattatactgtgctttatcttgcctgggatttag

SEQ ID NO: 210867 - DNA, 663 bp, synthetic construct
  misc_feature 1..663: note = Description of Artificial Sequence: Synthetic coding sequence
  source 1..663: mol_type = other DNA
atgaaggtgaagaagggcggcggcggcgccggcaccgccaccgagtccgcgcccggaccatcaggacaatctgtggccccaattccacagcctcccgccgaatccgagtctggctccgaaagcgaaccagacgctgggccaggtccaagacctgggccgctccagcgcaaacaaccaattggcccagaagacgtattaggtctgcagcggattactggagactacctgtgcagtcccgaagagaatatctacaaaatagacttcgttcggtttaagatcagggacatggacagcgggaccgttctctttgaaattaagaaacccccggttagtgagcgactaccgatcaataggagagatttggatccgaatgcaggaagatttgtgcggtaccagttcacccctgcctttctgcgcctgaggcaggtgggcgctaccgtggaattcacagtcggcgacaaacctgtcaataacttcagaatgatcgagcggcattactttcggaaccagctgttgaaaagtttcgattttcattttggattctgcatcccatcatctaaaaatacttgcgagcatatctatgacttccctccgttgtcagaagagctgtctgcgagagccggctctagcggcagcggcgaagtgggcgcctccagggactag

SEQ ID NO: 210868 - DNA, 723 bp, synthetic construct
  misc_feature 1..723: note = Description of Artificial Sequence: Synthetic coding sequence
  source 1..723: mol_type = other DNA
atgaaggtgaagaagggcggcggcggcgccggcaccgccaccgagtccgctccggggccttcaggccagtctgtggccccgatcccgcagccaccagcagagtcagagtccggctctgagtcagagcctgatgctggccccgggcccagacctggcccacttcagcggaagcagcccatcggccctgaggacgtcctaggacttcagaggattacgggggactatttgtgttcaccggaagaaaacatttataaaatcgacttcgtgagattcaagatccgagacatggattctggcactgttctctttgaaattaagaaacctccagtcagcgagcgacttccaatcaataggcgagatctggatccaaatgccggccgcttcgtcagatatcagtttactcccgcgtttctcaggctcagacaagtgggggcaaccgtggagttcacggtgggcgataagcccgttaacaattttcgcatgattgagaggcactactttaggaaccagctgttgaaatcctttgactttcacttcggcttttgtataccgagcagtaaaaatacctgtgagcacatctatgacttcccgccgctgtccgaagagttaatctcggaaatgatccggcacccttatgaaacacaatccgatagcttttacttcgtggacgatcgcctcgtgatgcataacaaagcggactattcctactccggtaccccatag

SEQ ID NO: 210869 - DNA, 627 bp, synthetic construct
  misc_feature 1..627: note = Description of Artificial Sequence: Synthetic coding sequence
  source 1..627: mol_type = other DNA
atgaaggtgaagaagggcggcggcggcgccggcaccgccaccgagagcgcacctggacccagcggtcaatcggtggccccaattcctcagccgcctgcagaaagtgagtccggtagcgagtccgaacctgacgccggacctgggcctagaccaggccccttacagagaaaacagcctatcggccctgaagatgtgctgggactgcagcgcataaccggtggtgcccgccccctgttccctgcatggcgatttaagatccgtgatatggactccggaacggtgctgttcgagataaagaaacctccggtgtccgaacggcttcccataaatcgacgagatctggatcctaatgccggaagatttgtacggtaccagttcacgcctgcatttctgaggctcagacaggtcggcgccaccgtcgagtttaccgtgggtgataagccagtgaataactttcgcatgattgagcgccattatttccggaatcagctgctcaagagctttgacttccattttggcttctgtattccatcatccaagaacacctgcgagcatatctatgatttcccacccctgtccgaggaactgtcagcacgtgcaggatcaagcgggtcaggtgaggtgtag

SEQ ID NO: 210870 - DNA, 5112 bp, synthetic construct
  misc_feature 1..5112: note = Description of Artificial Sequence: Synthetic coding sequence
  source 1..5112: mol_type = other DNA
ctgagcctgctgtgcgtgagcctgaagaaggccaagttcgacggcgctcaggaaaagttcaacacgtatgtgactctgaaagtccagaacgtgaaatctaccaccatagccgttcggggctcccaaccttcttgggaacaggactttatgtttgaaattaacagattagatctcggcttgaccgtcgaagtttggaacaaggggctcatttgggatactatggtgggcacagtttggatccctctgaggactatccggcaaagcaacgaagagggaccaggggaatggctcactctggactctcaggtcatcatggctgacagcgagatctgtgggaccaaggatcccacattccatcggattctccttgatacgcgcttcgagctgcctctggatattccagaggaagaagccaggtactgggccaagaaactggagcagctgaatgctatgcgagaccaggacgagtactcgttccaggacgaacaagacaaacctctacccgtgccgagtaatcaatgttgcaattggaactatttcggatggggtgagcagcataatgacgatcccgacagtgccgtggacgatagggactcagattacagatccgagaccagcaatagcatcccacccccctattataccaccagccagcccaacgcgtccgtccaccagtatagcgttcggccccctcccctaggatcccgggagtcctactccgattctatgcacagctacgaggaattcagcgagccccaggccctgagccctactggcagttctagatatgcatcaagcggggagctgagtcagggctcttcccagctgagtgaggattttgatccagatgaacatagcctgcagggttccgacatggaagacgagcgggaccgggacagctatcacagctgccattcgtcagtttcttaccataaggactcgccgcgttgggatcaggatgaggaagaactggaggaggacctggaggacttcttggaggaagaggaactaccagaggacgaagaggaattggaggaggaggaagaagaagtgccagacgatttgggttcctatgcacagcgggaagatgttgccgtggcagagcctaaagacttcaaacggatatccttgccaccagctgcacccgggaaggaggataaggcgccagtggcccctacagaagctcccgatatggcaaaggtggcacccaaacccgcgacccctgataaggtgcctgctgccgagcagatccccgaggctgagcctccaaaggacgaagaaagtttcaggccacgcgaagatgaggagggacaggagggtcaggattctatgagcagagcgaaggctaattggttacgggcgttcaacaaggtgcgtatgcagctgcaggaggcccgcggcgagggggaaatgtctaaaagcctgtggttcaaggggggcccaggcggagggctcattattatcgactccatgccagacatcagaaagagaaagccgatcccactggtatcggatctggccatgagcttggtgcagagcaggaaagccggaatcacttcagcactcgcctcttcaacgttaaataatgaagagctgaaaaaccacgtatacaagaagacacttcaggcgctgatatatccgatcagctgcacaacccctcacaattttgaggtctggaccgccacaacacctacctactgctacgagtgcgaggggctcctttgggggatcgctagacagggcatgaggtgcactgaatgcggagtcaagtgtcacgagaaatgccaggacctgctgaatgcagactgcttacagagggccgccgaaaagtcaagcaaacatggagccgaagatcgtacacagaatataattatggtgttaaaggatcggatgaagattcgggaacgaaacaaaccggagatttttgaattgattcaagagatctttgccgttacgaaaacagcccatacgcagcagatgaaggccgttaagcagtcagtgctggatggtacctctaaatggtcagcgaaaatttcgatcacagtggtatgtgcccagggcctgcaggcaaaggacaagacaggaagcagcgatccctacgtgaccgtgcaagttggcaagactaaaaaacggacaaagaccatatatggcaacttgaaccctgtctgggaggagaactttcactttgagtgccacaattcaagcgaccggatcaaggtgagagtatgggacgaggatgatgacatcaaatcccgtgtgaagcaacggtttaagcgtgagagcgacgatttcctgggccaaactatcattgaggtgcgtaccttgtccggagagatggatgtgtggtacaacctggataaacggaccgacaagagtgctgtttctggcgccatccgccttcacattagcgtggaaatcaagggggaggagaaagtggccccatatcacgtgcagtatacttgtctgcatgagaacttgttccatttcgtgaccgacgtgcagaacaacggtgtggtgaaaatcccagatgccaagggagacgacgcgtggaaagtttactatgacgagaccgctcaggagatcgtggatgagttcgcgatgcggtacggggtagaatccatctatcaggctatgacacacttcgcgtgcttatcctccaaatatatgtgtccaggagtgcccgctgttatgtcaacacttctggccaatattaatgcctactatgcccacaccaccgcgtcaactaatgtgtccgcatccgaccgcttcgccgctagtaactttggtaaggaacgattcgtcaagctgctggatcagttgcataactctctccgaatcgacctgtccatgtacaggaataactttcccgcatcaagcccggagcgcctccaggatctgaagtctacagtggacttattaacatctatcacctttttccggatgaaagtgcaagagctgcagagcccacctagagcgtcccaagtagtaaaggactgtgtgaaagcttgcctgaattcaacctacgaatacatcttcaataattgtcatgaactatactcccgggaataccagaccgatccagctaaaaaaggggaggtcctgcccgaggagcagggaccgtccataaagaacctggacttctggtccaagctgataacccttattgtgtcaattattgaggaagataagaacagttatacaccatgtctgaatcagttcccacaggaacttaacgtcgggaaaatctctgcagaagtaatgtggaacttatttgcccaggatatgaagtatgcaatggaagagcatgacaagcatcgcttatgtaaatcggcagactatatgaacctccatttcaaagtgaagtggttgtacaacgagtatgtcaccgaactccctgccttcaaagatagggtccctgaataccctgcctggttcgaacccttcgtaatccagtggctggatgagaatgaggaggtgagccgggactttctccatggggccttagagcgcgataaaaaggacggtttccaacagacttcggagcatgcgctattctcctgtagtgtggtagacgtgttcagccagctcaatcaatcctttgagattattaagaaactagagtgcccggacccccagatcgtgggccattatatgcgacgattcgcgaaaaccatctcaaacgtgctccttcagtacgctgacattatttcaaaggattttgccagctattgctccaaggagaaagagaaggtcccgtgtattctgatgaataatacccagcagctcagggtacagttagagaaaatgttcgaagccatgggcggaaaagagttggatgcagaggcctcagatatcctgaaagagctccaggtcaagctgaataacgtattagacgaactgagtcgagtatttgccacctcgtttcagcctcacattgaagaatgcgtcaagcagatgggtgacattttgtctcaagtaaagggaacaggcaacgttccagcttccgcttgcagtagtgttgcacaggacgccgataacgttcttcagccgattatggatctgcttgactctaacctgacactctttgccaagatctgtgaaaaaacagtgcttaaacgtgttctcaaggaactgtggaagttggtaatgaatacgatggaaaaaactatagttctgcctcctctgacggatcagactctgcaaggcaacctgctcaggaagcatggcaaggggctggaaaaaggtagggtcaagctaccatctcactctgacggtactcaaatgattttcaatgcggctaaagagctgggacagctatctaagctcaaggatcatatggtgcgagaagaggccaaatcactgaccccaaaacagtgtgctgtggttgaattggcattagacacgatcaagcagtatttccatgcggggggggtggggttgaaaaagacttttttagagaagagccctgacctccagtcccttcggtatgcgctctccctttacactcaggcgactgatctgcttataaagaccttcgttcagactcaatctgcacagggactcggtgtcgaggaccccgttggcgaagtgtcagtccatgtggagctgttcacacatccaggtaccggcgaacacaaggtgactgtaaaagtggtggcagctaatgatctcaagtggcagacgtccgggatctttcggccattcatcgaagtgaacatcatcggacctcaacttagcgacaaaaaacggaaatttgccacaaagtccaagaacaactcctgggcaccaaaatataacgaaagcttccagttcactctctcggccgatgctggccccgagtgctacgagctgcaggtgtgtgttaaggattactgctttgccagggaagaccgaacggtcggtctggcagttttacagctgagggagctggcccagaggggctccgctgcatgctggcttcccttggggaggcgcatccatatggatgataccgggctgactgtactgaggatactctcacaacgttccaatgatgaggtcgctaaagagttcgttaagctgaaaagcgatacccgttcggccgaggagggcggcgcagccccagctccatag

SEQ ID NO: 210871 - DNA, 5376 bp, synthetic construct
  misc_feature 1..5376: note = Description of Artificial Sequence: Synthetic coding sequence
  source 1..5376: mol_type = other DNA
atgggcggcggcggcacctgcaccatcagcgtgcaggtgcgggtgtgtaccgggggcaacctgcttggcggccgaagaagaccgctgagtccttgtaatgaagaagtgtggggcgaagccccactgcccggcgcacgaccgtttaacgctccgcccgcccggagtgcgcctgctccaagcggagtgcctgggctgagacttcctgccccccatcagcgtcacagtaggcccggtcgcctgcggccgacctgcgagttaggcgacatgtcacttttatgtgtgggtgtgaagaaggccaaattcgacggagcccaggagaaattcaacacgtatgtgacgctcaaggtgcagaatgtgaagagcacaaccattgcggtaagagggtctcagccatcctgggaacaggatttcatgttcgaaatcaataggctggacttagggctgactgtagaggtgtggaataaaggattgatttgggacaccatggtgggtactgtgtggatccccttacggacaattcgtcagtctaacgaagagggcccaggcgagtggctgaccttagatagccaggtcatcatggccgattccgaaatctgcggcactaaggatccaacatttcataggattctgctcgatactaggtttgaattacctctcgatatccctgaggaagaagcccgctactgggcgaagaagctcgagcagctgaatgccatgcgggatcaggacgagtactcctttcaagatgagcaggataagcctctgccggtgccctccaaccagtgttgcaattggaactatttcggatggggcgagcagcacaatgatgatcctgattctgccgtggatgatcgggatagcgattaccgctctgaaacatcaaactcaatccccccgccttattataccacatcccagccaaatgcttcagtgcaccaatattccgttcgccccccaccgctgggatccagggaatcttacagcgatagcatgcatagctatgaggaattttccgaacctcaggctctcagccccacgggatctagccgctatgcatcttctggggaactctcccagggatcgtcccagctaagcgaggacttcgaccccgatgaacactcattacaaggatctgacatggaggacgaacgggacagggatagttatcattcatgccacagttcagtcagctaccataaggactccccccgatgggaccaggatgaggaagaactggaggaggacttagaagatttcctcgaagaggaggagctgcccgaagacgaagaagaactggaggaagaagaggaagaagtcccagatgatttgggttcttatgcacagagagaggacgttgctgtcgccgagcctaaggacttcaagcgcatcagcctgccacctgcggcccccgggaaagaggacaaggccccggtggcaccaactgaagccccagacatggccaaagtagcacccaagcccgctacccctgataaagtgcctgccgcagaacaaatcccagaggccgaacccccaaaggatgaggagagctttaggccacgagaagacgaggagggacaggagggacaagacagcatgtcacgggcaaaagcaaactggcttagggcctttaataaagttaggatgcagctccaggaggctcgcggagagggggagatgtccaagtccttgtggttcaaggggggcccagggggtggtttaattataattgattctatgcctgatatccgaaagagaaaaccaatccctctcgttagcgatctcgcaatgagcctcgtacagtcgcggaaggcaggcatcaccagcgcactagcaagttccaccctgaataatgaggaactcaaaaatcatgtttacaagaagactctgcaggcactgatatatccaatatcttgcaccacccctcataattttgaggtctggacagcaacaactcctacatactgctatgagtgcgaggggctgctgtggggcatcgctaggcaaggaatgcggtgcacggaatgtggcgtgaagtgccatgaaaagtgccaagacctactaaatgcagattgcctccagagggctgccgaaaagtctagcaagcatggagctgaggatagaactcaaaacatcattatggtgctgaaggaccgcatgaagatcagagagaggaataagccggaaatattcgaacttattcaggagatctttgcagtgaccaagaccgctcacactcagcagatgaaagcggttaaacagtctgtcctggacggaaccagtaagtggtccgccaagatcagtattaccgtcgtgtgtgctcaggggctgcaggccaaagacaagaccggctcgagcgacccgtatgtcacagtgcaggtggggaaaacaaagaagagaaccaagaccatttacgggaacctcaatcctgtttgggaagagaacttccattttgaatgtcataattcctctgaccgcatcaaggtgagagtttgggatgaagacgatgacatcaagagcagggttaaacagcggtttaagcgggagagtgatgattttctcggacagacaattatagaggtccggacactaagcggagaaatggatgtctggtataacctcgacaagcggaccgataagtcagctgtatctggagcaatccgcctccacatttccgttgaaatcaagggcgaagagaaggtcgctccgtatcacgttcagtacacatgcctgcatgagaatttatttcatttcgtcacggacgtacagaacaacggcgtcgtgaaaattcccgatgcaaagggggacgatgcttggaaggtttattatgatgaaaccgcccaagagatcgttgatgaattcgctatgaggtatggagtcgaaagcatctatcaggctatgacccattttgcctgtctgtcttccaaatatatgtgtcccggagtccctgccgtaatgtctaccctgctggccaacataaacgcctattatgcacacaccacagcctcgacgaatgtcagtgcgtctgaccgattcgccgcatccaacttcggcaaggagaggtttgtgaagctgctcgatcagttgcacaatagcttgaggattgacctctcaatgtatcgaaacaacttccccgcctctagccccgagaggctgcaggacctgaaatccacggtggacttgcttacgagtatcacgttcttccggatgaaggtccaagagttacagagtcccccacgggccagccaggttgtgaaggattgcgtaaaggcctgcttgaatagtacctacgagtacatttttaataattgccacgaactctatagtcgggaataccagaccgatcccgccaagaagggggaagtgcttccagaggagcaaggtccgtctattaaaaatctagacttctggagcaaattgatcacactaatcgtgtccatcatagaagaggataagaacagctatacgccatgcctgaaccagttccctcaggaacttaatgtgggcaagatatcggccgaggtgatgtggaacctctttgcccaggatatgaaatacgctatggaggaacatgataaacacagactctgtaaatcagctgactacatgaacctgcatttcaaggtgaaatggctgtataacgagtacgtcaccgaactgcccgcattcaaagatagggtgccagaatacccagcttggtttgagccgttcgtcattcagtggcttgacgagaatgaggaggtctcgagggattttctgcatggggccctggagcgagataagaaagacggttttcagcagacctcagagcacgccttattttcctgttccgtcgtggatgtcttttctcaactgaatcagtcctttgaaattatcaagaagctggaatgccccgacccacagattgttggacattacatgagacgttttgcaaagaccatttctaacgtgctgctgcaatatgccgacatcatttccaaggactttgcctcctactgcagcaaggagaaggagaaggtaccttgcatcctcatgaacaacactcagcagctgagagtccagctggagaagatgtttgaggctatgggcgggaaggagctcgatgcagaagcatctgatattctgaaggaactccaggtaaaattgaacaacgtgctggacgagttgtctcgcgtgtttgcaacaagcttccagcctcacatagaggagtgcgtgaagcagatgggcgacatcttaagccaagtcaaggggaccggcaacgtcccggcatccgcttgcagttctgttgctcaggatgccgataatgtgctccagcctataatggatttgctggactctaacctgactctgttcgctaagatttgtgagaagactgtgctaaagcgcgtacttaaagagctatggaaactggtaatgaataccatggaaaagacaattgttcttccccctctgacagatcagactatgatcggcaacctgctgcgcaagcatggtaaaggtctggaaaagggccgagtaaaacttccatctcattccgacgggacccagatgatattcaatgcagctaaagagttggggcagctgtctaaactcaaggaccacatggttcgcgaagaagccaaatctctgactccaaaacaatgcgccgtggtggagctcgccttagatactataaaacagtacttccacgccggcggggtgggtcttaaaaagaccttcctggaaaaaagtccagacctgcagtccctgagatacgcgcttagcctctacactcaggcaaccgacctcctcattaagacctttgtacagacgcagagcgctcaggggttgggcgttgaagaccccgttggagaggtgagtgtgcacgtagagcttttcacacacccaggcacaggagagcacaaagttactgtcaaagtggtcgcagctaacgatcttaaatggcaaaccagcggtatttttagaccctttatcgaggttaacattatagggccccagctgtctgacaagaagcgaaagtttgcaactaagagcaaaaacaacagttgggcccctaagtataatgagtcttttcagttcaccttgagcgctgatgcgggccccgaatgctatgaactgcaggtgtgcgtgaaggactattgtttcgctcgcgaagatcgcacagtgggcttggccgtcttacaattacgggagctagcccaacgcgggtccgccgcgtgttggttgcccctcgggagaagaattcatatggacgatactggtctcaccgtgcttaggatcctgagtcaacggtcaaatgacgaggtcgccaaagagtttgtcaaactgaagtctgacaccagaagcgctgaggagggaggcgccgcccccgctccctag

SEQ ID NO: 210872 - DNA, 5112 bp, synthetic construct
  misc_feature 1..5112: note = Description of Artificial Sequence: Synthetic coding sequence
  source 1..5112: mol_type = other DNA
atgagcctgctgtgcgtgggcgtgaagaaggccaagttcgacggcgcacaggagaagttcaacacctacgtcacactcaaggttcagaacgttaaaagcacaacaattgcggtgcgagggtctcaaccaagctgggagcaggactttatgttcgagatcaatcgcctggacctgggactcaccgttgaggtttggaacaaagggcttatatgggacacaatggttgggactgtgtggattcccctgcgtaccatacgtcaaagcaatgaagaaggcccaggcgagtggttgaccctcgactcacaagtgataatggccgactccgaaatctgtggcaccaaagatcctacgtttcatcgaatcttactggatacccgtttcgaactcccacttgatattcccgaggaggaggcccgctactgggctaagaaactcgaacagctaaatgccatgagggaccaggatgagtactcatttcaggatgaacaggacaaaccactgcccgtgccatctaatcagtgctgcaactggaactactttggctggggtgagcagcataatgatgacccagactcagcggtagacgacagagactctgactatcgttcagagacaagcaactccattccgcccccttactacaccactagccagcccaatgcgtccgtacatcagtactccgttaggccaccgcccctcgggtcgcgggaatcctacagcgacagcatgcattcttacgaggagtttagcgagccccaagctctctctcctacaggcagtagccgctatgccagtagcggcgaactgtcccaaggaagttcacaactcagcgaagactttgacccggatgagcattccctccagggatcagatatggaggacgagcgagatagagacagctaccactcctgccactcctccgtgagttatcataaagactcccctcgttgggatcaggacgaagaggagctcgaagaagatttggaggatttcctcgaggaggaagagttacctgaagacgaagaggaactggaagaggaggaggaggaagtccccgacgatctgggttcctatgctcagagagaggacgtcgcagtggccgagccaaaggacttcaagcgcattagcctaccccccgccgcaccagggaaggaagacaaagcacccgtggcccctaccgaagctcccgacatggcaaaggttgctcctaagccagcgacacctgacaaagtccccgcggcagaacaaatccctgaggcagagcccccaaaggatgaggagtccttccggccccgggaggatgaggaagggcaggaaggccaagactccatgtctcgcgcgaaggccaattggctgagggcgttcaacaaggtccggatgcaactgcaggaagcgcgcggagaaggcgagatgtctaagagcctgtggttcaagggcggtccaggcggcgggctgattataatcgactccatgcccgatattcgcaagaggaaacccattcccctagtcagcgacctggcaatgtctctggtccagtcccgaaaggccgggatcaccagcgcactcgcaagcagtaccctgaataacgaagagctgaaaaaccacgtatataagaaaaccctgcaggctctgatctatcctataagctgcactacaccgcataattttgaggtgtggactgcaaccactcccacgtactgctatgaatgcgaaggcctgctgtggggcatcgctagacagggcatgcggtgcacagagtgtggagttaaatgtcacgagaagtgtcaggacctcctgaatgcagattgcctgcaaagagctgcagagaagtcctccaagcatggcgctgaggatcggactcagaacattatcatggtgctcaaggacaggatgaaaatccgggagcggaataaacctgagatttttgaactgatccaggagatcttcgcagtcaccaagacagctcatacccagcagatgaaggccgttaagcagtcagtcttggacggcacttcaaaatggtccgccaagatatctatcaccgtcgtctgtgcccaaggcttgcaggctaaagacaaaacgggctcttccgacccttacgtaaccgttcaggtaggaaaaacaaagaaaagaactaagaccatctatggcaacctaaaccccgtatgggaggagaacttccatttcgagtgccataatagttcggatagaattaaagtgcgggtgtgggacgaggacgacgacattaagagccgagtgaaacagagattcaagcgcgagtctgacgactttctggggcagactatcattgaggtgcggactctgtctggagaaatggacgtgtggtataatctggataaaagaacagataagtctgccgtctccggtgcaataaggctgcacatttcagtcgaaattaagggtgaggagaaagtcgctccttatcacgtgcagtacacatgcttgcatgagaatctgtttcactttgtcacagatgttcagaacaatggtgttgtcaagattcccgatgccaagggcgatgatgcctggaaggtgtattatgatgagactgcgcaggaaatcgtggacgaattcgccatgcgatatggggtcgagtccatttaccaggcaatgacccactttgcttgtttatctagcaagtacatgtgcccaggcgtcccagccgtgatgagtactcttctggccaatatcaacgcttattacgcccacaccacggcaagcaccaacgtatccgcctctgatagatttgctgcaagcaacttcgggaaagaacggtttgtgaagcttctggatcagctgcataatagcctccggattgacttatcgatgtaccgaaacaactttcctgccagttctccagaacgcctgcaggatctgaaaagcactgtggacctgttaacaagtatcactttcttccggatgaaagtgcaggagcttcagtctcccccaagagcctctcaggtcgtgaaagattgtgtaaaagcgtgcttgaacagcacctacgagtatatttttaacaactgccacgagctctactccagggaataccagaccgaccctgccaaaaagggggaggttctccccgaggaacagggccctagcatcaagaatctcgatttttggtccaagctcattactctgatcgtcagcatcatcgaggaagacaagaactcttacactccatgtctcaatcagttccctcaggagcttaatgtgggaaagatctccgctgaggtcatgtggaatctgtttgcccaggacatgaagtacgccatggaagagcacgacaagcatcgcctttgtaaatcagccgactacatgaatctgcatttcaaagtgaagtggctgtacaacgaatacgtgacagaattaccagcattcaaagatagggtgcccgagtatccagcctggtttgagccattcgtcatccagtggttagatgaaaatgaagaggttagccgggatttcctacatggcgcattggagagagacaaaaaagatgggtttcaacagacgtctgagcacgcgctgtttagttgctcagtcgtagatgtgtttagtcagctgaatcagtcttttgagattatcaaaaagctcgaatgtcccgacccacagatcgtagggcactatatgcgccgatttgctaagacaatctccaacgtgttgcttcagtatgccgacataattagcaaggactttgctagctactgcagcaaagaaaaggagaaggtaccatgtattttgatgaacaacacacagcagcttcgcgtgcagctcgagaaaatgtttgaggcaatggggggcaaggagctggatgccgaggcgtcggatattctgaaggagttgcaggtaaagctgaataacgtgttggacgaactgtccagggtcttcgccaccagcttccagccccatatcgaggagtgtgtgaaacagatgggggatatactgtcacaggtgaagggaactggcaacgttcctgcctcggcatgttcatccgtcgcgcaggacgctgataatgtgctgcaaccgataatggatctgttggacagcaacctgaccttattcgccaaaatctgtgagaagactgtgttaaagagagtactgaaggagctgtggaagttggttatgaacacaatggagaaaaccatcgtgctgccccccctgaccgaccaaaccatgataggaaatttacttagaaagcatggcaaagggttggaaaagggccgggtgaagctgccctcccactcagacggtacccagatgatctttaacgctgccaaggaattgggacaactcagcaagctgaaagatcatatggtccgcgaggaagccaaatcattgactccgaaacagtgcgcagtggtcgagctcgctctggacaccatcaaacaatactttcatgctggaggtgtgggcttgaagaaaacttttctcgagaagagtcccgacctgcaaagtcttaggtatgcgctgagtctatacacccaagccaccgacctgctgataaagactttcgtgcagacccagtccgcccaagggctaggggtggaggaccccgtcggagaggtttccgtccatgtggagctgttcacacaccctggcactggcgagcataaggttaccgtgaaagtcgtggccgcaaatgaccttaagtggcagacctctggtatattcaggccgttcatcgaagtgaatataatcggaccccaattgtccgacaagaaacgaaaattcgctactaaatcaaaaaacaattcttgggcacctaaatacaacgagtccttccaattcacccttagtgcggacgccggacctgagtgctacgaactgcaagtgtgcgtgaaagattattgttttgccagggaggatcggaccgtgggcctggccgtccttcagctgagggaattagctcagcgcggctctgcggcttgctggctgcccttgggcaggcggattcatatggacgatacaggcctcacggtcctcaggattttatctcagagaagcaacgatgaggtggcaaaagaatttgtcaagttaaagagcgacacacggtctgccgaggagggtggggccgccccagctccatag

SEQ ID NO: 210873 - DNA, 1293 bp, synthetic construct
  misc_feature 1..1293: note = Description of Artificial Sequence: Synthetic coding sequence
  source 1..1293: mol_type = other DNA
atggccaccctgagcgtgaagcccagccggcggttccagctgcccgattggcacactaacagttatctgctcagcactaacgcccagttgcagagggacgcttctcaccagatccgccaggaagccagagttctcaggaacgaaactaataaccagacgatttgggatgaacatgataatcgtactcggttggtggaacggatcgacactgtgaaccggtggaaagaaatgctggataagtgtctcacggatttagatgctgagatcgacgctcttacacagatgaaagagtccgccgagcagaacctgcaggccaaaaatctgccactcgacgtggcaattgagtgcctcacactgcgcgaaagccgccgcgatattgatgtggtgaaagaccctgttgaggatgagctacacaaagaagttgaggtaattgaagcaactaaaaaggcccttcagcaaaaggtgtctcaagcgttcgagcaactctgcctattgcaggaggtccagcaacagctcaatagcgaccacaggggcaaaatggagaccctggagatcgatcggggttgcctgtcccttaacttgagatcgcctaacatttctctcaaagtcgaccccactcgggtgccagacgggagcacaaccctccaacaatgggatgattttagccgctttaataaagacagggccgaagctgagatgaaggccgccacagaactgcgggaggcgacggctttaaccattgccgagaccaacaatgaactggaggcacaaagagtggccaccgagttcgcctttcgcaaacgtctgcgtgaaatggaaaaggtgtattccgagctgaagtggcaggaaaagaatactttagaggagatcgcagagcttcaggaggatatccggcacctcgaggaagacctgagaactaagctgttgagcttaaaactctcccatacacggctggaagccaggacgtaccgtcctaatgtggagttgtgtcgtgaccaggcccagtacggccttactgatgaggtacatcagctcgaagccacaatcgcggctctgaagcagaaactcgcacaggcccaggatgctttggacgctctctgtaagcatttggctcgccttcaggcagatatcgcatgcaaagcgaactccatgctactggacactaagtgtatggacactagaaggaagcttacagtgcccgctgagcgattcgtcccagaagtagacacctttaccaggacaacaaattccaccctcagcccactcaagagctgccagctggaactggcgtag

SEQ ID NO: 210874 - DNA, 3429 bp, synthetic construct
  misc_feature 1..3429: note = Description of Artificial Sequence: Synthetic coding sequence
  source 1..3429: mol_type = other DNA
atggccaccctgctgagccacccccagcagcggccccccttcctgagacaggctataaagatcagaagaaggagggtgagggacctacaggaccccccccctcagatggcaccggaaattcagcctccatcgcatcatttttctcctgagcaaagagcactactttatgaggatgcgttgtacaccgtcctgcaccgcttgggacatccagagccaaaccacgtgaccgaggcctctgagctgctccgctatctgcaggaggcctttcatgtggagcctgaagaacaccagcaaacgcttcaacgtgtcagggaactggaaaagccaattttttgtctcaaagccaccgttaagcaggccaaaggtatcctggggaaagacgtgagcggtttcagtgatccatattgcttgctcgggatcgagcaaggggtgggagtccctggcgggtcacctgggagccggcaccggcaaaaggcagtggtgcgtcacactatccccgaggaagaaacacatcgaacccaggttataacccaaaccctgaaccccgtgtgggatgaaacattcatactcgagttcgaagacattacaaacgcatcatttcatctggacatgtgggatctggatactgtcgaaagtgtgcgtcagaaactgggagagctgacagacctccacggtctccggcgaatcttcaaagaggccagaaaggacaagggccaggacgacttccttggaaatgtggtcctgaggctgcaggaccttcgctgccgggaagatcagtggtaccctctggagcccaggaccgagacctaccctgaccggggacagtgtcacctgcaattccagctcatccacaagcgtcgggcgacctcggctagccgcagccagccgagttacacagtgcatctgcatctattgcagcagctcgtcagccatgaggtcacacagcatgaagccggaagtacttcttgggatggcagtctgtccccacaggcagccactgtgctgttcctccatgccactcagaaagatctgtccgacttccatcagtcaatggcacagtggctcgcttattctcgcctgtatcagtctctggagttcccgtccagttgcctgttgcaccccattacaagtattgagtatcaatggatacaggggcgactgaaagccgagcagcaggaggagctcgccgcctcatttagcagtctcctaacctacggcctctctttgattaggcgcttcaggtctgtgtttcctttgtccgtgagtgatagtccagcgcggctgcaatccctcctgagggtcttagtgcagatgtgtaagatgaaagcctttggcgaactgtgccctaacaccgctccccttccgcagctcgtgacagaggcactgcagacggggaccaccgaatggttccacctgaagcagcagcatcatcagcctatggtgcagggtatccctgaagctggaaaagctctgcttgggttggtccaggacgttatcggagatttgcaccaatgccagcgcacatgggacaagatatttcacaatacactgaagatccacctgttcagcatggccttccgtgagctgcaatggttggtcgctaagagggtgcaggatcataccaccgtggtaggggatgtcgtgtccccagagatgggagaatcactctttcagctatatattagcttaaaagagctctgccagctgcgtatgtcctccagtgagagggatggggtccttgcgctcgataacttccataggtggttccaacccgcaatcccctcctggttacagaaaacctacaatgaggccctggcccgggtgcagagagcagtacaaatggacgagctcgtccctcttggggagttgaccaagcacagcacttcagccgtagatctctcaacctgttttgcccagatctcccatactgcgaggcagctcgactggcccgacccagaagaagctttcatgataaccgtcaaattcgtggaagatacgtgcaggcttgccctggtgtactgctccctgatcaaggcccgcgcaagggaactgtcctctggtcagaaagatcagggccaggccgcaaatatgctctgtgtagtcgtgaatgatatggagcagctgagactggtaataggcaaactgccagcccagttggcttgggaagcccttgagcaacgtgtcggagccgtcctagaacaagggcagcttcaaaacacacttcacgctcagttacagtctgccttggccggtctggggcatgaaattcggaccggagtccgaaccctagctgaacagctggaagttgggatcgctaagcatattcagaagttggtgggtgtccgcgaatccgtcctccctgaggacgctatcctgccccttatgaaatttctggaggttgagctctgttatatgaacactaatctcgttcaggagaatttctccagcctgttaactctgttatggacccacacattaacagtgctggtcgaagctgccgcaagccagcggtcctcatccctggcatctaatcgcctaaagattgccctgcagaacctagaaatctgctttcacgccgaaggctgcggactaccccctaaggcccttcatacggcaactttccaggccttgcaaagagaccttgaactccaggccgcctcctctcgcgagctgatccgtaaatatttttgcagtagaattcagcagcaggccgaaactacttctgaagagctcggggcagtgactgtgaaggcctcatatagggcatccgagcaaaagcttcgtgttgaattattgtccgcctcctctctcctgcccctggattccaatggatctagcgacccttttgtgcaactgacattggagcctagacacgagtttcctgaattagcagctagagagactcagaaacataagaaagatctgcatcccctgttcgatgagacttttgagtttcttgtccctgctgaaccctgccgcaaggccggcgcatgcctgcttctgactgtacttgattatgatacactgggagcggatgacctggagggcgaggcctttctgccattgcgggaagtcccaggcctcagtggctctgaagaaccgggggaagtgcctcagacccgcctgcctctcacctatcccgctcccaacggagacccgatactgcagttattagaagggcggaagggagatagggaagcgcaggtgtttgtcagactgcggcggcatcgagctaagcaggggatcggtccttctgtatcctggccttggcctatttgtttattagcatttctgtttcagccactgggctggggaccaggcagcctcgggcctggattgcaggcacagtcacttttggagaagggcgagggcacgctgcccaaaatgcgacttcagttgccctggggtgagggaggagggcattactag

SEQ ID NO: 210875 - DNA, 2835 bp, synthetic construct
  misc_feature 1..2835: note = Description of Artificial Sequence: Synthetic coding sequence
  source 1..2835: mol_type = other DNA
atggccaccctgctgagccacccccagcagcggccccccttcctgaggcaggcaattaagattcggcggcgaagggtgagagatcttcaggacccgccccctcagatggcaccagagattcaaccgccctctcatcacttctcccctgagcagagagcccttctgtatgaggatgccctgtatactgtcttgcacagacttggacacccggagcccaatcacgtgacggaggcatccgaactcttaagatacctccaggaagcttttcacgtagagcccgaggagcatcagcagactctccagcgagttagggagttggaaaagccaattttttgcctgaaggccactgtgaaacaagcgaagggtatccttgggaaagatgttagcggctttagtgatccatactgtctgttgggcatagagcagggcgtaggcgtgcctggtggttcccctggctcccgccacagacagaaagcggtggttcgtcacactatccccgaagaggagactcatagaacccaggtcattacacagaccttgaacccagtctgggacgagacatttatcctggagttcgaggatatcacaaatgcaagctttcacttggatatgtgggacctagataccgtggagagtgttagacagaaattaggcgagctaacagacttgcacgggcttagaaggatattcaaggaagcccgcaaggacaagggacaggatgactttctgggcaacgtggttttaaggttgcaagacctgcggtgtagagaggaccagtggtaccctcttgagccgcggacagaaacatatcccgataggggccagtgccacctgcagtttcagctaattcacaagaggcgcgccacctccgcctcccggtcgcagccttcctacacagtccacctgcacctccttcagcaacttgtgtctcacgaagtgacacagcacgaagctggtagtactagctgggacggaagcctcagccctcaggcagctacagttctgttcctgcacgccacccagaaggatctcagcgacttccatcagtccatggcgcaatggctggcctattcacgcttgtaccagagcctcgagttcccgtcatcttgtctgctccaccccatcacttccatcgagtatcagtggatccagggcagactgaaagctgagcagcaggaagaactcgccgcatctttctcctctctgcttacttatggattgagtctgatcaggaggttccgctcagtgtttccgttgtccgtcagcgactcaccagccaggctccagtcccttctgcgtgtgttggtgcagatgtgcaagatgaaggcctttggggagctgtgccccaataccgccccgctgccgcaactcgtgactgaagccctgcagaccgggaccacagaatggtttcacctaaagcaacaacaccaccaacccatggtgcagggaattccagaggcaggaaaagcactgctagggttggtgcaggatgtcattggtgacttacatcagtgtcagcgaacatgggataagatcttccacaatacactgaagattcacctattttccatggctttccgagaattgcaatggttggttgctaagagggtgcaggaccataccacagtggtgggagacgtcgtgtctcctgagatgggtgaaagtttgttccaactttacatcagtctaaaggaattatgccagttacggatgtcctcatctgagcgcgatggagtgctggctctggacaatttccaccgctggttccagcccgccatcccatcatggctgcagaagacatataacgaggctctcgcacgtgttcagcgtgccgtgcagatggacgagctggttcccctcggagagctgaccaagcactctacatccgctgttgacctgtctacctgttttgcccagatctcacatactgcaagacagttagactggccggaccccgaagaagctttcatgatcactgttaagttcgttgaggatacatgccgtctggcacttgtgtactgctccctgatcaaggcgagagctcgcgaactctcttccggccagaaagatcagggccaggccgccaacatgctgtgcgtcgtggtaaatgacatggagcagttacggctggtgatcgggaagctaccagcgcagctggcttgggaggccttggagcaacgggtcggagcagtgctcgaacagggtcagctccaaaacaccctgcatgcgcagctgcaatctgcgttggccgggcttgggcatgagatcaggaccggggttaggacgttggccgagcaactagaggtcggcatcgccaaacatatacagaaactggtcggagttcgcgaatcagtgctgcccgaggatgctatcctccctctgatgaaatttttggaggtcgaactttgttacatgaacaccaatctggtccaagaaaacttttctagtctgctgactctgctgtggactcatacacttactgtgctcgtcgaagccgccgccagtcagcgttccagctcattggctagtaacaggctcaaaatagcactgcagaatctggaaatttgtttccacgccgagggctgtggcctgcccccaaaaaccctgccacttcctgcctcacagaaatcttgttgcggaggccaggggatcggcccgagcgtgtcttggccatggccaatttgtttgctggctttcctattccagcccttagggtggggccctggctctctcggccctggcctccaagctcagtcgcttctggagaagggtgaaggaacgctgcctaaaatgaggctccagttaccctggggagaaggagggggacattactag

SEQ ID NO: 210876 - DNA, 2790 bp, synthetic construct
  misc_feature 1..2790: note = Description of Artificial Sequence: Synthetic coding sequence
  source 1..2790: mol_type = other DNA
atgaccgccagcagcgtggagcagctgcggaaggagggcaacgagttgttcaagtgcggcgactacggcggagcgctagcagcttatacccaggcgttgggcctcgacgctactccccaggatcaggccgtgttgcacaggaatcgtgcagcctgccatctgaaacttgaggactatgacaaggccgagacggaagcatcaaaggcaatcgaaaaagatggtggtgacgtcaaggccctataccgccgctctcaagccctggagaagctgggacgactggaccaggccgtcctggatctccagcgttgcgtatctttggagcccaagaacaaggtgtttcaggaagccctgcggaatattggcggtcagatccaggaaaaagtgagatatatgtcctccactgacgctaaggtcgagcagatgttccagattttgctagacccggaagagaaggggactgaaaagaagcaaaaagcatcacagaacttagtggtgttggcccgtgaggacgctggagcggagaaaatatttaggtccaatggcgtccaacttctgcagaggctactggatatgggagagaccgatctgatgctcgccgccctacggacactggtgggcatctgctcggaacaccagagtcgcaccgtggctaccttaagtattctgggtactaggcgagttgtttctattctgggagtcgagagtcaggctgtgagcttggccgcttgtcacctgcttcaggtgatgtttgatgcgttgaaggaaggagtgaaaaaaggctttcgaggcaaagaaggtgccattattgtcgaccctgctcgagagttaaaagttctcatttccaatctgttggatctgctgactgaggtgggagtgagcgggcaaggccgggataatgccctgacactcctcatcaaagccgtgccacgcaaaagtctgaaagacccgaacaacagcctgactctctgggtgatagaccagggccttaaaaaaattctggaggtgggcgggagtctacaagacccaccaggtgaactcgcagtgaccgctaatagccggatgtccgcatcaatccttctatccaagctgtttgatgatctgaaatgtgatgccgagcgcgagaatttccacaggctttgtgaaaactacataaagtcgtggttcgagggacaaggcctggcaggaaaactcagagcaatacagacagttagttgtctgctgcaaggcccttgcgacgcaggaaatcgggccttggagctgtcaggcgtcatggagtcagtcattgctttgtgtgccagcgagcaggaagaggagcagcttgtcgccgtggaagcacttatccatgcggcgggaaaggccaaacgcgcctcattcattaccgccaatggggtatcactcttaaaagacttatataaatgtagtgagaaggactctatccgtatccgagcactcgtaggactctgcaaactgggctcagccggcggaacagatttcagcatgaagcaatttgctgaggggtcaacattaaaactggccaagcagtgtcgaaagtggctatgtaacgaccaaattgatgctgggacccgccgatgggcagttgaaggactggcttatctcacatttgatgcagacgtgaaagaggaatttgtagaggacgccgctgctctgaaagccttgtttcagctgagcagactggaggaacgctcggttctcttcgcagttgcttcggccctggtgaattgcactaattcttacgattacgaggagcctgatcctaagatggtggagctggccaaatacgccaaacagcacgtccctgagcagcaccctaaagataaaccgtccttcgtcagagctcgggttaaaaaactgttagctgccggcgtagtgagtgccatggtttgcatggtgaaaacagagtctcctgtcttgaccagctcatgccgagaattgctgtctagagtctttctggctcttgtggaggaagtcgaagatcggggtacggttgtggcacaggggggcggccgagcactgattcccctggcgctggagggtactgatgtggggcagaccaaggccgctcaggcgttggccaagttgaccatcacttctaatcctgaaatgacattcccgggcgagaggatctacgaagtcgtgcgcccacttgtgtctcttttgcatctgaactgctctggtctgcagaacttcgaggcgctgatggctctaacaaatctggccggcatttccgagcgcctgcgacaaaaaatcctaaaggagaaagctgttccaatgatcgaagggtacatgttcgaagaacacgaaatgatcagaagggctgccaccgaatgtatgtgtaatctagccatgtctaaggaggtgcaggacctttttgaggcacagggaaacgaccgcctgaaactgctggtgctatacagcggcgaggacgatgaactccttcagagagccgctgcggggggcttggccatgcttacttcaatgcggccaactctgtgcagtagaataccccaagtgaccactcattggcttgagatcttacaggcgctgcttctgtcgtccaaccaggagctccagcacaggggggctgtagtggtgctaaatatggtagaggcgtcaagggagatcgcctctaccctgatggaatctgagatgatggaaattctgagtgtgttggcaaaaggagaccatagcccagtgactcgggcagccgctgcctgtctcgacaaagctgtcgagtatggcctcatccagcctaatcaagatggggaatag

SEQ ID NO: 210877 - DNA, 2835 bp, synthetic construct
  misc_feature 1..2835: note = Description of Artificial Sequence: Synthetic coding sequence
  source 1..2835: mol_type = other DNA
atgaccgtgagcggccccggcacccccgagccccggcccgccacccctggggcatccagcgttgagcagcttcgcaaggagggcaacgagttgttcaaatgcggcgattatggcggcgcactggcggcctatactcaagccctggggctggatgccactccacaagatcaggccgtcctacatagaaatcgcgctgcatgccacctgaaactggaggattacgacaaagctgagactgaggctagcaaagctatagagaaggatggcggggacgtgaaagctctgtaccggcgctcccaagctttagagaagctcggcaggctggatcaagccgttctagacctccagcgttgcgtctctcttgagcccaagaataaggtgttccaggaagctttacggaacataggcggccaaattcaggagaaggttcggtatatgtccagtacagatgctaaggtggagcagatgtttcaaattctgctggatcccgaagagaagggcacagagaaaaagcagaaagcatcccagaacctagtggtgctggcccgggaagacgccggcgctgagaagatctttcgaagcaacggtgtgcaactcttacagcgccttctggacatgggcgaaactgatctgatgctggctgccctccgcacgctggtgggcatatgcagtgagcatcagtcccgcacagttgccaccctgtcgattcttggaacgcgcagagtggtttccatattgggggtcgagtcccaggctgtctcacttgcagcatgtcatctcctccaggttatgtttgacgccttgaaagaaggagtcaaaaagggatttagaggcaaggagggcgcaataatcgtggatcctgctcgagagcttaaggtgctcatatctaatctgttggatcttctgaccgaggtgggagttagtgggcaaggtcgggacaacgcgttaacattactgatcaaggccgtgcctcggaagtccctcaaagatcctaataacagcctcaccctgtgggtgatcgatcagggacttaagaagatcctcgaggttggaggatccctacaggatccccccggcgagctggcggtgaccgcaaattctaggatgtccgctagcatccttctttcaaaactttttgatgacttgaaatgcgatgcggaacgggaaaatttccatcggctgtgcgaaaactacattaagagttggttcgagggccaagggcttgcaggaaaactccgcgcaatccagacagtttcctgcctgttacagggcccttgcgacgctggaaaccgcgcactggaactctccggtgttatggagagcgtgatagcattgtgcgcctctgaacaggaggaagaacagctcgtggctgttgaggctctgattcacgcagccggtaaggccaaacgggcctctttcattactgcaaatggagtgagtctgctgaaagacttgtataagtgctccgagaaggactctatcaggattcgcgctctcgtgggcttatgcaagctaggaagcgccgggggcactgacttttccatgaaacagttcgcggagggctccacactcaaacttgctaaacagtgcagaaaatggctttgtaacgaccaaatcgacgcggggactagacggtgggctgtcgagggcctagcgtacctgacgtttgatgcggacgttaaggaagaatttgttgaggatgccgccgctcttaaagctctgtttcagctctcaagactggaggagaggtcagtgctctttgccgtcgccagtgccctggtcaactgcactaacagttacgactatgaagagccagatcctaaaatggtcgaactggccaagtacgccaaacaacacgtgcctgagcaacaccccaaagataagccctcattcgtccgtgcccgggttaagaaacttctggcagccggtgtagtctcggctatggtgtgcatggtaaagacagagtcgcccgtgctgacttcttcatgtcgggagctcctttcaagggtattcctggcactggttgaggaagtagaggatcgtggaaccgtggtcgcacaaggggggggacgggccctgataccactggcacttgaaggtaccgatgtgggccaaaccaaggctgcacaggcgctcgccaagttgacaatcaccagcaaccctgaaatgacgtttcccggagagaggatttacgaggtggtgcggccccttgtgagccttctccatctgaattgttctgggctgcaaaatttcgaggctctcatggctctgaccaacctggcaggaattagtgagcgtctacggcaaaagatactgaaggagaaagcagtcccaatgatcgagggttacatgtttgaagaacatgagatgattcgacgcgccgctacggagtgcatgtgcaacctggccatgtctaaggaagtccaagacctattcgaggcccagggcaatgacaggcttaagttattagttttatactctggtgaagacgatgagctgctgcagcgggccgcagccggaggcctggcaatgctgacaagtatgcggccaacattgtgcagcaggatcccccaggtaacgacgcactggctcgaaattcttcaggccctgcttctgagctcaaaccaggagctgcagcacagaggtgccgtggtggttcttaatatggttgaggcatctagagaaatagcgtcgaccctgatggaaagtgagatgatggaaatcctgagtgtgctcgccaaaggggatcactctcctgtgacccgggctgcggccgcctgtctggacaaagccgtggaatatggccttattcagccaaaccaagatggtgaatag

SEQ ID NO: 210878 - DNA, 2409 bp, synthetic construct
  misc_feature 1..2409: note = Description of Artificial Sequence: Synthetic coding sequence
  source 1..2409: mol_type = other DNA
atggccggcaccagcgagcggagcctgatcagcagcatcagccagcctaaggcgattgagtgcttcgaggtgaagaaaaaggccttcctgactcacggacggtatcatggttccggtgcaactcctcctaagaccaaagatccaaaacctgagactttctgtggtcagacaggcctgccgacaatggaggtgagaatcaatgtgagtcggcagcaggtcgagaaggttttcggtctggaagagtattggtgtcaatgtgtggcctggtctagttccggtacaactaaatctcagaaggcctatattcggattgcatacttgcggaaaaactttgaacaggagccgttggctaaggaggtgtctcttgaacaggggattgtgcttccctgcaggccaccagaaggaataccccctgctgaggtcgagtggctcaggaatgaagatttagtggacccctcactcgatccaaatgtatatattacccgcgagcactcgcttgtggtgagacaagccaggcttgctgacactgctaattatacatgtgttgctaaaaacatcgtagcgagaaggcggtctgctagtgccgccgtgattgtctacgttgacggatcatggagtccatggtctaagtggagcgcttgtgggcttgattgtactcactggagatcccgggaatgctctgacccagccccccggaatggaggagaagaatgtcagggaaccgacctggacacccggaactgtacatctgacctttgtgtgcacacagcatctggaccagaagatgtggctctgtatgtaggcctgattgctgtcgccgtatgtctggtactgttgctgctcgttctcatcctggtctactgcagaaagaaggagggattggatagcgacgtggccgactccagcatcctgacgtctggctttcaacccgtctcaattaaaccttccaaggccgacaatcctcatctgctgacaatccagccggatctgtcaactaccaccaccacataccaaggaagtttatgccctcggcaggacggtcccagtcccaaattccagctgacaaatggacatctattatctcccctgggaggggggcgacatacactacatcacagctcgccgacatctgaggcagaagagtttgtaagccggctcagcacccagaattatttcaggtcgctgccccgtggcacgagcaatatgacctacgggacttttaatttcctagggggacggctgatgatcccaaacactggtataagtctgctgatcccccccgacgccatcccacgtggaaaaatttatgagatctacctgaccctgcacaagcctgaggatgtacggctgcctctggctggctgccagaccctcctgtctcccattgtttcatgcgggccgccgggagtgctgttaacaagacctgttattctagccatggatcattgtggagagcctagcccagacagctggtccctgcgccttaagaaacagagctgcgagggcagttgggaagacgtcctgcatttaggagaagaagcaccctctcatctgtactactgccaactggaagcgagcgcatgctatgtgtttacagagcagctaggacgctttgcattagttggggaggccctgtccgtagctgctgcaaagcgcctaaagctgctactatttgcccctgttgcatgtacttctctggaatataatattcgggtctattgcctccacgacactcacgatgccctgaaagaggttgtacagctggagaaacagctaggggggcagctgatacaggagcctagggtacttcacttcaaggattcgtatcacaacttgcgattatcaatacatgatgtcccgtcttcactttggaagtcaaaacttttggtgtcctaccaggaaatccccttttatcatatttggaatggcacccagagatatctgcactgtactttcaccttggagcgcgtgagcccatctaccagtgacttagcttgtaagctgtgggtgtggcaggtcgagggagacggccaaagtttttccataaacttcaatatcaccaaggacaccaggtttgctgaactgctggcactggagtccgaagccggcgtccccgcattggttggcccttccgccttcaaaattcctttcctgataagacaaaaaataattagtagcctcgatcctccctgtcgaaggggcgcggactggcggactcttgcacagaagctacacctagatagccacttgagcttctttgcatctaaaccttcacccaccgctatgatcttaaatctgtgggaagcgcgccactttccgaacggcaatcttagccagctcgccgcagcagtggcggggctaggccagcccgacgccgggttgttcacagtgtccgaggcagagtgctag

SEQ ID NO: 210879 - DNA, 2529 bp, synthetic construct
  misc_feature 1..2529: note = Description of Artificial Sequence: Synthetic coding sequence
  source 1..2529: mol_type = other DNA
atggccgtgcggcccggcctgtggcccgccctgctgggcatcgtgctcgctgcgtggctccgaggcagtggggcccaacagagcgctacagtggccaatcctgtgcccggagccaaccccgatctccttccgcactttctggtagagcccgaagatgtatacatcgtgaaaaataagcccgttctgctcgtgtgcaaggctgtacctgctacccaaattttttttaagtgtaatggtgagtgggttcgacaggtggaccatgtgattgaacgctctacagatgggtccagcggacttccaacgatggaggtgaggatcaatgtgagtcgccaacaggtggagaaggtgtttggtctggaagagtactggtgtcagtgtgtagcctggtccagcagcggtacgaccaagtctcagaaggcctatattcggatcgcttaccttcgcaagaactttgaacaggaacctctcgccaaagaagtctccctggagcagggtatcgtcctgccatgtagacctccagagggaattccccctgctgaagttgaatggctgaggaacgaggatcttgtagacccgtcgttagatcccaacgtatacatcacccgagagcacagcctggttgtcagacaggccagactggctgacaccgcaaattatacttgtgtggccaagaatatcgtcgcccggcggagaagtgcatcggccgcggtaatcgtttatgtcgatgggtcctggtccccctggtcaaagtggagcgcctgtggacttgactgcacacattggcgcagccgcgagtgcagtgatcctgcccctcgtaacgggggggaggagtgccagggcacagaccttgatacccgtaactgtacgagtgacctgtgcgtgcacactgcaagcgggcccgaagatgtggccctctatgtcggcctgatcgcagtagccgtgtgtctggtgctgctgctgctggtgctgatcttggtgtactgccggaagaaagagggccttgactctgacgtggccgatagttccatattgacatctggatttcaacccgtttccatcaaaccttccaaagcagacaacccgcacctactcactatacaaccggacttgagtactaccacaacaacctatcagggaagtttgtgcccacggcaggatggaccatcccccaagtttcagctgaccaatggccatctgctgtctccgctggggggcggccgccacactctgcatcacagttcgcccacatcggaggccgaggagttcgtctcaagactgagcacacagaattattttagaagtctgcctcgagggactagtaacatgacttatggaacctttaattttttaggagggagactgatgatccccaacacgggcatttcactgctgatccccccagacgctatcccccggggtaagatctatgagatctacctgacgctccacaaaccagaggacgtgcggcttccactggccgggtgtcaaaccctgttgtcaccaatagtctcatgtggacctcccggcgtgctgttgactagaccagtaatactcgctatggatcactgtggcgagccctctcctgatagttggtctctacgcctgaagaagcagtcctgtgaaggttcatgggaggacgtgctgcacctgggcgaagaagcccctagccacctgtattattgtcagcttgaagcttcagcttgttacgtgtttacagaacagctgggacgcttcgccctggtaggagaagccctatccgtggccgctgccaagaggctcaagctactgctctttgcccccgtggcttgcacgagtctggaatacaacatccgagtgtactgtctccatgatacacacgacgcactcaaggaggtggtgcagctggaaaagcagctcggcggccagcttattcaagaaccccgtgtgcttcatttcaaggactcctaccataatctgaggctgtcaattcatgacgtcccttcttctctgtggaagtcaaagcttctggtgtcttaccaggaaattcccttctaccacatatggaatggcactcagaggtacttgcactgcacctttacactcgagagagttagccccagcacatcagaccttgcttgtaagctttgggtttggcaggttgagggtgacgggcagagcttttccatcaactttaacatcacaaaagatacgaggttcgctgaacttttagcgcttgagtcagaggctggcgtgcccgccttggttggaccatcagccttcaagattccattcctgatccgacagaagattatttcctctctggatccaccatgccgcagaggtgccgattggcggacgctggcccaaaagctgcacctcgatagccaccttagtttcttcgccagtaagccgtctcccacagctatgatcctcaacctctgggaggcgagacattttccaaacggaaacctgtcccagctcgcagcggctgtggctggattagggcaacctgatgccggactctttaccgttagtgaagccgaatgctag

SEQ ID NO: 210880 - DNA, 2838 bp, synthetic construct
  misc_feature 1..2838: note = Description of Artificial Sequence: Synthetic coding sequence
  source 1..2838: mol_type = other DNA
atgggcgcccggagcggcgcccggggcgccctgctgctggccctgctgctgtgctgggacccccgactgagtcaggccgggacggactctggaagtgaggtgctgccagactcattccccagcgccccagccgaaccactgccctacttccttcaggaacctcaggatgcctatatagtaaaaaataaacccgtggagctccggtgcagagccttcccggccacgcagatatatttcaagtgcaacggggagtgggtgtcccagaatgaccatgtaactcaggaaggcctcgatgaagctacaggcctcagagtgcgagaggtgcagatcgaggtttcacggcagcaggtcgaagaattgtttgggctggaagactactggtgtcagtgcgtcgcctggagcagtgccgggactactaaatcaaggcgcgcctacgtgagaatcgcctacctgcgaaaaaattttgaccaggagccactggggaaggaggtgcccctcgatcatgaagtcttgttgcagtgtcgtccacccgagggcgtgccggttgcagaggtggagtggctgaagaacgaggacgttatagaccccacccaggacaccaattttctcctgacaatcgaccacaacctgattattagacaggcgagactaagtgacaccgctaattatacctgcgtggcgaagaacatagtggccaagcgccgcagcaccaccgctacggtgatcgtgtatgtcaatggaggatggtcttcctgggccgagtggtctccttgtagtaatcggtgtggcagagggtggcagaaacgaacacgaacctgcaccaatcctgcaccattaaacggaggcgctttctgtgaaggtcaagcctttcagaaaactgcctgcacaacaatctgccccgttgatggagcatggaccgagtggagcaaatggagcgcctgctcaaccgaatgtgctcactggagaagccgagaatgtatggcccccccgccacagaacggcggaagggattgctcgggcacccttcttgactctaagaactgtacggatggactctgtatgcagaataagaagacattatctgatcccaacagccacctattagaagcctctggagatgccgccctctacgcagggttagttgttgctattttcgtggtagttgccattctgatggccgtgggggtggtggtctacaggcggaattgtagagatttcgacacagatattacagatagctccgcggccttaacagggggatttcaccctgtgaactttaaaacagcacgcccgagcaatcctcagctgcttcatcctagcgtgcctccagacttgactgccagtgccggcatctaccgcggacccgtttacgcattgcaagacagcacagacaagattcctatgaccaatagccctctgctggaccctctgccatctttaaaagtgaaggtctactccagctccacaacagggagtggcccggggcttgctgatggtgctgatctgttgggcgtcctgccccctgggacctacccctctgacttcgcacgggatacccacttcctgcatctgaggtcagcctccctgggctcacagcagctcctgggactccctcgagatcccggcagctcagtttcaggcacttttggatgtctggggggtaggctctcaattcccgggaccggggttagcttattagtacctaacggggccatcccccagggcaaattctatgagatgtacctgttgattaataaggctgagtccacccttccgctcagcgaagggacccagactgtccttagtcccagcgtcacctgtggacccacaggactgctcttatgcagaccagtgatactgactatgcctcattgtgccgaagtctcagcgcgagattggatcttccagctcaagacccaggcccatcaaggccattgggaggaggtggtgacccttgatgaggagacactgaataccccttgctactgtcagctcgaaccacgggcttgccacatacttctagaccaactggggacctacgtgttcacaggtgagtcctactcccggagcgcagtgaagagactgcagctagccgtttttgctcccgccttgtgtacttccctcgaatactccctcagggtctactgcttggaggataccccagttgcactgaaggaggttctcgagctggaacgcacactcggagggtatctggtcgaagaacccaaacctcttatgttcaaggatagttatcataatctgcggctatctttacacgacctgccccatgctcattggcggtcgaagctactggctaaatatcaggagattcctttttaccacatctggtccggatcccaaaaggcattgcactgcactttcaccttggaaaggcatagcttggcctccactgaactaacttgcaaaatctgcgtgcggcaagtcgagggggagggtcagatattccaattgcacaccactctggcagagactcctgctggctcactcgacactctgtgctcagcacctggctctacagttacaacacagcttggtccgtacgctttcaagatccccctcagtattcgtcagaaaatctgtaactctctcgacgctcccaactcgcgtggtaacgattggaggatgttagctcaaaaactgagcatggaccgatatctgaactattttgccacaaaagctagccccaccggcgtaattcttgatctgtgggaggccctacaacaagacgatggtgatctgaacagcctggcctcagccctggaggagatggggaagtctgaaatgctggtagccgtggccactgatggagactgctag

SEQ ID NO: 210881 - DNA, 2805 bp, synthetic construct
  misc_feature 1..2805: note = Description of Artificial Sequence: Synthetic coding sequence
  source 1..2805: mol_type = other DNA
atgggcgcccggagcggcgcccggggcgccctgctgctggccctgctgctgtgttgggacccccgcctaagccaagctggcaccgactccgggagcgaagtgctgcccgattcctttccatcagccccagctgaacccctgccttactttctgcaggaaccgcaggacgcctatatcgtcaagaacaaaccagtagagttgcggtgtcgggccttcccggctacgcagatctattttaaatgtaatggggagtgggtgtcccagaacgatcacgttacacaagaaggcctggacgaagctactggcctgcgcgttagagaagtgcagattgaggtgagtaggcagcaagttgaggagctcttcggcctcgaggactactggtgccagtgtgtggcctggagttctgcaggaacaacgaaaagcagaagagcttatgtgcgcatagcctatttacgtaaaaattttgatcaggaaccactaggaaaggaagtccccttggaccacgaggtgctcctccagtgcagaccacctgagggggtaccagtagcggaggtcgaatggctcaaaaatgaggatgttatcgaccccactcaggacacaaattttctgctgacgatcgatcataatctgatcattaggcaggccagactgagcgacactgcaaactacacctgtgtggccaagaacattgttgcaaaaagacggtccaccaccgcaacagtgattgtatacgtaaacgggggttggtcgagttgggcagagtggagcccctgttcaaaccgttgtggacgtggctggcagaagcgaacacgcacttgtaccaaccctgcgcccctgaacgggggcgccttctgtgaggggcaggcttttcagaaaactgcttgtacaactatttgtcctgtcgacggggcctggacggagtggtctaagtggagcgcctgttcaactgaatgtgcacattggagatcccgcgaatgtatggcccctcctccccaaaacggggggcgggattgttccgggacattactggacagtaaaaactgcacggatggcctctgcatgcagatgttggaggccagtggggacgccgctctgtacgccgggttggtggtagccatctttgtggtagtggctattctgatggccgtcggagttgttgtatacaggaggaactgccgagattttgatacggacatcacagattcatcggcggccctcacaggaggattccatcccgtgaattttaagaccgcaagaccttccaatccacaactgctgcacccctcggtacctcccgatcttaccgcttctgccggcatttaccgagggccagtctacgcgctgcaagattccactgataagatccccatgaccaactcacctttgttagatcctttgccatcccttaaagtgaaagtttattcatcttcaaccactggttccggcccaggcctggccgacggggcagatttgctgggagtgttgccaccaggaacatatccctccgatttcgcccgcgacacccacttcctgcacctcaggagcgcctccttaggcagccagcaactgctaggcctcccacgcgatcccggctccagtgtctccggtacctttggatgtctcggcgggaggttatccatccccggaacaggagtgtcactccttgtgcctaacggtgctatcccccaggggaagttctatgaaatgtatttacttatcaacaaggccgaaagtaccctgcctttgtccgagggcactcaaactgtgctaagcccaagtgtgacctgtggtcccacaggcctgttactatgtaggccggtgattctcaccatgccccactgcgccgaggtgagtgcccgcgactggatctttcagctgaaaacccaggcccatcaagggcattgggaggaggttgtgaccctggacgaggaaacgctgaatacgccttgctactgccagctagagccccgcgcctgtcacatcttactcgaccagctagggacatacgtcttcaccggagaaagctattccaggtccgctgtcaagagattgcagctggcagtcttcgcacccgcgctgtgtacctctctggagtactctctgagggtgtactgtctcgaggatacacccgtggcactgaaggaagttctggagctggagcgcaccctcgggggctacctcgttgaggaaccaaaaccacttatgttcaaggactcataccataacctgcgcctgagccttcacgatctaccgcatgctcactggagaagcaaacttttagccaagtatcaagagattcccttctatcatatctggtctggatctcagaaagctctgcattgtacgtttaccttagaaagacattccctggcttccactgaacttacatgcaagatctgtgttcggcaggtggaaggagagggccagatttttcagttgcatactactctcgcagaaacccccgctggtagccttgatacactatgtagcgcccccggctctactgtcacaactcagcttggaccgtacgccttcaaaatccccctgtccatccggcaaaagatttgtaatagcctggatgcacctaattcccggggcaatgattggcgcatgctggcccagaagctgagtatggatcggtacctcaactatttcgcgactaaggcttcacctaccggggtgattctggatctgtgggaggcactgcaacaggatgacggtgatctcaatagcctcgcaagcgccttggaagagatgggcaaatcagagatgctggtggctgttgccaccgacggcgattgctag

SEQ ID NO: 210882 - DNA, 2673 bp, synthetic construct
  misc_feature 1..2673: note = Description of Artificial Sequence: Synthetic coding sequence
  source 1..2673: mol_type = other DNA
gacgacgacttcttccacgagctgcccgagaccttccccagcgacccaccagagcccctgccccatttcctaatcgagcccgaggaagcctacatcgtcaagaataaacccgtaaatctgtattgcaaagcctcccccgcaactcagatctatttcaagtgtaattctgaatgggttcaccagaaggatcacattgtggacgaaagggtagatgaaacaagtggcctcattgtgcgtgaggtcagtatagagatcagtagacagcaggtggaggagttgttcgggccagaggactattggtgtcaatgtgtagcgtggagctccgcgggcacaaccaagagcagaaaagcctatgtgcgcattgcctacctgcgcaaaacattcgaacaggagcccctggggaaggaggtgtccctggaacaggaagtgctgctacaatgcagacctccagaaggaatacccgtggcagaggtcgagtggctcaaaaacgaggatatcattgatccagtggaggatagaaacttttatatcacaatcgaccacaacctgatcattaaacaggcacgcttgagcgacacggctaactatacctgtgtagcgaaaaatatcgtcgccaaacgtaagtcgaccaccgctaccgtcatagtgtacgtgaacggagggtggagcacatggaccgagtggagtgtctgcaattctcggtgcggccggggataccagaagaggactcggacctgtactaaccctgcacctctgaacggtggcgccttttgcgagggtcagtcagtgcagaaaatcgcctgtaccacgttgtgccctgtggatggtcgctggaccccatggtcaaaatggagcacttgtggaactgaatgcacccattggcgacgcagggaatgcaccgcaccagccccaaagaatgggggtaaggattgcgatggtcttgttctgcagagcaaaaactgcacagatggcttgtgcatgcagaccgctccggattctgacgatgtggccctctacgtcggcattgtcatagctgtgattgtttgccttgctatctcagttgtggtggcccttttcgtgtaccgcaaaaatcatcgcgacttcgaatcagatatcatagactcatctgcattgaatgggggatttcagccagtgaacatcaaggccgccagacaggacctgcttgctgtacctccagaccttacatccgcagctgctatgtaccggggtcctgtctacgccctgcacgacgttagcgacaagataccgatgaccaattctccgatcttggatcctctaccaaacctcaaaattaaggtttacaacacatcaggcgcggtgactccacaagatgacctgagtgagttcacatctaagctgtctccacaaatgacccagagcctgctggagaacgaggccttatccttaaagaatcagtcactcgcaagacagacagacccatcttgcactgcattcggcagctttaatagtctggggggccatctgatcgtgcccaatagtggagtaagtttacttatacctgccggtgcaatccctcaggggagagtgtatgaaatgtacgtaacggtccacagaaaggagaccatgcggccacccatggacgattcacagaccctgctgactcccgtggtgtcatgcgggcctccaggtgctttgctcacacgaccagtagttctgactatgcaccattgcgccgaccccaatactgaggattggaaaattttgcttaaaaaccaggcagcccaggggcaatgggaggacgtggtcgtcgtaggcgaggagaattttacgactccttgctacatacagctcgacgctgaggcctgtcacatcctcactgaaaatttgagcacatatgcgcttgtggggcacagcactacaaaggctgcagccaagcggctcaaactagctatattcggtcctctgtgctgctcctccctggagtattccatacgtgtgtactgtcttgatgatactcaagatgctttaaaagagatcctacatttagagcgccagatgggcggccagttactggaggaacctaaagctctccacttcaagggatctacccacaatctgaggctgagcatccatgatattgctcattctctgtggaaaagcaaattactggcgaaatatcaagagattccgttttaccatgtttggagtgggagccaacgtaatctccattgcacattcactctggagcgcttttctctgaatacggttgagcttgtgtgcaagttgtgtgttcggcaggttgaaggcgaagggcaaatcttccaattaaactgcactgtttctgaggagcctactggtatcgatcttcccttattggacccagctaatactattacgaccgttaccggaccatcagcgttctcaataccgttgcctatccgacagaaactatgcagctcgttagacgccccacagaccagaggccatgattggaggatgctcgcacacaaattaaatctcgaccgctacctcaattacttcgcgacgaaatcaagtcctactggagtcatcctggacctgtgggaggcacagaatttccctgacggaaatctgagcatgctggcagccgtgttggaggaaatgggtcgccatgaaactgtggtgtcactggctgcagagggacagtactag

SEQ ID NO: 210883 - DNA, 2796 bp, synthetic construct
  misc_feature 1..2796: note = Description of Artificial Sequence: Synthetic coding sequence
  source 1..2796: mol_type = other DNA
atgcggaagggcctgcgggccaccgccgcccggtgcggcctgggcctggggtacttacttcaaatgctggtcctcccagccctcgccctcctcagcgcttccggaaccggctcagccgctcaggatgacgatttttttcacgaactgcccgagactttcccttccgatcctccagagcctcttccccacttcctgattgagcctgaggaagcatacatagtcaaaaataagcccgtgaacctatactgcaaggccagtccggccactcagatatattttaagtgtaatagtgaatgggttcaccagaaagaccacatcgttgatgagagagtcgatgagacatccggcctgatcgtgagagaagtgtcaatcgagatcagtcgacaacaagttgaggaactttttggcccggaagactattggtgccagtgcgtggcctggagcagtgccggcaccacgaagagcaggaaggcatatgtgaggatcgcatacctccgtaagacttttgaacaggagccgctcggaaaggaggtcagcctggagcaggaagtgttgctacagtgcaggcccccagaagggatacctgtggcagaagtggaatggctgaaaaatgaggatattattgaccctgtcgaggacaggaatttttatattacaatcgaccacaacctaattatcaaacaggccagattgagtgacaccgccaattacacgtgcgtggccaagaacatagtggcaaaacggaaatcgaccacagctaccgtgattgtctacgtcaatggaggatggagcacatggaccgagtggagcgtctgtaacagccgatgtggaagaggatatcagaagagaaccagaacatgtacaaaccctgctcccctcaacggtggcgctttctgcgagggccagagtgtccagaaaattgcctgtaccacattgtgtcctgtggacggcagatggacaccatggtccaagtggagtacctgcggcactgagtgcacccattggcgtaggagggagtgcactgcccctgcaccgaagaatgggggaaaagattgtgatgggctggtgctccaatccaagaattgcacggacgggctttgtatgcaaacagctcccgattccgacgacgtggccctgtacgtaggaattgtcatcgcagtgattgtctgtctcgcgatttctgtggtggtagccctgtttgtgtatcgaaaaaaccatagagattttgaatccgacattatagattcatcagcccttaacgggggattccagccagtgaacattaaggccgcacgacaggaccttctggccgtcccacccgatctcacttccgccgctgccatgtaccgggggcccgtgtacgctttgcatgatgtctcagacaaaattccaatgactaatagccctatcctcgacccgctgccaaacctgaaaatcaaggtatacaatacctcaggggccgtcaccccgcaagacgatttgtccgaatttaccagcaaactcagtccacagatgacccagagtctcctggagaacgaagcccttagccttaaaaatcagagtctcgctagacagacagacccgtcttgtacagcttttggaagttttaactctttaggtggccacttaatagtgcccaattctggagtgtctctactgatacctgcgggagcaattcctcagggtagggtatacgaaatgtatgtcaccgtccacagaaaggagaccatgcgccctcccatggatgattcacagaccctgctgactccagtggtcagttgcgggccccccggggccctgctcactcgtcctgttgtgctcacaatgcaccattgtgccgatcccaacacagaagactggaaaatccttttaaagaaccaggccgcccagggtcagtgggaagatgttgtggtggtaggagaggagaattttacaacgccttgctacattcaactggacgctgaagcatgccacatactcacagagaacttgagcacctacgcattagttgggcactctacgacaaaggctgccgctaaaaggctgaaattagccatcttcggacccctctgctgttccagtcttgaatactccatccgtgtgtattgtttagacgacacacaggacgccttgaaggaaatcctgcacctggaaaggcagatgggaggccagctcctggaggagccaaaggctctgcattttaagggatcaacccacaacctaaggctttcaattcatgatatagcacacagtttgtggaagtccaaacttctggctaaatatcaagaaatccccttttaccacgtgtggtctggaagccaaaggaatctgcactgcacctttacattggagaggttcagtttgaacaccgtcgagcttgtttgcaaattatgcgttagacaggtggaaggtgagggccagatatttcagctgaactgtaccgtgagcgaggaaccaacggggattgacctgccgctgctcgacccagctaacacaatcacaactgtgacgggcccgagcgctttctctattcccctgcccattcgccaaaagctgtgttcatctctggatgcacctcagacccgcggacatgattggcgcatgctggcacacaagctgaatctggatcgatatctcaactacttcgccacaaagagctccccaacaggcgtcatactcgacctatgggaagcccaaaatttccctgatgggaacttatccatgctggctgcagtgcttgaggagatgggtcgccacgagactgtggtctcactcgccgctgaaggccagtactag

SEQ ID NO: 210884 - DNA, 3153 bp, synthetic construct
  misc_feature 1..3153: note = Description of Artificial Sequence: Synthetic coding sequence
  source 1..3153: mol_type = other DNA
atggagcccggccggggcggcaccgagaccgtgggcaagttcgagttttcccgcaaagacttgattggccatggagccttcgctgtggtcttcaaaggtaggcacagggagaaacacgatttggaagttgcagtcaagtgcataaacaagaaaaatctggccaaatcccagaccctactgggaaaagagattaagattctcaaggaactgaagcacgaaaacattgtcgcgctgtacgacttccaagagatggcgaatagcgtctacctggtcatggaatattgtaacggcggcgacctagctgattatctccacgcaatgcggacactttccgaggataccattagactctttctgcagcaaatagcgggggccatgcgcctccttcattccaagggaatcatccaccgagacctgaagccccagaatatattgctcagcaatcctgctggcagaagggccaatcctaattctatacgggtaaagatcgccgattttggatttgccagatatctgcagtctaacatgatggccgcaactctatgtggaagccctatgtacatggcgccagaggtgatcatgtcacagcactatgatggaaaagcagacctgtggtccatcgggacaatcgtgtaccagtgtctgactggcaaagcaccttttcaggcatcttctccccaggacctgcggctattttatgaaaaaaataaaacattggtccccaccatacctcgagaaacctctgcccctctgcggcaactgctcctggcattgctgcaaagaaatcacaaggaccgcatggattttgacgaattcttccatcatcctttcctggacgcatcaccctcagtcaggaaatcccccccagtaccagtgcccagttaccccagttcaggctctggcagtagcagctcgagtagcagcacaagccacctcgcctcaccacccagcctgggggaaatgcaacaattgcagaaaaccctggcgagccccgctgacactgccggttttctgcattcttctcgagattccggaggaagtaaggactctagttgtgataccgacgacttcgtgatggtgcccgcccaattccccggagacctggtggcagaggcccccagcgcaaagccaccaccggactcgctaatgtgcagcgggagttccctcgtggcgagcgcaggtctcgaatcccatggtcgaacaccatcaccttctcccccatgttcatcctcaccatcccctagcgggagagctggccccttctcatcttcacgttgtggagcctctgtgcccattcctgtgcctacacaagtccaaaattaccaacggatcgagagaaacctgcagagcccgacacaatttcagactcccagatcatcagccattcgcagatctgggtctacatcgccgctcggttttgcaagagcgagcccaagtcccccagcccacgccgagcacggtggagtacttgctcggaaaatgtcactggggggagggcgcccgtacacccccagcccacaagtgggtacaatacccgaacgccccggttggagcggcacccctagccctcagggtgctgaaatgcgcgggggcagaagccctaggccagggtcttcagcccctgaacacagccctcgcacaagtggccttggttgtaggctgcatagtgcacccaacctttcagacttgcatgtggtccgtccaaagttacctaaacccccgaccgacccacttggggctgtgtttagccctcctcaagcctcacccccccaaccaagtcacggccttcagagttgccgtaatctgagagggtcccccaagctcccagacttcctgcagcgcaacccgctcccacctattcttggttctcccaccaaggccgtgccttcgttcgattttcccaagacgccctctagtcagaacctgttagccctgttggcccggcagggtgtggtgatgacgcccccaaggaacaggaccctccctgatctctctgaagttggccccttccatgggcagcccctgggccccggcctgagacctggggaggatccaaagggaccgtttgggcggagcttcagtacatcccgcctcactgacctgttgctgaaggcggcctttggcacacaggctccggatccagggagcacggaatctttacaggagaaacctatggagatagcacccagcgctggcttcggcggctctctgcacccaggcgccagagctggagggacttcatcccccagcccagtggtgttcaccgtgggctcacccccatctgggagcacgcccccacagggccccagaacaaggatgttctctgctgggccaacaggaagcgcgagtagctctgcccgacacctggtgccaggcccttgtagcgaagcacctgcacctgagctgccagcacccgggcacggctgctcttttgcagaccccattacagctaatcttgaaggggcggtgacgttcgaagcacctgatcttcccgaagagacacttatggagcaagaacacaccgaaatcctgcgtggtctgcggttcacactgctattcgtgcagcatgtgctggaaatcgcagcattgaaaggcagtgctagtgaggcggctggcggccccgaataccagctccaagagtcagttgtggcggatcagattagtttactgtcacgcgagtggggcttcgctgagcagttggtgctgtacctgaaagttgcagaactactctcatcagggctacagagcgcaatcgaccagataagagcgggcaaattgtgccttagttccacagtcaagcaagtggtccggaggctgaatgaactctataaggcaagcgtggtgtcttgtcaaggattatctctgcggctccagcggtttttcctcgataaacagagactcctggaccgcatccacagtattaccgctgaacgcctgatattctcccacgcagtgcagatggtacaatctgcagcattggacgaaatgttccagcatagagaggggtgtgtgcccaggtatcacaaagccctgctgctcctggagggcctccaacacatgctatccgaccaggctgatattgaaaacgttacgaaatgcaagctgtgcattgaacggagattgtccgccctgctcacggggatttgtgcttag

SEQ ID NO: 210885 - DNA, 1452 bp, synthetic construct
  misc_feature 1..1452: note = Description of Artificial Sequence: Synthetic coding sequence
  source 1..1452: mol_type = other DNA
atgcagcggaacggcagcgccagccggggcctggagaagacccggctccgcctgtgtcgagaggcccggattcctgaaagcgccttcctgacaggcctgacacgtgaatcctgggaagcgagatgttggtgtgcgaaagacacaagagaagttgtggccatcaaatgtgtggccaaaaaatccctgaacaaagcctctgtggaaaacctattgaccgagatcgaaattctgaaagggattcgccatcctcatattgttcagctgaaagatttccagtgggactccgacaacatctacttgattatggaattctgcgcgggaggagatttgtcgagattcattcacaccagacgaatcctgccagaaaaggtggctcgtgtgttcatgcaacagttggcttccgcccttcagttcttacatgagcgaaacatatcccacctggacttgaaaccccagaatatccttctctcatccctcgagaagccgcatcttaagctggccgactttgggtttgcccaacacatgagtccttgggatgagaagcatgtcctgcgcggcagccctctctacatggccccggagatggtgtgtcagcgtcaatacgacgcccgcgtggacttatggagtatgggcgtcatcctttatgaagcactgttcggccaaccacctttcgcctctaggagttttagcgagttggaggaaaagataaggagcaaccgggttattgaactgccgctccgcccactgctgtccagagattgtcgggatctgcttcagcggctactggagcgcgatccctcgcggcgcatctccttccaggactttttcgcgcacccatgggtggatctggaacacatgccatccggagaaagtttaggcagagccaccgccctcgttgtgcaagctgtgaagaaggatcaggaaggcgactcagcagccgcccttagcctatactgcaaagcactcgatttcttcgttccagcactgcactatgaagtcgacgctcagcgaaaagaggctatcaaggctaaggtgggccagtacgtgtccagggcggaggagctcaaggctatcgttagctcatcaaaccaggctctgcttaggcaggggaccagcgcccgcgatctgctgcgtgaaatggcccgtgataaaccgcgccttctggcagcactggaggtggcctctgccgccatggctaaagaggaagcagccgggggcgagcaagacgcccttgacctgtaccagcactccctgggtgaattgttgctgctcctcgcagctgaacccccaggcagacgaagggagcttctgcatacagaggtgcagaatctcatggctcgggcggagtacctgaaagagcaggtcaaaatgcgcgagtctcggtgggaagctgacactctggataaggaaggattgagtgagagcgtccgttccagctgcacactccagtag

SEQ ID NO: 210886 - DNA, 1419 bp, synthetic construct
  misc_feature 1..1419: note = Description of Artificial Sequence: Synthetic coding sequence
  source 1..1419: mol_type = other DNA
atggccggccccggctggggccccccccggctggacggcttcatcctgaccgagcggctgggttcaggtacttacgccacggtgtataaggcctatgccaaaaaggacacgagagaagtcgtggccattaaatgcgtggcgaagaagagcctgaacaaggcttccgtggaaaatctgctgaccgaaatcgagattctgaaaggcattcgacacccgcatattgtacagttaaaggactttcagtgggattccgataatatttatcttattatggaattctgtgctggtggagacctcagccggttcatacacaccagacggatcctccctgaaaaagtggcccgggtgtttatgcagcagctcgcgagtgccctgcagtttcttcacgaacgcaacattagccatctggacctgaagccacaaaacatcctgctttcctctctcgaaaagccccacttgaagctagccgatttcggattcgcacagcacatgagtccttgggatgaaaagcacgtgctgcgaggatccccactctatatggctcctgaaatggtgtgccagcggcaatatgacgcaagagttgatctttggtccatgggggtaatcctgtatgaggccctctttgggcagcctccttttgctagtcgatccttcagcgagcttgaagagaaaattaggtccaacagggtgatcgagctaccacttcggcccctgctatcgagggactgcagagatcttctgcagcggctacttgagcgggatcctagtcggcgcatctccttccaggacttcttcgcgcatccgtgggttgacttggagcatatgccctccggagaatcacttggacgagcaactgccctagtagtccaggctgtaaagaaggatcaggaaggggattccgcagcggccctctccttgtactgcaaagccctggacttttttgtgccagcactgcactatgaagtggacgcgcaacgaaaagaagcgatcaaggcgaaggtggggcaatacgtctccagggcagaggagctgaaagctatcgtttccagcagcaaccaagccctgttgagacagggaacttccgccagagatcttcttcgggagatggcacgcgacaagcccagactgctcgcggccctggaggtggcatcagccgctatggcaaaagaagaggccgcaggcggcgagcaggatgcactggatctttaccaacattccctgggtgagctgctgctgctgcttgccgcggaacctcccggtcgtcggcgcgagctgttacacacagaagttcagaacctaatggctcgcgctgagtacctgaaagagcaagtgaagatgcgagagagtcggtgggaagctgatacactggacaaagaaggtctgagcgagtcagtgcggtccagttgcacactacaatag

SEQ ID NO: 210887 - DNA, 9705 bp, synthetic construct
  misc_feature 1..9705: note = Description of Artificial Sequence: Synthetic coding sequence
  source 1..9705: mol_type = other DNA
atggtgaagcggaagagcagcgagggccaggagcaggacggcggccggggcatcccactgcctattcagacctttctgtggcgtcagacttccgccttcctcagacctaagctcggaaaacagtacgaagcctcttgcgtctccttcgagagagtgttggttgaaaataagctacatgggttgagcccagccctgagtgaggctattcaatcgatctcccgatgggaactggtgcaggcggcccttccccatgtcctgcattgtaccgccacgttacttagtaacagaaataaactgggacatcaagataaacttggcgtggccgaaaccaaactgctccatacgttgcactggatgttgctcgaggccccgcaagactgtaataacgagcgattcggaggcacggatagagggtcttcatggggcggaagcagttccgcttttattcatcaggtcgaaaatcagggatcccccggtcagccttgccaatccagctccaacgacgaggaagagaacaaccggcggaagatttttcagaactccatggccaccgtcgagctgtttgtatttttgttcgcaccactggtccacagaataaaagagtctgacttaacctttcgtttagctagtggcctcgtgatctggcaacccatgtgggaacatcggcagccaggtgtctctgggttcactgcgctggtgaaacccattagaaacatcatcacagccaaaaggtccagtcctattaactctcagtctagaacatgtgaaagcccgaatcaggacgctcggcatttagaaggtctccaggtagtctgcgagactttccagtcagactcaatctccccgaaagcaacaatatcgggctgccaccgcggtaattctttcgatggctccctcagctcacagacgagccaggaacggggaccaagccacagtagggcctctctggttattcccccatgtcaacgctcaagatatgccacatacttcgatgttgccgttctgcggtgtctactgcagccgcattggtctgaagaggggacgcagtggtctctcatgtactatcttcaaagacttaggcacatgttagaggagaaacctgagaaaccaccagagcctgacattcccctgctgcccaggccccgcagcagctccatggttgcagccgcccccagcctcgtgaacacccacaagacccaggacctcacaatgaagtgcaatgaggaggaaaagtccctttcttcagaggcgttctctaaagtgagtctaaccaacctgaggaggagtgctgtgcccgatctctcctctgatttgggcatgaacatctttaagaagttcaaaagcaggaaggaagacagagagagaaaaggatcaattccgttccaccacacgggcaaacgccgtccccggaggatgggagtcccctttttgctgcacgaggatcacctggatgttagccccacacggagcacgtttagcttcggctcattttccggtctgggagaagacaggcggggtatcgagaagggcgggtggcagaccacgatcctggggaagttaacccgcaggggcagtagcgatgctgccacggagatggaatcgctatcagcgagacactctcattcccaccacacacttgtcagtgaccttccggatccctccaattcacacggagagaacaccgtaaaagaggtacgctcccaaatctctactataacagtggcaacatttaacaccacactcgcctctttcaacgtcggatacgcagatttcttcaatgagcacatgcggaaattgtgcaaccaggtgccaatccccgaaatgccccacgagccactcgcctgtgcgaacttgcctagaagccttacagactcttgtatcaactattcatacctggaagacacagaacacatagacggaacgaacaactttgtgcacaaaaatgggatgttggatttaagtgttgtcttgaaggctgtgtatcttgtgctgaatcatgacatctcctctcgcatctgtgacgttgctcttaatatcgtggagtgtttgttacagttgggcgtcgtcccctgtgtagagaagaatagaaaaaaatctgaaaacaaggagaacgagacactggaaaaaaggccttccgaaggggccttccagtttaagggtgttagcggatcgagtacttgcgggtttggcggtccggctgtgagcggagccggggatggtggcggagaggagggagggggcggagacggaggagggggcggcggggacggaggtggaggaggcggaggtggtgggggaccttacgagaaaaacgataagaatcaagaaaaagatgagagcacgcccgtgtccaaccaccgcctggccttaaccatgctgatcaagatagttaagtccctcggttgcgcttatggatgtggagagggccaccggggactgtcaggcgatcgtctgcgccaccaggcacaaaactgtctcaccaagctttataagctggacaagatgcagttcaggcaaactatgcgagattatgttaataaggacagcctgaacaatgtggtggacttcctgcacgccctgctgggcttctgcatggagccagttacagacaataaagctggcttcggcaataatttcactactgtagataacaaatcgacagcccagaatgttgagggaatcatcgtgagcgcaatgttcaagagtctgatcacacgttgcgcttcaaccacccacgaattgcactctcctgaaaacctggggctgtattgtgacatacggcagctggttcagttcatcaaggaggcacacggaaacgttttccgccgtgtcgccctgtccgctttgctagattctgctgagaaactggcccccggcaaaaaggtagaagaaaatgagcaggagtccaagccagccggatcaaagcgctctgaagccgggtcaatcgttgataagggtcaggtcagttctgccccagaggagtgtaggtccttcatgagcggaagaccaagccagaccccggaacacgacgaacagatgcagggcgctaacttgggcagaaaagatttttggcggaagatgtttaagtcccaaagtgcggcaagcgacacgtcaagccaatctgagcaggacacgagtgagtgcactaccgcccattctggaacaacgtctgatagaagggcccgaagtcgcagccgccgaatttctctccggaaaaagttaaagttgccaataggcaagcgcaattggctgaaacgcagttctttatcagggctggcagacggtgttgaagacctgttggatatttcaagcgtcgatagactatcatttatcagacagtctagtaaggttaaatttacttccgctgtcaagctgagcgaaggcggaccagggagcggcatggaaaatggacgtgacgaggaagaaaatttcttcaagcgtctcggatgccacagcttcgatgatcacctcagcccaaatcaggacggaggaaaaagcaagaacgtggtaaacctgggcgctatacgccagggtatgaagcggttccagtttctgttgaattgttgcgaacccgggactatcccagacgcgtctatcctggcggctgctctggatctcgaggcaccggtggttgccagggctgccctttttctcgaatgcgcgagattcgtacatagatgtaatagaggcaactggcccgagtggatgaagggacaccatgtgaatattacaaagaaggggcttagtagaggaaggtctccaatcgttggtaataagcgcaaccaaaaactgcaatggaacgcggcaaagctgttttaccagtggggtgatgcaatcggagtgaggttgaatgagctgtgtcatggagaatccgagagccccgccaacttattaggactaatttatgacgaagaaacgaagcgcaggctgcggaaagaggatgaagaggaagactttttagacgactcaaccgtgaacccgtcgaaatgcggctgtcctttcgccctgaaaatggctgcttgccaactccttctggaaattacaactttcctccgggagactttctcctgcttacccaggccacggacggagccgttagtggatctggagagctgccgtctcaggctagacccagagttggacagacaccgttacgagagaaaaatctctttcgctggggtgttggatgagaatgaagattcaaaagacagtttgcattctagcagtcacacacttaagtctgacgctggcgtggaagagaagaaggagggctctccatggtcagcgtccgagccaagtatagagcctgagggaatgtccaatgccggtgccgaagagaactaccacaggaacatgtcctggctgcacgtgatgatcctactatgcaatcagcagtctttcatatgtacacatgtggattattgtcacccacattgctatctgcatcactcccgcagttgcgccaggttagttcgagccatcaaattgctgtacggcgacagcgtggactctctgcgagagtcaagtaatatttctagcgttgccctgagagggaagaaacaaaaagaatgtagcgacaagagctgcttaaggacgccatctctgaagaagcgggtgtcggacgcaaaccttgaggggaagaaggatagtggaatgttgaaatatatccgtctacaggtcatgtccctgagccccgctccgttgtcactgctcattaaagctgccccgatcctgacggaggaaatgtacggcgatattcaaccagccgcctgggaattgcttctgtctatggacgagcacatggctggcgcggcagccgcaatgtttctgctctgcgccgtgaaggtgcccgaggcggtgagtgatatgctcatgtcggaatttcaccaccccgagacagtgcagaggcttaatgcggttcttaaattccacactctgtggcggttccgataccaggtatggccccgcatggaagaaggcgcccagcaaattttcaaaatcccaccaccttctattaacttcaccctccccagccctgtcctgggaatgcccagtgtcccgatgttcgatccgccgtgggtaccacaatgcagcggctctgtacaagacccaatcaatgaggatcagtccaagagtttcagcgcccgggccgtgtcaaggtcacaccaaagagctgagcatattctcaaaaatctccaacaagaggaggaaaagaagcggcttggccgcgaggccagcctgatcaccgcaatacccatcacacaggaggcctgttatgagccaacgtgcacgcctaattctgagcccgaggaggaagtggaagaagtcaccaacctagcctctaggagattgtccgtgagtccatcatgcacgagctctacatctcaccgaaattactcctttcgccgggggtctgtgtggtcggtcaggtctgccgtctcggcagaggacgaagagcacactaccgagcacactcctaaccaccacgtaccccaacctccccaggccgtattccctgcctgcatctgcgccgccgtgctacccatcgtgcacctcatggaggatggagaggtccgggaagacggcgtggctgtttctgctgtggcccaacaggtcttgtggaattgcctgatcgaggatccctcgaccgtcctgagacactttctggagaaactgacaatttcaaataggcaggacgagctgatgtacatgctgagaaagctgctgttaaacattggcgattttcctgcccagacttctcatatcctgttcaattacctagtaggcttaattatgtactttgtgaggacaccttgtgagtggggaatggatgccattagtgctacccttaccttcctgtgggaggtagttggttatgttgaaggcctgtttttcaaagacctaaagcaaacaatgaagaaggagcagtgcgaggtgaagctgctggtgacagcatctatgcccggcacaaaaactttagtcgttcacggacagaatgagtgcgacataccaacgcagctgcctgtgcacgaggatacccagtttgaggcacttttaaaagagtgcttggagttttttaacatccccgagtcccagagcactcactattttcttatggataagagatggaatcttattcattacaataaaacctatgtaagagatatttacccctttcgacgctccgttagcccacagttaaatttggtacacatgcaccctgaaaagggacaggaactcatccaaaagcaggttttcactagaaagttggaagaggtgggacgtgtactgttcctcatctcgctcacacaaaagatacccaccgcacacaagcagagccatgtgagtatgctgcaggaagacctgttacgactgcctagcttcccgcgatccgcaatagacgctgaattttctctgttctcagatcctcaggccggaaaagaactcttcggcttggatactctccagaagtcactgtggattcagctcctggaggagatgtttctcggtatgccgagcgagttcccatggggcgacgagattatgcttttcctcaacgtatttaacggcgccctaattttgcatccggaggacagtgcactcctgaggcaatatgcagccactgtgattaataccgcggtgcattttaaccacctattttcattatctggataccagtggattctccctaccatgctccaagtttacagcgattatgaatcaaatcctcagctgaggcaggccatcgaattcgcttgtcaccagttctacattctgcatcggaagccgttcgtgctgcagttattcgcaagtgtcgccccactgttggagtttcctgacgccgcaaacaatggaccttctaaaggtgtgtctgcacaatgtctgttcgatctgctccagagcttggaaggcgaaacaacagatattctcgatatcctggaactggtcaaagccgagaagccactcaagtctttggatttctgctatggaaatgaagatctgacattttccatctccgaggccattaaactctgcgtaactgtggtggcatatgccccagaaagttttagatcactccaaatgctcatggtgcttgaggcactggttccatgctatttacagaagttgaagaggcagacctcgcaagtggagaccgtccccgccgcaagagaagagatcgctgccacggcggccctcgccacaagcctacaggctttactgtattccgtggaagtactgactcgtccgatgacagctcctcagatgtctagatgcgatcaaggccataaaggtaccaccacggccaaccataccatgagctcaggagtgaatacacggtaccaggagcagggcgccaagctgcatttcatcagagaaaatctgcacctcctcgaagaggggcaggggatcccgcgggaggagctggacgaacgcattgcccgggaagaattccgtagacctcgtgagagcttactcaatatttgtaccgagttctacaagcactgtggacctcggctcaaaattttgcaaaatcttgcaggtgagccccgggtgatcgctctcgagttattggacgtaaaaagccacatgcgcttggccgagatcgcccatagtctgctaaagctggctccttacgatacacagacaatggaatccagaggcctccgaaggtacattatggaaatgcttccaataaccgactggaccgctgaggccgtacgtcctgctctgatactcattctcaaacgccttgacaggatgttcaacaaaatccataaaatgcccactctccgtcggcaagttgagtgggaacctgcgtccaatttgattgagggcgtgtgtttaacactccagcgccagccaatcatttcttttctcccccatctgcgcagtctgattaacgtttgtgtgaacctggtgatgggggtggtgggtccgagctccgtggcagacggcctacctttgctacatctgagcccttatctgtcgcccccacttcctttcagtactgctgtcgtacgactggtggccttgcagattcaagcactcaaggaagactttccactttcacacgtcatctcaccgtttaccaaccaggaacggagagaaggaatgctcctgaacctcctcattccatttgtgctcactgtcgggtcaggttccaaggacagcccctggctggaacagcctgaggtacagcttctgttgcagactgtgatcaatgttctcctgccccccaggatcatcagcacttcgagaagtaagaactttatgctcgaatcttcccccgcccattgtagcacccccggcgacgccggcaaagatttgcgtcgcgagggcctggccgaaagcacaagtcaggctgcatacctcgctctgaaggtaattctggtctgcttcgagcggcagctaggaagtcaatggtattggttgtctttacaggtgaaagaaatggcacttcgcaaggttggtgggctggcactgtgggacttccttgatttcatcgtgaggacacgaataccaatatttgtgttgcttagaccattcatccaatgtaaattactcgcacagccggcggagaatcacgaggagctttcagcgcgccaacatatagcagaccagttggaaaggaggtttattccacggcccttatgtaaaagttccttaatagccgaattcaacagtgaactgaaaatcttgaaagaggcagtccactccggcagtgcctaccagggtaaaaccagcatctcaactgttggtacaagtacgtcagcctaccgactgtccttagctactatgtctcgtagcaacaccggcacagggacagtgtgggaacaagatagtgaaccatcacaacaggcatcgcaagatacactgagtcgcaccgacgaagaggacgaggaaaatgattccattagcatgccatcagtagtcagcgagcaggaggcatatctcttatccgccataggcagacgacgcttctcttcacacgtgtcaagcatgagcgtgcctcaggctgaggtggggatgcttccgtcccagcgcgtggcctcgattcagtcagaaccaggccagcagaatctattagtgcagcagcctctcggtaggaagagaggactgagacaactgcggaggccactcctgagccggcagaaaacacagaccgagccaaggaatagacagggagcccgactgtctacaacgcgtcgcagcatacagcctaaaaccaagcccagcgccgaccagaagcgaagcgtaacattcattgaggctcagcctgaacccgctgccgctcccactgatgctctcccagctactgggcaattgcagggatgctctccggccccttctcggaagccagaggccatggatgagcctgtacttacttcctcccctgcaatcgttgtggcagacctgcacagtgtgtcgcccaaacagagcgagaacttccctacagaggagggagaaaaggaagaagacaccgaggcccagggcgccacagcccattctccgttgtccgcacagctgagcgacccagatgactttaccgggctggagacgtcaagtctattgcagcacggcgataccgtcttgcacatttctgaggaaaacggaatggagaacccactgttaagtagtcagtttacatttactcccaccgaactcggtaaaaccgacgctgtcctagacgaatctcacgtgtag

SEQ ID NO: 210888 - DNA, 9777 bp, synthetic construct
  misc_feature 1..9777: note = Description of Artificial Sequence: Synthetic coding sequence
  source 1..9777: mol_type = other DNA
atggtgaagcggaagagcagcgagggccaggagcaggacggcggcaggggcatcccactgcccatccagacttttctgtggagacaaacgagcgcatttttgcggcccaagctgggtaagcaatatgaggcgtcttgcgtttcgtttgagcgggtgcttgtggaaaataagctgcacggcctcagtcccgcattgtctgaggcgattcagagcataagtaggtgggagctggtccaggccgctctgcctcatgtgttacactgtactgccacactcctgagcaacaggaacaagttggggcaccaggataaactgggggtagcagagacaaagctgctgcacacacttcattggatgcttttggaggctcctcaggactgcaacaatgaacggtttggagggactgatagaggctccagctggggaggatcctccagcgcatttattcatcaggttgagaaccagggaagcccaggccagccatgccaatcttctagcaatgacgaagaagagaataataggaggaagatttttcagaacagtatggccactgttgagctgttcgtctttctttttgccccactcgtccacagaattaaagaaagcgatctgacatttcgcttggcttccggcctggtgatttggcagcccatgtgggagcaccgccaaccaggggtgagtggtttcactgctcttgtaaaaccgattcggaacatcataacagcaaaaagatcttctcctatcaactcccagtccaggacctgcgagagccctaaccaagacgcgcggcacctcgaagggctgcaagttgtctgcgagacctttcagtccgacagcattagccccaaagctactatctctggatgccaccggggaaattctttcgacggttctctgtcatctcagactagccaggagcgtgggccaagtcattcacgcgccagcctggtcatccccccttgtcagcgaagccgttacgctacatactttgacgtggcagtgttacgatgtttgctacagcctcactggtccgaggagggtacccagtggtcactcatgtattatctgcaaaggctgagacacatgcttgaagagaagccagaaaaacccccagagcctgacattccactgttgcccaggcctagatcctcctctatggtcgccgccgcccctagcttagtgaatacccacaaaacgcaggacctcaccatgaagtgtaacgaggaggaaaaaagtctgtcttcggaggccttcagcaaagtgagtctgacgaacctgcggcgatccgcggtgccggacctgtctagcgatctagggatgaacatattcaaaaagttcaagtctcgcaaggaggatagagagcgaaagggctctatcccattccaccatacaggcaaacgtagaccaaggcgtatgggcgttccattcttgctgcacgaggatcatctcgatgtgtcaccgacgcggagtacattctccttcggcagttttagcggactgggagaggaccgccggggtattgagaagggaggatggcagacaaccattctgggaaaactgaccagaaggggctcctcggacgcagcaaccgagatggaatcactctccgccaggcattcacattcccatcataccctggtctccgatctccccgatcccagcaactcccacggtgagaatactgtgaaagaagtgagatcacagattagtaccataaccgtagctacctttaatactactctagctagctttaacgtgggctacgccgactttttcaacgagcatatgaggaagctctgtaaccaggtccccatcccagaaatgcctcatgagcctcttgcctgcgccaacctcccccggtcccttaccgatagttgcatcaattattcatacctggaagatacagagcatatcgatgggaccaacaattttgtgcacaagaatggcatgttagacctgagtgtcgtgttgaaggccgtatatctggtgctgaaccacgacatatcatccagaatttgcgatgttgcattgaatatcgtagagtgcctactgcagctgggggtcgtgccctgcgttgagaaaaatcgaaaaaaatcagaaaacaaagaaaacgagacacttgaaaagagaccctcagagggcgctttccaattcaagggcgtgtctgggagctccacatgtggttttggcggacccgctgtgagcggcgcgggagacggcggtggggaggaggggggcgggggtgatggcggcggagggggcggagatgggggggggggagggggaggcggcggagggccttacgagaagaacgacaaaaatcaagaaaaggacgagagtactcccgttagcaaccaccggctggccctgacgatgctgatcaaaattgtgaagtcactggggtgtgcctacggatgtggcgagggacatcgagggctctccggcgacagactgcggcaccaggtcttcagagaaaatgctcagaattgtttaaccaagctgtataagctggacaagatgcaatttaggcagactatgcgggactatgtgaacaaggactccttgaataacgtcgtcgacttcctgcacgcactgctgggattttgcatggagcccgttaccgataacaaagccgggttcgggaataacttcactaccgtggataacaagtctacggcacagaatgtcgaaggtatcatcgttagcgctatgttcaaaagtctgatcaccagatgtgcctccactactcacgagctccattcccccgaaaatctggggctctactgcgacatcagacagctcgtgcaattcattaaagaagcccacggcaatgtcttcaggagggtcgctttgtcagcactgctcgacagtgctgaaaagctcgcacctggcaagaaggttgaggaaaacgaacaggaaagcaagcccgctggatctaaaaggtctgaggcggggtccatcgtggacaaagggcaagtttcttccgcgccagaggagtgtagaagcttcatgtccggccggccatctcagacccccgagcacgatgaacaaatgcagggcgctaatctaggccggaaggatttctggaggaagatgttcaagagccagtccgcagccagcgatacctcaagtcaatccgagcaggatacttcagaatgcacaacagcccactccgggacaacgagcgatcgtagggccagaagcagaagtcggagaatctctcttcgtaaaaagttaaagcttcccattggtaagcgaaattggctcaagcgctcatcactgagtggcctcgcagatggggtggaggatctgctggacatctcaagcgtcgacaggctgtcatttatccggcaaagttccaaggtcaagtttaccagcgctgtcaagcttagtgaagggggccctggatcaggaatggagaacggtcgggacgaagaggagaattttttcaagaggctgggctgccacagcttcgatgaccacctgtcacctaaccaggacggggggaaatccaagaacgttgtgaatttgggagcgatacggcagggcatgaaacgattccagtttctgctgaactgttgtgaacccggcaccataccggacgcttctatcttggctgcggctttggacctcgaagccccggtggttgcacgggccgccctgtttctggaatgtgcgcgctttgtgcaccggtgtaaccgcgggaattggcctgagtggatgaaggggcatcatgtcaacattactaagaagggactgtcccgcggaaggtcgcctattgtggggaataaacggaatcagaaacttcagtggaatgcggccaaactcttctaccaatggggggacgccattggagtccgattgaacgaactctgtcatggcgaaagtgagtcaccagccaatctcctgggactaatttacgatgaggaaactaagaggaggctcagaaaagaggacgaagaagaagacttccttgatgacagcactgttaatccatcgaaatgcgggtgccccttcgcattgaaaatggcagcttgccagctgctcttagaaattactactttcctgcgcgagacattctcttgcctgccacgaccaaggaccgagcccctggtagatctggaatcttgtaggctgcgattggatcccgagcttgacagacatcgctacgagaggaaaatctcattcgccggagtgctagatgaaaacgaggatagcaaagattcattacactccagctctcatacactcaagagcgatgctggagtcgaggaaaagaaggagggtagtccatggtcagcttctgagccttcaattgaaccagagggcatgtctaatgccggagctgaggagaattaccaccgtaacatgtcttggttacatgtgatgattctcctgtgtaaccagcagtccttcatctgtacccacgtagactactgccatccccattgttatctccaccatagcaggagttgcgcacggcttgtgagggccataaagctgttgtacggagacagtgtagacagcttgcgtgagtccagcaatatcagctctgttgctttgcgaggcaagaagcaaaaggagtgcagtgacaaaagttgtctgagaactcccagcctgaaaaagagagtatctgacgccaatctggaggggaagaaagatagcgggatgctcaaatacattagattgcaggtgatgagcctctccccagctccactatcacttctgatcaaggcagccccaatactgaccgaggaaatgtatggagacatccaacccgcagcctgggaactgctgctgtcaatggacgagcacatggcaggcgccgccgccgcaatgtttctgctgtgcgcagtaaaagtcccagaggcagtctccgatatgctcatgagtgaattccatcaccctgaaactgtccagcgccttaacgcggttctcaagtttcatactctgtggagatttaggtatcaagtctggccccggatggaagagggcgctcagcagatctttaagattccacctccctctatcaactttacccttcctagtcctgtacttggtatgccttctgttcccatgttcgatcctccctgggtgccacagtgttccggctcagtgcaagaccctatcaatgaggatcagagcaaaagcttcagtgccagagccgtgtcaagatcccaccagagagcagaacacattctgaagaatctccagcaagaggaggagaaaaaacgtcttggccgtgaagcctctctgattacagctattccgataacacaggaggcctgttatgaacctacatgtaccccaaactccgagcccgaagaggaggtggaggaagttacaaacctcgcaagtagaagattgagcgtctctccatcttgtacatccagcacctcccataggaactattcattccggagggggtccgtgtggtctgtgagatctgccgtctcagccgaggacgaagaacacaccacagagcatacgcccaatcaccatgtcccacagccccctcaagccgtattccctgcgtgtatttgcgctgccgtgctgcccatcgtccacctgatggaggatggcgaagtgagagaagatggcgtggcagtgtccgctgttgctcagcaagtgttgtggaattgtttgatcgaagatccgagtactgtcctccgtcactttctggagaagctgaccatcagcaatagacaagacgagctgatgtatatgctgcgcaagttattgctaaatatcggagacttcccggcccagaccagccatatcctgttcaactatctggtcggccttatcatgtatttcgtgcggaccccatgcgagtggggtatggatgccatctccgcaaccctgaccttcttatgggaggtcgtgggttacgtggaaggcttattctttaaggatctcaagcaaacaatgaaaaaggagcagtgtgaggtcaagctgttggttacagcttccatgccaggcaccaagacactcgtagtgcatgggcaaaacgagtgtgatatccccactcagcttccagtgcatgaggacacacagttcgaggctctcctgaaagaatgtctcgagtttttcaatatccctgagtctcaatcaacccattattttctgatggacaaacggtggaacctgatccattataacaagacctatgtgcgggatatatacccgttccggcgcagcgtgtctccgcagctcaacctcgtgcacatgcaccccgaaaagggccaggagctcatccaaaaacaggtgtttacacggaagttggaggaagtgggtagagttcttttcttgatttcgttaacccagaagattcccacggcccacaagcaaagccacgtgtccatgcttcaggaggaccttctgagattgccttcctttcctagatcagccattgacgctgaattttcactattctcagaccctcaggccggcaaggaactgtttggactcgacaccctccagaagtcactgtggattcagttgctcgaggagatgttcttgggcatgccctctgagttcccatggggggatgagattatgctctttcttaatgtgttcaacggggcactcatcttgcatcctgaggactccgcactgctgcggcagtacgccgccacagtgattaacaccgcagtgcattttaaccacctcttcagcttgagtggctaccaatggatccttccgactatgctccaagtgtacagcgactacgaaagcaacccccagctccggcaggccatcgagttcgcctgccatcagttttatattctccatcgtaagcctttcgtactacaactcttcgcctctgttgcccctctgttagaattccctgatgctgctaataatggaccaagcaaaggcgtatcggcacagtgtctgtttgatctgcttcagagccttgaaggtgagaccaccgacatcttagatatactggagttagtaaaggccgaaaagccactcaaatccctggacttctgttacggcaacgaagacctgacctttagcattagcgaggctattaagctgtgcgttacagtggttgcttacgctcctgaaagctttaggagcctccagatgctcatggtcttagaagccctggtgccctgctacctccagaagctgaaacgacagacttcacaggtcgagacagtgcctgccgcccgggaagagattgccgctacggctgcacttgccacaagccttcaggccctgctgtacagcgtagaggtcttaacaagaccgatgactgcaccccagatgagcagatgcgaccagggccataagggaacaacaactgctaatcatactatgagctcaggggttaatacccgataccaggagcagggcgctaaacttcacttcattagggaaaacttgcatttacttgaggagggtcaaggaataccacgagaggagcttgatgagagaatcgctcgggaggagtttcggagacccagggaatctctgctgaacatttgcaccgaattctataaacactgcggacccaggctgaagattctgcagaatctggcaggagagcctagggtgatcgccctcgaactccttgatgtgaaaagtcatatgcgcctcgcagagattgctcatagtctccttaagttggctccctatgatacacagaccatggagagtcgagggcttcggagatatataatggaaatgctacccattacagattggacagcggaggccgtgcgcccagccctcatactcatcctgaagaggctcgatagaatgttcaataagatacacaagatgccgaccctgcggcgacaagtggagtgggagccagccagcaacctaatagaaggagtgtgtcttaccctccagcggcagcccatcataagtttcttgccccacctgaggtccttaattaacgtgtgtgtgaacctggttatgggtgttgtgggcccgagcagtgtcgcagatggactacccttactccacctgagcccttatctcagccctccgctcccatttagcactgcggtggttcgcctcgtcgccctccaaattcaggctctcaaggaggacttccccctaagtcacgttatcagcccctttaccaatcaggaacggagggagggaatgctgctgaacttgctcattcctttcgtattgaccgtgggatcaggttccaaagatagcccttggctggaacaacccgaagtgcagctcctgttacagaccgtgattaacgtcctgttacccccacggattatctccacgtcaaggagtaaaaacttcatgttggagagtagccctgcccattgttcgacacccggcgatgcaggaaaagatctgcgcagagagggtctggcagaatccacctcccaggcggcctacctggcgctgaaggtcattctggtctgtttcgaacgccagctgggcagtcagtggtactggctgagtctgcaagtgaaagagatggccctcagaaaagtgggcggcttagccctgtgggatttcttggactttattgtacgaacccgaattccaatctttgtgctgctgcgccctttcattcaatgtaagctcttggcccagcccgctgagaaccatgaagagttgagcgcgagacagcacatcgcggaccagctggagcgtcggtttattcctcggccactctgtaagagttcactgatcgcagaatttaattcagaactgaagatcctgaaagaggccgtccatagtggcagcgcctaccagggtaagacttctattagtaccgtagggacctccacatcagcatacagactttcactggctacaatgagccgctccaacacaggtactggaaccgtttgggagcaggactcagaaccgtcacagcaggctagtcaggatactctgagtcggacggacgaggaggacgaggagaacgactccatatcaatgccaagcgtggtatctgagcaggaagcttacctactgtccgccattgggaggagaaggtttagttcccacgtgtcaagtatgtcagtgccccaggctgaggtcggtatgttaccgagccagtcagaaccaaatgtacttgacgatagccaggggctggccgccgagggcagcctttctcgcgtagcatccattcagtctgaacccggtcagcaaaacctgctcgtgcagcagcccctcggtaggaagagaggactccgacagcttcgtcgcccactcctgtcacgccagaaaacacagactgaacctagaaatcggcaaggtgccaggttgtcaacgactcgcaggagtatccaaccgaagaccaaaccttcagcagatcaaaaaaggtctgtcactttcattgaggctcagcccgagcctgctgcagcaccaaccgacgccctgccggctaccggccaattgcaaggctgttctcccgctcctagcaggaaaccagaagctatggacgaacccgtgctcacctctagtccggccatagttgtcgctgatctgcactcggtttcacctaagcagtcagagaactttcctacagaggaaggggagaaggaagaggatactgaagcacagggcgcaaccgctcattcgcctctgagcgctcagctgagcgaccctgatgacttcacgggcctggagaccagcagcctgctgcagcatggggatactgtcttgcacattagcgaagaaaacggcatggagaaccctctgctaagtagtcaattcacctttacaccgacggaacttggcaagaccgacgctgtgcttgacgaatctcatgtctag

SEQ ID NO: 210889 - DNA, 1401 bp, synthetic construct
  misc_feature 1..1401: note = Description of Artificial Sequence: Synthetic coding sequence
  source 1..1401: mol_type = other DNA
atggagagccggggcctgcggcggtacatcatggagatgctgcccattactgactggactgccgaggctgtgaggccggctttaatactaattctgaaacggctggaccgaatgttcaataagattcataaaatgcccactctacggcgacaagttgagtgggagcctgcatccaacttgattgaaggagtttgtctgactcttcaaagacagcccattataagtttcttgccccatctgaggtcactgataaacgtttgcgtgaacctcgtgatgggagttgtggggccttcttcggtagcggacggactccccctgctccacctcagcccatatctgagcccccctctccccttcagcacggccgtagtgcgcctagtggctctccagatacaggcattgaaagaagatttccccctttcacacgtgattagcccctttactaatcaagagaggagagaaggaatgcttctgaatctcctaatcccctttgtcctcactgtgggttcgggatccaaggactccccctggctggaacagcctgaagtccaactgttactgcaaacggttatcaacgtgctgctcccaccccggataatttcaacgtccaggtcaaagaactttatgctcgaatctagtcccgcccactgctcgacaccaggggacgccgggaaggacctgagacgcgagggattggctgagtctacctcacaggccgcctatcttgccctcaaagtcatcctagtgtgctttgagcggcagctcggcagccaatggtactggctgtcacttcaagtgaaagaaatggcactcagaaaagtaggcggcctcgcactgtgggactttctggattttattgtgcgaacccgaattccaattttcgtgttactgcgccccttcattcagtgcaaattattagcacagcccgctgaaaaccatgaagagttgagcgcccgacaacacatcgcagaccagttagaaaggaggttcatacctcggcctttgtgcaagtcttctctaattgccgagttcaattccgaactcaagatcctcaaagaggccgttcattcagggagtgcttatcagggaaaaaccagcatttctaccgtgggtacatccacatctgcatataggttgtctctcgcaaccatgtcccgctctaatacaggaactggaactgtgtgggaacaggacagcgaacctagccagcaggctagtcaggacaccctatcccgaacggacgaggaggacgaggaaaatgatagcatctcaatgccctctgtcgtgagcgaacaggaagcctatctgttgtccgccatcggacggcgccggttctcctctcacgtctcgtctatgagcgtgccgcaggctgaggttggcatgcttccgagtcagcgctag

SEQ ID NO: 210890 - DNA, 786 bp, synthetic construct
  misc_feature 1..786: note = Description of Artificial Sequence: Synthetic coding sequence
  source 1..786: mol_type = other DNA
atggccagccagctgcagaaccggctgcggagcgccctggccctggtgacaggcgcaggctccggcatcggccgtgcagtgagcgtacgccttgcgggggaaggcgcaacagtagcggcatgcgacctggaccgggccgccgctcaggagaccgtgaggcttttgggaggacctggcagcaaggagggtccacctcgcgggaaccatgctgctttccaggccgacgtgtcggaggcccgcgccgcacgatgcctgttggagcaagtgcaggcctgcttctcccgtcccccttcagttgtcgtgtcctgtgctggcattacacaggacgaattcctcctccacatgtccgaagatgactgggacaaggtgatcgcagtgaacctaaaaggcaccttcctcgtgacccaggccgccgcccaagcacttgtttcgaacgggtgcagggggagcatcattaatatctctagcattgtgggaaaagtcggaaatgttggccagacaaactacgccgcatccaaagcaggagtgattggcctgacacagacagctgccagagagttgggacggcatgggatacgctgtaactccgttcttccggggtttatcgctaccccaatgacccagaaagtgccccaaaaagtggtcgataagattactgagatgatcccgatgggccatctgggggaccctgaggacgtcgcagacgtagtggcatttctggcatcagaggattctggctacattaccggaacctctgtggaagtcaccggggggctgtttatgtag

SEQ ID NO: 210891 - DNA, 1248 bp, synthetic construct
  misc_feature 1..1248: note = Description of Artificial Sequence: Synthetic coding sequence
  source 1..1248: mol_type = other DNA
atggaccggagcctgcggaacgtgctggtggtgagcttcggcttcttgctgcttttcaccgcctacggagggcttcagtcccttcagtcttctctgtatagcgaagaaggtctgggtgtgaccgcactctctaccctgtatggcggcatgctgttgtcatctatgtttttaccccccttattgatcgaaagactggggtgtaagggaaccatcatactgagtatgtgcgggtacgtggcctttagcgtgggaaatttcttcgcctcttggtacaccttaatccctactagcattctgctggggttgggcgcagcacctctgtggtcagcccagtgtacatatctcacgatcactggaaatacgcacgccgaaaaggcgggtaagcgggggaaagacatggtgaatcagtattttggtatcttcttcctgatcttccagtcatccggagtgtggggaaacctgatcagctcactggtgttcggtcagacaccgtctcagggatctggggtgctggctgttctgatgatagccgcctttctgcagccaatacgcgacgtgcagcgggagtctgaaggcgagaaaaagtcagtccccttctggagcacactcctgtccacgtttaagctataccgtgacaaaagactttgtctgctgattttgctgccactatattcagggctgcagcagggcttcctgtcatcagaatacaccagatcctacgtgacctgcaccctcgggatccagtttgttggctatgtgatgatatgtttcagcgcaaccgacgctttgtgtagcgtgctgtatggcaaggtgtctcagtacacggggcgagcagtgctttacgtccttggcgcagttacacatgttagctgcatgattgcattgttgttgtggagacccagagccgaccacctcgccgtctttttcgttttctctggcctctggggagtggccgacgcggtttggcagacccagaacaacgccctttacggagtgctgtttgagaagtccaaagaggctgctttcgccaactacagactttgggaagctctgggcttcgtaatcgccttcggatatagtatgtttttgtgcgtacacgtgaagctttacatattactgggggtgctgtccctgaccatggtcgcttatggactggtggaatgtgtggaatccaaaaacccgatccgaccccatgcgcccggtcaggttaaccaggctgaagatgaagaaatacaaacaaaaatgtag

SEQ ID NO: 210892 - DNA, 435 bp, synthetic construct
  misc_feature 1..435: note = Description of Artificial Sequence: Synthetic coding sequence
  source 1..435: mol_type = other DNA
atggaccggagcctgcggaacgtgctggtggtgagcttcggcttcctgttacttttcactgcctacggaggattacagagcctccagtcaagcctttatagcgaagaaggactgggggtcacagctctttcaacactgtacgggggcatgcttctgtcaagcatgtttctaccacctctgctcatcgagaggttagggtgcaaaggaactatcattctatcaatgtgcggttatgtcgccttcagtgttgggaacttcttcgcatcatggtacactttaattccaacatcgatcctgctcggactgggagccgccccactctggagcgcccaatgtacatacctgactatcacaggcaatacccacgcagagaaggcggggaagagagggaaagacatggtgaatcagtacttcggcatctttttcctcatttag

SEQ ID NO: 210893 - DNA, 1545 bp, synthetic construct
  misc_feature 1..1545: note = Description of Artificial Sequence: Synthetic coding sequence
  source 1..1545: mol_type = other DNA
atgagccggtggctgtggccctggagcaactgcgtgaaggagcgggtctgccggtatctgctccatcattatctcggacacttctttcaggaacatctgagtctggatcagttaagtttggacctctataaaggcagtgtggctctgcgggacattcatctcgaaatttggagtgtgaacgaagtgctggagagtatggagtcccctctggagctggtcgagggcttcgtaggatcaatagaggtggccgtgccatgggctgccctgttgacagaccactgtaccgtgagggtgtctggactgcagttaaccctgcaacctcggcgcggacctgcccctggcgccgctgattcacaatcatgggcttcatgcatgaccacttctctgcaacttgcccaggagtgtctgcgggacggcctgccggagcctagcgaaccgccacagcccctggaagggctggaaatgtttgcccaaactatcgaaactgtccttaggcggatcaaggtcacatttctcgatacagtggtgcgggtagaacacagccctggagacggtgaaagaggcgtggctgttgaggtgagagtgcagaggctggagtactgtgacgaagctgtgagagatccatcccaggccccacctgttgatgtacaccagcccccagcctttttgcacaagctcctgcaactggccggggtacgcctgcattacgaggagctgcccgctcaggaagagccccccgaaccaccgctgcagattggttcctgcagcggttacatggagctcatggtgaagctgaagcagaacgaagccttccccggaccgaaactagaagtggccgggcagctgggctctctccatctcttgctcacccccagacagctgcaacagctccaagagctgctcagcgcagtgtcccttacagatcacgagggattagcagataagcttaacaagagtcggcccctcggcgcggaagatctctggctgatcgaacaagatctgaatcagcaactgcaggccggggcggttgccgagcctctgtctcccgaccctctgacaaatcctttgcttaatctcgacaacaccgacctatttttttccatggcagggttaacatcaagcgtggcatcagcactgtccgaactttccctttccgacgtcgacctggcctctagtgttaggagtgacatggcctcccggcgattgtccgctcaggccaggcccggactagctctgcaggggatggccacggtcaaagatgccttccccgcttgcccactgcctatttgttgcgaacgcggcgcttcccttccctggggtttaagccctggcagcgctttatttctccgcggagagcgaactctgcccctcccaaggcccgggcccacactgctgccttctccccggactgaggccttcggaccttcagatccgatcccgctgtcccaggttagcttctgcgtgtggggcgaagaaggtatgatctcggtctggtttgacgtgctgtttctctcctccgtgagcgcatgggtatcagtctgttag

SEQ ID NO: 210894 - DNA, 924 bp, synthetic construct
  misc_feature 1..924: note = Description of Artificial Sequence: Synthetic coding sequence
  source 1..924: mol_type = other DNA
atgggcggcctgaccgccagcgacgtgcaccccaccctgggcgtgcagctgtttagcgccggaatcgcagcgtgcctggccgacgtcatcacttttccactggacaccgctaaagttcggctacaagttcagggcgagtgtcctaccagctcagtgatacggtataaaggggtgctgggaaccatcaccgcggttgttaaaacagaaggcaggatgaagctttattccgggctgcccgcagggcttcagcgtcagatctctagtgcgagtctgcggatcgggctctacgacactgtccaggagtttttgacagccggaaaggagaccgccccttcacttggatctaaaatcctcgcaggactgaccacaggtggggtcgcggtgtttattgggcaaccaaccgaggtcgtaaaagttcgccttcaggctcagagccaccttcatggtattaaacctaggtatacagggacatacaacgcatataggatcattgcaaccactgaaggtctgactggtttatggaagggtacaacgcccaacctgatgcgaagcgtcattatcaactgtactgagctcgtgacttacgacctaatgaaggaagccttcgtgaagaacaatatcctggccgacgacgttccctgccatctcgtgagcgctctgatcgcaggcttttgcgcaacagccatgagctcacccgtggatgttgtaaaaacacggtttataaatagtcctccaggccagtacaaaagtgtgcccaactgtgctatgaaagtctttaccaacgagggtcccaccgctttttttaagggccttgttccctctttcctgaggcttggtagctggaacgttatcatgttcgtgtgctttgagcagttaaaaagagaactgagcaagtcacgccagacaatggattgtgccacctag

SEQ ID NO: 210895 - DNA, 930 bp, synthetic construct
  misc_feature 1..930: note = Description of Artificial Sequence: Synthetic coding sequence
  source 1..930: mol_type = other DNA
atggtgggcttcaaggccaccgacgtgccccccaccgccaccgtgaagttcctgggggccgggaccgcagcttgcatcgcagatctgattacattccctctggacacagccaaagtgcgccttcagatccagggcgaatcacagggaccggttcgagccaccgcgtctgcacaatatcgaggcgtaatgggtacgattttgacaatggtgcggaccgaaggccccaggtcactgtataacggcctggtggccgggcttcaacgccagatgtcattcgcatctgtacgcattggcctctatgattccgtgaagcagttctacacaaaaggcagcgaacacgctagcattggctcgaggttgcttgctgggtcaacaacaggtgcgttagccgttgccgtggcgcagcccactgatgtggtgaaggtgcgttttcaggcccaggcaagagctggcggcggaagaaggtatcagagcaccgtgaacgcctacaagacaatcgcgcgtgaagaggggttcaggggcctgtggaaggggacatcccccaatgtggctaggaatgctatcgtaaactgcgctgagctggttacatacgatctgattaaggatgcgcttctgaaggcgaatctgatgaccgatgatcttccctgccatttcacatcagctttcggcgccggattctgtaccactgtgatcgcctcgcccgtggacgtcgtcaaaactcggtacatgaatagcgctcttggtcagtattcctctgctggacattgcgctctgactatgctccagaaggagggccctcgcgctttttataaaggctttatgccttccttcctgaggctgggatcatggaatgttgtgatgtttgtgacttacgagcagttaaaaagggcgctgatggcggcatgtacatcacgggaggctcccttctag

SEQ ID NO: 210896 - DNA, 102 bp, synthetic construct
  misc_feature 1..102: note = Description of Artificial Sequence: Synthetic coding sequence
  source 1..102: mol_type = other DNA
atggtgggcttcaaggccaccgacgtgccccccaccgccaccgtgaaattcctgggagccggaaccgctgcttgcatcgctgaccttatcactttcccatag

SEQ ID NO: 210897 - DNA, 939 bp, synthetic construct
  misc_feature 1..939: note = Description of Artificial Sequence: Synthetic coding sequence
  source 1..939: mol_type = other DNA
atggtgggcctgaagcccagcgacgtgccccccaccatggccgtgaagttcctgggcgcaggtacagctgcctgttttgccgatctagtgacctttcccttagataccgctaaagttcggctccagatccagggagagaaccaagctgtacagaccgccaggctggtccagtacagaggggtgctgggtactattctgactatggtcagaaccgaaggcccttgcagcccttataacggcctggtcgccggattgcaacgccagatgtcattcgcctcaatccggataggactctacgactctgtgaaacaagtctataccccaaagggagccgataattcctccctcacgacccgtatccttgccggatgtaccaccggggcaatggccgtgacttgcgcacagccgacagacgttgtgaaagttaggttccaggcctccatccacctcggaccaagtaggagtgaccggaaatattccggaaccatggacgcgtacagaaccattgccagggaggagggggtcagaggtctctggaagggcacactgcccaacattatgcgaaacgccattgtgaattgcgctgaggttgtcacctatgacatcctgaaagagaagctgcttgattaccatctgctcacagacaattttccctgtcactttgttagcgcatttggtgctggattttgcgccaccgttgtagcctcccctgtggacgtcgtgaaaactcggtatatgaactcgccgccaggacagtatttctcacccttagactgcatgatcaaaatggtggcccaagaaggtcccacagccttctataagggctttacaccctcctttctgagactcggatcttggaacgtggttatgtttgtgacctatgaacagctgaaacgcgcattgatgaaagtgcagatgctccgagagtcaccgttttag

SEQ ID NO: 210898 - DNA, 633 bp, synthetic construct
  misc_feature 1..633: note = Description of Artificial Sequence: Synthetic coding sequence
  source 1..633: mol_type = other DNA
atggtgggcctgaagcccagcgacgtgccccccaccatggccgtgaagtttttaggagcaggaacggcggcttgtttcgcggatctggtaacattccccctggacaccgcaaaagtaaggttgcaaatccagggtgagaatcaagccgtgcagaccgcccgattggtccagtatagaggcgtactgggaactatcctgactatggtgcgtaccgaggggccctgttctccctacaacggcctggtggctggactccaacgacagatgtcttttgcctccatcagaattggtctctatgactccgtgaagcaggtgtatactcctaaaggagcagataacaattttccttgccactttgtgtctgctttcggggctgggttctgcgctaccgtggtggcctctcctgtggatgtggtgaagactagatacatgaatagcccaccagggcagtacttcagtcccctggactgcatgatcaaaatggttgcacaggagggacctaccgcgttttacaaaggctttacccctagttttctccgcttggggtcttggaatgttgttatgtttgtcacctatgagcaactcaagcgggccctcatgaaggtgcagatgttgcgagagtcacctttttag

SEQ ID NO: 210899 - DNA, 828 bp, synthetic construct
  misc_feature 1..828: note = Description of Artificial Sequence: Synthetic coding sequence
  source 1..828: mol_type = other DNA
atggtgggcctgaagcccagcgacgtgccccccaccatggccgtgaagtttctgggtgcaggtaccgccgcttgttttgctgacctggtaactttcccactggataccgccaaggtacgtttacagatccaaggcgagaaccaggccgtccagacagctcggctggtacaatatcgcggcgtcttagggacgattctgaccatggtgaggacagagggtccctgtagtccctacaatggcctggtggccggactccaaaggcagatgtcctttgcctcaattaggatcggtctgtatgactctgtcaaacaggtctatactccaaaaggggcagacaactcatccttaactacccgtatcctcgccggctgtacaactggagctatggcagtgacctgtgctcaaccaactgacgtggtaaaagtgcggtttcaagcctccatccatttgggccccagtagatccgataggaagtatagtggcactatggatgcataccgcacgattgcgagagaagagggagtccgcggtctctggaagggcacgctgccgaacattatgcgaaatgctatcgtgaactgtgcagaagtggtcacctatgacattcttaaagagaagcttttggactaccatctattaacagataatttcccttgtcacttcgtaagcgcctttggagcaggcttttgcgctactgtggtcgccagtcctgttgacgtcgttaagactcggtacatgaatagtcctccagggcagtactttagtcccctagactgtatgattaagatggtagcccaagagggccccaccgcattttacaaaggatag

SEQ ID NO: 210900 - DNA, 291 bp, synthetic construct
  misc_feature 1..291: note = Description of Artificial Sequence: Synthetic coding sequence
  source 1..291: mol_type = other DNA
atggtgggcctgaagcccagcgacgtgccccccaccatggccgtgaaattcctcggcgctggcaccgctgcttgcttcgctgatttggtgaccttcccactcgatacagctaaggtgcgcctgcagatacagggtgagaaccaagctgtccagaccgcccggcttgttcaataccgaggcgtgctcggtacaatactgactatggtgcgcacggaaggaccttgtagtccctacaacggcttggtggccggtctccagcgccagatgtcattcgcgtccataaggatttag

SEQ ID NO: 210901 - DNA, 1026 bp, synthetic construct
  misc_feature 1..1026: note = Description of Artificial Sequence: Synthetic coding sequence
  source 1..1026: mol_type = other DNA
atgctgctgcggccccggcggcccccccccctggccccccccgccccacccagcccagctagccccgaccccgagcctagaacccctggagacgctccaggcacccctccaagacgcccagcttcaccgtccgctttgggagagctggggctgcccgtatctcccggcagcgctcaacgtacgccctggtccgctcgggaaactgagcttctgctgggaactctactccagcctgcagtatggagggcattactgctggacaggcgccaggcccttcccacttacaggagggttagtgctgctctggcccagcagcaggttcgccgcacccctgctcagtgtcgcagacgatacaagtttcttaaagacaagttcagggaggcacatggccagccccccgggcccttcgatgagcagatacgcaaactcatgggactgctgggtgacaatgggaggaaaaggccacgtaggagatccccgggctcaggcagaccacagagggcccgccggccagtcccaaacgctcacgcccctgccccttcggagccagatgccacaccactgcccacggcacgtgacagggatgccgacccaacctggacactcaggtttagtccgtccccccccaagagcgccgacgcatctcctgcccctgggagtccaccggctccggctcctacagccttggctacctgcatccctgaagacagagctccggtccgtgggccaggatcccccccaccgccccctgctcgcgaagacccagactcccctccagggcggcccgaggactgtgcaccccccccagctgcccctccaagcctgaacactgcactgttgcagacgctcgggcacttaggcgacatcgccaatattttagggccactcagagaccaactcctaacattaaaccagcacgtggagcagctccggggagcctttgaccagacagtcagcctagctgtgggctttatcctgggcagcgctgccgccgaacgaggtgttcttcgcgacccctgtcagtag

SEQ ID NO: 210902 - DNA, 3357 bp, synthetic construct
  misc_feature 1..3357: note = Description of Artificial Sequence: Synthetic coding sequence
  source 1..3357: mol_type = other DNA
atgagcgtggaggcctacggccccagcagccagaccctgaccttcctggataccgaagaggccgagctgctaggggcggatacgcaaggatcggaatttgagttcactgacttcaccctgccttcccagacccagacacctcctggaggtccagggggacctggcggaggcggcgccggaggacctggcggagcaggagccggagctgccgccgggcagctagacgcacaggtcggacccgagggcatcctacagaatggcgctgttgacgactccgtcgccaagacaagtcaactgttagctgagctcaatttcgaagaggatgaagaggacacatactacacaaaagacctgcccatacatgcttgcagctactgcggcatacatgacccagcctgtgtggtctattgtaataccagcaagaaatggttttgtaacggccgggggaacacatccgggagccatatcgtgaaccatctcgtgcgtgccaaatgtaaagaagtgaccctccacaaggacggcccccttggcgaaactgtcctcgaatgctacaattgcggctgcaggaacgtatttctgctcgggttcatccccgccaaggccgatagtgtggtcgtcctcctatgccggcagccatgtgcttctcagtcgtcactcaaagatattaactgggactccagccagtggcaaccattgatccaggaccggtgctttctgtcatggctcgtgaagattccctcagagcaggagcaattgcgggctaggcagatcacagctcagcagatcaacaagctcgaggagttgtggaaagagaatcccagcgcaactctggaggacttggaaaaacctggggtggatgaagagccccaacacgtgctgttaagatacgaggacgcttaccagtatcaaaatatttttggaccccttgtcaaattggaagccgactacgataaaaaactgaaagaatctcagactcaggacaatattactgtccgctgggatttgggtctgaataagaagaggatcgcatattttactttgccaaagacggatagtgacatgaggcttatgcagggagacgaaatttgtctgagatataagggagaccttgcaccgctctggaagggcattggccatgtgatcaaggtcccagacaattatggtgatgagatcgcaattgagctgcgcagtagcgttggagccccagtcgaagtgacacataattttcaggtagatttcgtttggaagagcacgtctttcgatcgcatgcagagtgctttgaagacgttcgctgttgatgaaacatccgtttctggctacatataccacaaacttctgggccacgaggtagaggatgtaatcatcaaatgccagttgccaaagcgtttcacagcccagggattgcccgaccttaaccactcccaggtgtacgcagtgaagactgtgctgcaacgtcccttgtcacttattcaaggaccacccggcaccggaaaaacagtaacctctgctaccatcgtttaccatctggcacggcagggcaacgggcctgtgctggtttgcgctccgagcaatatcgcggtggaccagctgaccgagaagatccaccagactggactcaaggtggtgaggctctgtgctaaatcgagagaagctattgactcccccgtgagcttcctagctcttcataatcagattaggaacatggactctatgccagaactacaaaaattacaacagctgaaggatgaaacaggggaactatcctccgccgatgagaaacgctaccgagccttaaagaggaccgcggagagagagctgttgatgaacgccgatgtgatttgctgtacttgcgtgggggcgggggatccgcgcctggccaagatgcagttccgctctattctaatcgatgagtccacgcaggccactgaacctgagtgcatggtgccagtcgtgctcggcgccaagcagctcatactggtgggagaccattgtcagctcggacccgtggtgatgtgtaaaaaagcagccaaggccggtctgtcccagtccctttttgaaaggttagtggttctgggcattagacctatcaggttgcaggtgcagtacagaatgcatccagccctgagtgctttcccgtctaacattttctacgaagggtcactgcagaatggagtcactgccgccgacagggtgaagaagggatttgattttcagtggccccagcccgacaagccgatgtttttttatgtgactcaagggcaggaagaaattgcttcttcgggtacctcctatcttaaccggactgaggcagctaatgtggaaaagatcaccacaaagctgctgaaggccggcgcaaagcctgaccagatcggaatcattactccatatgagggacagcgttcatatttggttcagtacatgcagttctctggatcgctgcatacaaaactctaccaggaagtggagatcgcgtcggtggacgcttttcaaggcagagaaaaggatttcatcatcctgtcctgcgtcagggcaaatgagcaccaggggattggctttcttaatgaccctaggcggctgaatgtggcactgacacgcgcgcgctacggcgtcataatcgtgggtaaccctaaggcattgagtaagcagcccctgtggaatcatcttctaaattactacaaggagcagaaggtgctagtcgagggaccgttgaacaatctgcgggagtcgctgatgcagttttcaaagccccgcaagctggtgaacaccattaaccctggagctcggtttatgactaccgccatgtatgatgcccgagaggctataattcctgggtcagtatatgatcgaagcagccagggaagaccttccagcatgtatttccagacacatgaccagatcgggatgataagcgctggtccttctcacgtggctgccatgaatatccctatcccctttaacttggtcatgccaccgatgccaccgccaggatatttcggccaggcaaatgggcccgccgccggaagagggacacctaagggtaagactggccgcggcggtcgtcaaaaaaacagattcggtctgcctggacccagccagacaaatctgcctaattcacaggcaagccaggatgttgccagtcagccattctctcagggagctcttacgcagggctatatcagtatgagccagccgagtcagatgagccaaccagggctgagccaaccagagttgagtcaggacagttacctgggcgacgaatttaaaagccaaatcgatgtggccctttctcaggactctacttaccagggtgaacgggcctatcagcatgggggagtcactggtctttcccagtattag

SEQ ID NO: 210903 - DNA, 1740 bp, synthetic construct
  misc_feature 1..1740: note = Description of Artificial Sequence: Synthetic coding sequence
  source 1..1740: mol_type = other DNA
atgcccgccgagcggaagaagcccgccagcatggaggagaaggactcattgccaaacaataaggagaaggattgtagcgagaggcgcacagtttcgtcaaaagaacgcccaaaggatgacatcaagctcactgcgaagaaggaggtgtccaaggcccccgaagagagtaaaaaaaaggaggaggaagaaaagaaaaaacaccaggaggaagagagaaagaaacaggaagagcaggccaaaagacagcaggaagaggaggcagctgcgcagatgaaagagaaagaggaatcaatacaactccaccaggaggcctgggaacgccaccatttacggaaggagctcaggagcaagaaccagaacgcccccgattcccgacccgaggagaattttttttcgcggcttgacagctcgcttaagaaaaatacagccttcgtcaagaagctgaaaacgattaccgaacaacaacgcgactctctgagccacgattttaacgggctgaaccttagcaaatatattgccgaggctgtcgcctcgatcgtagaggccaagttaaaaatcagcgatgtcaactgcgctgtgcatctttgctctttgttccatcaacgctacgccgactttgctcctagcttgctgcaggtttggaaaaaacattttgaggcaagaaaagaggaaaagaccccaaacatcacaaagctgcgcaccgatctccggtttatagccgaacttacaatagttgggatcttcacggataaagaaggattaagcctgatatatgaacagctgaagaatatcatcaacgctgaccgagagtctcacacacatgtgtccgtggtgatttctttttgtagacactgtggcgatgacatagccggactggtgccccggaaagttaagtcagcggctgaaaaatttaacctctcattccctccttccgaaattatctcaccggaaaaacagcaaccttttcagaacctcctgaaggagtacttcacttccctgaccaagcacttgaagagggaccatcgagaactccagaacaccgaacggcaaaacaggcggatattgcactccaagggggagctctcagaagatcgtcataaacagtatgaagaattcgctatgtcctaccagaagctcctggctaacagtcagtccctggccgatctcctcgacgagaatatgccagacctgcctcaggataaacctacacccgaggagcatggacctggcattgacattttcacaccggggaagcctggcgaatacgatctggaaggtgggatctgggaggatgaggatgctaggaacttttatgaaaatttgatcgacctgaaagctttcgtgccagcaatactgttcaaagataacgagaagagctgccagaataaagagtcaaacaaggatgacactaaggaggccaaggaatctaaggagaacaaggaggtctcttctcccgatgacctggagctcgaactggaaaacttggagatcaatgacgataccctggaactcgaaggaggcgacgaggcagaagatctaactaaaaaattgctggatgagcaggagcaggaagacgaggaggccagcacggggagtcatctgaagctcattgtggatgcatttctgcaacagcttcccaactgcgttaaccgcgatctgatagacaaagccgagaaggcattctgtaatggaaacctggcccgggtgaatttactgctccgcatggccgtgaaaaagtag

SEQ ID NO: 210904 - DNA, 3819 bp, synthetic construct
  misc_feature 1..3819: note = Description of Artificial Sequence: Synthetic coding sequence
  source 1..3819: mol_type = other DNA
atgcccgccgagcggaagaagcccgccagcatggaggagaaggacagcctgcctaacaacaaagaaaaagactgtagcgaacggagaaccgtgtcaagcaaagaacgaccgaaggacgacatcaaattaacagcgaaaaaggaggtctccaaagctccggaggacaagaagaaaagattggaagacgataagcgtaagaaggaggacaaagaacggaagaagaaagatgaagagaaagttaaggctgaggaggagagtaaaaaaaaggaggaggaagaaaagaagaaacaccaagaagaggagcggaagaaacaagaggagcaggccaagagacagcaggaggaggaagcggcggcgcagatgaaggagaaggaggagagtattcagctgcatcaagaggcttgggaacgccatcacctccggaaggagctgcgaagcaagaaccagaacgccccagactcccgtccggaggagaacttcttcagcagactggacagctccctgaagaaaaacaccgcctttgtcaaaaagctcaagacgattactgagcagcagagagattctctgagccacgatttcaatggtctgaacctatcaaagtatattgcagaagcggtcgcctcaatcgtggaggcgaagctaaagatatcggacgtgaactgcgcagtccacctctgctcactgttccatcagcgatacgcggactttgccccaagtctgttgcaggtctggaaaaagcactttgaggctagaaaggaagaaaaaacacctaacattaccaaactgaggactgatttgagatttatcgctgaactcacaattgtgggcatctttactgacaaagagggactgtctctcatctatgagcagctgaaaaacataattaacgccgaccgcgaatctcacacgcatgtctctgtcgtcatttccttctgccgtcattgtggagatgacatcgccggcctggtgcctcgtaaggtcaagtcagcggctgagaagtttaatctctctttccctccttcggagattatctcacctgagaagcagcagccctttcaaaacttgctgaaagagtactttacaagcttaaccaaacacctaaaacgcgatcatcgggaattacaaaacacggaacggcagaatcgccgcatcctccattcgaagggggaactgtccgaggatcggcacaaacagtacgaagagttcgccatgtcttatcagaaactgctcgctaactcccagtccctcgccgacctcctcgacgagaatatgcccgatctcccccaagacaagcctaccccagaggagcatggccccgggattgatatctttacacccggcaagccaggggaatatgatctcgagggaggcatttgggaagatgaggatgctcgcaatttttatgagaatctcatcgatttgaaagcctttgttcccgccattctgtttaaggacaatgaaaaatcctgccagaacaaggagtccaacaaggacgacacgaaggaagccaaggagtctaaagaaaataaggaagtgtcatcccctgacgacctggaattggaactggaaaatctggagattaatgacgatactctggagctggagggaggcgatgaggctgaagacctaaccaagaagctcctcgatgaacaggagcaggaggacgaggaagcttcaactgggagccatcttaaactgattgttgatgccttcctgcagcagctccctaattgcgtcaacagagatctgatcgataaagccgctatggacttctgtatgaacatgaataccaaggctaaccgcaaaaaacttgtgagggctctctttattgttccgcgccagcgcttggatctccttccattttacgctagactcgtggccaccctccacccctgcatgagcgacgttgccgaggacctgtgtagcatgctgagaggagacttccgcttccacgtgcgcaagaaagaccaaatcaatatcgagactaaaaataagacagtacgcttcatcggagaactcaccaagtttaagatgttcactaaaaacgatacattacactgcctgaagatgcttcttagtgatttctctcaccaccacattgaaatggcgtgtaccttgcttgagacctgtgggaggtttctttttcgcagccccgagtcccacttacgcactagcgtgttacttgagcagatgatgcgcaagaaacaggcaatgcatctggacgctcgttacgtgacgatggttgagaacgcttattactattgcaatccacccccggccgaaaaaacagtaaagaagaaacgccccccacttcaggagtatgttaggaagctgctgtataaggacctatcaaaagtgactacagaaaaggtactccgacagatgagaaaactgccctggcaggatcaggaggttaaagattacgttatctgctgtatgattaacatctggaatgttaagtacaacagcattcactgtgtggctaatctgctggctgggctggtgttataccaggaggatgtaggcatccatgtcgtggatggggtgctcgaggacatcaggttgggcatggaggttaaccaaccaaaattcaaccagcggaggatctcttctgcaaagtttttaggtgagctctacaactatcggatggtcgaaagcgcggtgatctttagaacactgtactccttcacttcttttggagttaaccccgacggctctcctagttctcttgatcctcccgaacacctgtttaggattcggctggtgtgcactattctggacacctgtgggcagtattttgatcggggctcctccaaaaggaaactcgactgcttcctcgtgtatttccaacgatacgtgtggtggaagaagtccctcgaggtgtggacaaaggaccatccatttccgattgacatagattatatgatctccgacacactggagctgctgaggcccaagatcaagctgtgcaattccctcgaggaatctattaggcaggtgcaggatctggagcgggaattcttgatcaagttaggcttggtcaatgacaaggactctaaggacagtatgaccgaaggcgaaaatctcgaagaggacgaagaagaagaagagggcggggctgagacagaggaacagtccggtaatgagtctgaagtgaacgagcctgaagaggaggaaggttctgacaacgacgatgatgagggagaggaggaagaggaggagaatacagactacctcactgacagtaacaaggaaaacgaaaccgacgaggagaacaccgaagttatgattaagggtgggggtttgaagcacgtaccctgtgtggaagatgaagatttcattcaggccctggataaaatgatgctagaaaatctccagcagaggagtggagaatcagttaaggtgcatcagctggacgttgctattccacttcaccttaaaagccagttaagaaaaggtcccccgctggggggcggagaaggtgaagccgagtcggccgacacaatgccgttcgtcatgctgacccgcaagggcaataaacaacagttcaagatactgaacgtgccaatgtccagccagcttgccgcaaaccattggaatcagcagcaagccgagcaggaagaacgtatgcgcatgaaaaagctaaccttggacattaacgagcgtcaggaacaggaggactatcaggagatgctgcagtccctcgcacagaggccggctccggcaaacaccaatcgggagcgcaggccacgctaccagcatcctaaaggagccccaaatgctgatctgatatttaaaaccggcggccgtcggagatag

SEQ ID NO: 210905 - DNA, 3819 bp, synthetic construct
  misc_feature 1..3819: note = Description of Artificial Sequence: Synthetic coding sequence
  source 1..3819: mol_type = other DNA
atgcccgccgagcggaagaagcccgccagcatggaggagaaggactcactccctaacaataaggagaaggactgttcggaacggaggacagtgtcttctaaggagcgacccaaagacgacatcaaactgaccgccaaaaaggaagtgtctaaggcccccgaggacaagaagaagcgtcttgaggacgataagcgaaaaaaggaagacaaggaacggaaaaaaaaagatgaggagaaagttaaggcagaagaagagtctaaaaaaaaagaggaggaggagaagaagaagcatcaggaggaggagcgcaagaagcaggaagaacaggccaaacgccaacaggaagaggaagcggccgctcagatgaaggaaaaggaagagtcaatccaattacaccaagaagcctgggaaagacaccatttaagaaaggaactgagaagcaaaaaccagaacgctccagattcacgcccagaggaaaacttcttttcgcgtctggacagcagcctcaagaaaaataccgcttttgtcaaaaaactgaaaaccataacggagcagcagcgcgattcactcagtcatgattttaatggtctgaatttgtctaagtacattgcggaggcagtggccagcatcgtggaggccaagctcaagatctctgatgtgaactgtgccgttcatctctgttcactgtttcaccaacggtacgcggattttgcccccagcctcctgcaagtctggaaaaagcatttcgaggcacggaaagaagaaaagacgcctaatattactaaacttcgcacagacctcagattcatcgcagagctgacaatagtgggtatcttcacagacaaggagggactgtctctgatctatgagcagctaaaaaacatcatcaacgcggaccgagagtcccatactcacgtaagtgtcgtgatcagtttctgtcgtcactgcggcgacgacatagctggattggtgcccaggaaggtcaagagcgcagctgaaaaattcaatctcagcttcccacctagcgagattatctccccggaaaaacagcagccttttcagaacctcctaaaggagtatttcacgtcattgactaagcacctgaaaagagatcaccgcgagctccaaaacacagagcggcagaaccggcgtatcctgcactctaaaggagagctgtctgaggatcggcataagcagtacgaggaatttgccatgagctatcagaagctgcttgccaactcccagtcactggccgatcttctggacgagaacatgcccgacctgccccaagataagccaacacccgaagagcacggccccggtatcgatattttcacccccgggaaaccaggggagtacgacctggagggcggcatatgggaggacgaagatgctaggaacttttacgaaaacctcattgacctgaaagcatttgtgcccgccatcctgtttaaggacaatgagaaaagctgccagaataaagagtcgaacaaggatgatactaaagaggccaaagagtccaaggaaaacaaagaggtgtcctcccctgatgatctagagctggaactcgagaacctggagatcaacgacgatactcttgaacttgagggaggggacgaggccgaggacctgacaaaaaaactcctggacgaacaagagcaagaagacgaagaagcctcgacggggtcacatcttaaattgatagtagatgcgttcctgcagcagctacccaattgcgttaatcgtgatctgattgataaggccgccatggacttttgtatgaacatgaataccaaagcaaatcgcaagaaattggtgagggctttgtttatcgttcccaggcagcggctcgacctgctgcccttctacgctcggctggtcgctaccctgcacccctgcatgtctgacgtggccgaggatctctgtagcatgctgcgaggcgatttccgctttcacgtgcgcaaaaaggatcagattaacatcgaaaccaagaacaagactgtgaggtttataggcgagttaaccaagtttaaaatgttcaccaagaacgatactcttcattgcttgaagatgcttctgagtgatttcagtcatcaccacattgaaatggcttgtaccttgcttgagacatgtggaagatttctcttccggtctccagaatctcacttgcggacatccgttctgctggaacagatgatgcggaagaaacaagctatgcaccttgatgcacgatatgtcacaatggtggaaaacgcctactactactgcaatccccctccagctgaaaagacagtcaaaaagaagagacccccactgcaagagtacgtgagaaaactgctgtacaaagacttaagcaaggttactacggagaaagtgctgcggcagatgcgaaaactgccgtggcaggatcaggaggtgaaagattatgttatctgctgcatgatcaatatctggaatgtgaagtataacagcatccactgcgttgctaatctcctggccggactcgtcctgtatcaggaagacgtgggaattcatgtcgtggacggggtgttagaagacatcagactcgggatggaagtgaatcagccaaaatttaatcagaggagaattagtagcgccaagtttctgggagagctctataattaccgcatggtcgagtccgcagtaattttccggacattgtactcattcacttcctttggggtgaatcctgacgggagccctagttcactggatcctcctgagcatctgtttaggatcagactggtttgcacaattctggatacctgtggtcagtattttgatcgaggcagttccaagcggaagttggactgcttcctcgtttatttccaaagatatgtgtggtggaagaagagcttggaggtatggaccaaggaccacccctttcctatcgatatcgattatatgatttccgatacgctcgagcttctcagacctaagatcaagctatgtaatagcctcgaggagtcaatcaggcaagtgcaggacctagagcgcgagtttctgattaagttaggattagtgaatgacaaggattccaaagactccatgactgaaggagaaaacttagaggaggatgaagaagaggaagagggcggggctgagactgaggagcagtccgggaatgaaagcgaggtgaacgaacctgaggaggaagaggggtctgacaacgatgacgatgaaggggaggaggaggaggaagagaatacagattacttaacggactctaacaaggagaacgagactgacgaggaaaatactgaagtgatgattaagggaggaggcctgaagcatgtgccttgtgtcgaagatgaagatttcattcaggctctggataagatgatgctcgaaaatctgcaacaacggagcggcgagtcagtcaaagtgcaccagcttgatgtcgcaatcccgctacatttaaaaagtcagcttcgcaaaggaccccctctgggaggcggtgagggggaggcagagtccgccgacacaatgccctttgtgatgcttacaagaaaaggcaacaagcagcaattcaagatactcaacgtgccgatgtcctctcagctggctgctaaccattggaatcaacagcaagctgaacaggaggagaggatgcgcatgaaaaagctcaccctggatatcaatgagcgacaggagcaggaagactatcaggagatgctccaatcccttgcccagcggccagctcccgcaaataccaatagagaacgcaggccccgataccagcaccccaaaggagctcctaacgcggatcttattttcaagaccgggggtaggaggaggtag

SEQ ID NO: 210906 - DNA, 375 bp, synthetic construct
  misc_feature 1..375: note = Description of Artificial Sequence: Synthetic coding sequence
  source 1..375: mol_type = other DNA
atgatcaagggcggcggcctgaagcacgtgccctgcgtggaggacgaagatttcatacaagctctagacaaaatgatgctggaaaacctgcagcagcgcagcggagaatccgttaaggtgcatcagcttgatgtggcaatccccctccacctcaagagtcagttgagaaagggcccgcccctgggtggaggggagggcgaggcagaaagcgcagataccatgccatttgtgatgctgacacgcaaagggaacaagcagcagtttaagattttaaatgtgcccatgtctagccagctggccgctaaccattggaaccagcagcaggccgaaagaagggaggatgagaacgaaaaagctcatactcggtatcagtag

SEQ ID NO: 210907 - DNA, 1740 bp, synthetic construct
  misc_feature 1..1740: note = Description of Artificial Sequence: Synthetic coding sequence
  source 1..1740: mol_type = other DNA
atgcccgccgagcggaagaagcccgccagcatggaggagaaggactctctccctaacaacaaggaaaaagattgctccgagcgacgaactgtgtcttcaaaggaacgaccaaaggacgacatcaagttgacggcaaagaaggaggtttccaaagcgccagaagaatctaagaagaaggaagaggaggaaaagaagaaacatcaggaagaggaacgaaagaaacaggaggagcaagcaaaacgacagcaggaagaggaggctgcagctcagatgaaggagaaggaagaatctatccagctccaccaggaggcttgggagagacaccatttgagaaaagagctgagatccaagaatcagaatgcacctgactccaggcccgaagagaattttttcagcaggttggattcatccctgaaaaaaaacacagcatttgtaaaaaaacttaagaccatcacggagcagcagcgcgacagtctgagccatgacttcaacgggcttaatttgagcaagtacattgccgaagcagtggccagtatagtggaagcaaaactgaagatctcagacgtgaattgcgccgtccatttgtgctcactatttcaccagcgttacgcagattttgcaccatccctcctccaggtgtggaagaagcacttcgaagctagaaaggaggagaagacccctaacatcacaaagcttcgaacagatctaaggttcatagctgaactaaccatagtcggtatattcactgacaaggagggtcttagtctgatatacgagcaactaaaaaacattatcaacgcagatagagagtcgcacacgcacgtgagtgttgtcatttcattctgtaggcactgtggcgacgacattgcaggcttggtgcctagaaaagttaaaagtgccgccgaaaaattcaacctgtcgttccccccttcagagattatctccccagagaaacagcagccattccagaacttgctcaaagagtacttcacgtctctgaccaagcacctaaagcgagatcatagggagctgcagaacaccgagagacagaatcgacgaatactgcacagcaaaggagaactgtccgaagacaggcataagcagtacgaggagttcgctatgagttaccaaaaactgctcgcaaatagccagtcgctggccgacttactagacgagaacatgcccgacctgccgcaggacaagccgaccccagaagagcatggacccggtatagatatttttacgcccggcaaacccggtgagtatgacttagaaggaggcatctgggaagatgaggatgcacgtaacttctacgagaatttaattgacctcaaggcctttgtccctgcaatcttgttcaaggataacgaaaagtcgtgccagaataaggagagcaacaaagacgacaccaaagaggccaaagaaagtaaggaaaataaggaagtgagcagtcccgacgatcttgagctggaactggagaatctggagatcaacgacgataccctggagctggagggcggtgacgaagctgaggacctcactaagaagttgctagacgagcaggaacaggaggatgaagaagcaagcacaggctctcatttgaagctgattgtcgacgccttcctgcagcagctgcctaactgtgtgaatagagatctaattgacaaagcagaaaaagcattttgtaatggaaatttagctcgcgtgaatcttttactgcgcatggccgtgaagaagtag

SEQ ID NO: 210908 - DNA, 3819 bp, synthetic construct
  misc_feature 1..3819: note = Description of Artificial Sequence: Synthetic coding sequence
  source 1..3819: mol_type = other DNA
atgcccgccgagcggaagaagcccgccagcatggaggagaaggactctttacctaataacaaagagaaagactgttcagagagaaggaccgttagttcaaaagaaaggccaaaggacgacatcaaactgacagctaagaaagaggtgagtaaagcacccgaagacaagaagaagcggttggaggatgacaagaggaagaaagaggataaggaaaggaagaaaaaagatgaggaaaaagttaaagccgaggaggaatctaagaaaaaggaagaagaggagaagaagaaacatcaggaagaggaacgcaagaagcaggaagagcaggctaagcgccaacaggaagaggaggctgctgcccagatgaaagagaaggaggagtccatccaacttcaccaggaggcctgggaaagacaccaccttcgcaaggaattacgctctaaaaatcagaatgcccctgacagccgcccagaggaaaactttttttcccggctggattccagcctgaagaagaatacggcctttgtgaagaagttgaagaccatcactgagcagcagcgtgattctctgtctcacgacttcaatggcctgaacctgtccaaatatatcgccgaagctgtggcatcaattgtcgaagccaagcttaagatttccgacgtgaattgtgccgtgcacctctgcagcttattccatcagcgctatgccgattttgccccctcacttcttcaggtctggaagaaacatttcgaagccaggaaagaagaaaagactcctaacattacaaaacttcggacagacctgcggttcatcgctgaactcaccattgtggggatctttacagacaaagagggcctgtccctgatttatgaacaattgaagaatatcatcaatgctgatagagagtctcacacccacgtctctgtggtgatctctttctgccgccattgcggcgatgacatcgctggccttgtaccacgtaaagtcaagtcagccgccgagaagttcaatctgagcttcccccccagcgagattatctcccctgaaaaacagcagccattccagaatctgttgaaggaatattttacctctttgaccaagcacctgaaaagagatcacagagaactgcagaacaccgagcgacagaatcggcgaattttgcacagcaagggtgaattgtccgaagacagacataagcagtatgaggaattcgccatgagttaccagaaactgctggccaactctcagagcctggccgacctattggatgaaaacatgcccgatctcccgcaagataaacccacccctgaggagcacggccctggaatcgacatcttcacccccggtaaaccaggggaatatgatcttgaagggggcatttgggaggatgaagacgcgcgcaatttctatgagaatctgatcgatctcaaggcctttgtgcccgcaatcctgttcaaggacaacgaaaagtcttgtcagaataaggaatccaacaaggatgatacaaaagaggccaaagagtcgaaagagaataaggaagtgtccagccctgacgacctggagctggaactggagaatctcgaaatcaacgacgacaccttggaactggagggcggggacgaagctgaggatctaacaaaaaagctgctggatgagcaggagcaagaagatgaggaagcatcgacagggagtcaccttaagttgattgtggacgccttccttcagcagctgcctaactgtgtaaaccgcgatctaatcgacaaagcagccatggacttctgtatgaatatgaataccaaagcaaatagaaaaaaactcgtgcgggctctcttcattgttccaaggcagaggttggaccttttgcctttttatgctaggttggtggccacgctgcacccgtgtatgagcgatgtcgccgaggatctgtgttcaatgctcagaggagatttcagattccatgtgcgcaaaaaagatcaaatcaacatcgaaaccaagaataagaccgtcagatttatcggggagctgaccaaatttaagatgtttacaaagaatgacactctgcactgtcttaaaatgctcctttctgacttttcccaccaccacattgaaatggcttgcacactgctggagacttgtggtcgttttctcttcaggtccccagaaagccatctgaggacaagtgtcctgctcgagcaaatgatgaggaaaaaacaggctatgcaccttgacgcacgatatgtaacaatggtggaaaacgcttactactactgcaacccaccacccgcagaaaagacagttaaaaaaaagagacctccactgcaggagtacgtaagaaaactgctgtataaagacctctccaaggtgacaaccgagaaagttctcagacaaatgagaaagctgccctggcaggaccaggaggtgaaggattatgttatttgttgcatgatcaacatttggaacgtgaaatacaatagtatccattgcgtggcgaatctcctcgcgggattggtgctgtatcaggaagatgttggaattcacgtggtagatggggtgcttgaggatattagacttggcatggaagttaaccaacccaaattcaatcaacgtagaatctcctcggctaaattcctgggggaactctacaactatcggatggtggaaagtgccgtcatattccgtacactctatagtttcacgtcttttggagtcaaccccgacgggagcccatccagtttggatccacctgagcatctgttcaggattcgcctggtgtgtaccatattagacacttgtggacagtattttgatcgcgggtcatccaagaggaaattagattgtttcctcgtctattttcagagatatgtatggtggaagaagtctctagaggtatggactaaagatcatccctttcccatcgacattgactatatgatctccgacaccctggagttactgcgccccaaaattaagctctgcaatagcctcgaggagtctatccgacaggttcaagacttagagcgcgagttccttataaagctgggattggttaacgataaagattcaaaggactctatgaccgaaggagagaatcttgaagaagatgaggaggaagaggagggcggcgccgagaccgaagagcagtctgggaacgaatcagaggtcaacgaaccagaggaggaggaagggagtgacaacgacgatgacgagggtgaggaggaggaggaggagaatacagattaccttacagactccaacaaagaaaacgaaaccgacgaggagaacactgaagtgatgatcaagggcgggggactgaagcatgtgccttgcgtcgaagatgaggatttcatacaggctcttgataagatgatgctcgagaatctacagcagagatcaggcgagagtgtgaaggtgcatcagctagacgtagcaataccgttgcacctcaagtcccagcttcgcaagggtcccccactgggcggcggcgagggcgaggccgaatctgccgatactatgcccttcgtgatgctgacacgcaaggggaacaaacagcaatttaagatccttaatgtgcctatgagcagtcagctggcggccaatcattggaaccaacagcaagctgaacaggaggagagaatgcgaatgaaaaagctgaccctggacattaacgagagacaggagcaggaggattatcaggagatgctgcagagtctggcccagcgccctgcgcctgcaaatacgaatagggagcgcagacctcgctaccagcatccaaaaggtgcgcctaacgcagacctgatctttaaaacaggaggtaggcgccgatag

SEQ ID NO: 210909 - DNA, 1332 bp, synthetic construct
  misc_feature 1..1332: note = Description of Artificial Sequence: Synthetic coding sequence
  source 1..1332: mol_type = other DNA
atgcggagcgagaaggagggcgccggcggcctgcgggccgccgtggctgcgcggggtccctccggacgggaaaaattatctgctctggaggtccagttccatcgggacagccagcaacaggaggcagagacgccacccactagttcgagtggctgtggcgggggagcgggaaagcctagggaagagaagcggacagctctgagcaaagttgtaataagacgtttacctcccggattgactaaggagcagctggaagagcaactgcggccactccccgcccatgattattttgagttcttcgccgcggatctgtccctgtaccctcacttatattccagagcttacatcaacttccgcaatcctgatgacattcttctttttcgggatcggttcgatggctatatcttcctcgatagtaaagatcccgaatacaaaaagttcctggagacctactgtgtcgaggaagagaagacctctgcaaaccccgagacacttctaggtgagatggaagcaaaaactcgcgaactgatagcccgacgcactaccccactccttgagtatattaagaacaggaaactcgaaaagcagagaatccgtgaggaaaagagagaagagcgcaggagaagggagctggaaaagaagaggttgagagaggaggagaagcgcagaaggcgggaagaggagcggtgcaaaaagaaagaaaccgataaacaaaaaaaaatcgcggagaaagaggttcgcatcaagctgctgaagaagccggagaagggcgaagagccaacaacggagaagccgaaggagcggggtgaggagatagatacgggagggggtaagcaagagagctgcgcacctggtgccgtggtgaaagcccgcccaatggaagggagcttagaagagccgcaagagacctcccattcaggctccgacaaagaacatagggacgttgaacggtcccaggagcaagagtcagaagctcagcgctaccatgtggacgatggtaggcgtcaccgcgctcaccacgaaccagaacgcttgtctcggaggtccgaggatgaacagcgatggggcaagggtcctgggcaggataggggaaaaaaagggtcgcaggactctggcgcacctggagaggcaatggagcgcctgggaagggcccaacgttgcgacgattcacccgcgccacgaaaggagcggctggccaacaaggacagacctgccttgcagctctacgatcccggggcaagattccgtgctcgggaatgtggtggaaatcggcgcatatgtaaggctgagggttcaggaacgggccccgaaaagcgagaggaagcggaatag

SEQ ID NO: 210910 - DNA, 1431 bp, synthetic construct
  misc_feature 1..1431: note = Description of Artificial Sequence: Synthetic coding sequence
  source 1..1431: mol_type = other DNA
atgcggagcgagaaggagggcgccggcggcctgcgggccgccgtggcagcaagaggcccatcaggacgggagaagcttagcgccctcgaagtgcagttccaccgcgactctcagcagcaagaggccgagacgccccctacaagctctagcgggtgcggaggaggggcagggaagcctagagaggaaaagcgaactgctttgagcaaggtcgttattagaaggctgcccccaggcctgacaaaggaacagttggaggagcagttacggccactccctgcccacgactacttcgagttttttgctgctgacttgtccctatacccgcatctttacagccgcgcttacattaacttcagaaacccagatgacatactcctgttccgtgatcggtttgacggttatatctttctggatagcaaaggcctcgaatacccagccgtggttgaattcgctccattccagaaaatcgctaaaaagaaactaagaaaaaaagacgccaaaaccggttcgatcgaggacgatccagagtataagaaatttctcgagacttactgcgtcgaagaggagaagacctccgcgaacccagaaacgttactgggggaaatggaggccaagaccagagagcttatcgcgcgccggacaacccctctgcttgagtacattaaaaacaggaagttggaaaagcagagaattagggaggaaaagagggaagaaaggcgccggagggagcttgaaaagaaacgcctgcgggaggaggaaaaacgtaggagacgggaagaggaaagatgtaagaagaaggagacagataagcagaagaaaattgctgagaaagaggtgcggatcaaactgctaaagaagccagaaaagggcgaagaaccaacaacagagaagcccaaagaacgcggtgaggagatcgatacaggcggcggcaagcaggagtcctgtgcccctggcgctgtggtgaaggcgagacctatggagggaagcctggaggagcctcaggagaccagccattccggttccgacaaggagcatcgagatgtcgagagaagccaggagcaagagtctgaggcacagcgttatcacgtcgacgacggccgacggcatcgagctcaccatgaaccagagcgattgagccgccgttctgaggacgaacaaagatggggcaaaggccccgggcaagaccggggtaaaaaaggttcccaggattcgggagcacccggtgaagccatggagaggctcggtcgcgcgcagcgttgcgatgacagcccagcccccaggaaggagcgtttggctaataaggaccgcccagccttgcagctgtacgatccaggagcaagatttagggccagagagtgtggcggaaaccgccgtatctgtaaggcggagggctccggcacaggtccagagaagcgtgaagaagcagagtag

SEQ ID NO: 210911 - DNA, 627 bp, synthetic construct
  misc_feature 1..627: note = Description of Artificial Sequence: Synthetic coding sequence
  source 1..627: mol_type = other DNA
atggaggccaagacccgggagctgatcgcccggcggaccacccccctgctggaatatattaaaaaccgaaaactggaaaagcaacgcataagagaggagaaaagagaggaaagacgcaggagggaactggaaaagaagagactgcgcgaggaagaaaagcgcagacgcagggaggaagaaaggtgtaaaaagaaggaaacggataagcagaaaaagattgccgagaaggaagtaagaatcaaactgttaaaaaaacctgaaaaaggcgaggagccaaccacggagaaaccaaaagagcggggcgaggagatagatactggagggggcaaacaggagtcttgcgcgcccggcgctgtggtgaaggcacggccaatggagggaagtcttgaagagcctcaggaaacatcgcatagcggttccgataaggaacaccgggacgttgaacgatcccaggagcaggagtctgaggcaccacgcaaggaaagacttgctaataaagatcggcccgcactgcagctgtatgaccctggcgccagattccgggctagggaatgtggtgggaatcgcagaatttgcaaggccgaaggaagcggcaccgggccggagaaacgcgaggaggcagaatag

SEQ ID NO: 210912 - DNA, 1452 bp, synthetic construct
  misc_feature 1..1452: note = Description of Artificial Sequence: Synthetic coding sequence
  source 1..1452: mol_type = other DNA
atgaaggaggagaaggagcaccggcccaaggagaagcgggtgaccctcctgacccccgctggggccacaggaagcggtggaggaactagtggagactcatcgaagggcgaagataaacaggataggaacaaagagaagaaggaggcgctatcgaaggtcgtaattcggcgattgccaccgacactgactaaagagcagctccaggagcatctgcagcctatgccggagcatgactacttcgaattttttagtaacgacacatccttatatcctcatatgtacgcaagagcttacatcaatttcaaaaaccaggaggacattatactgtttagagaccggtttgacggttatgtttttttggataataagggccaggagtacccagctattgttgaatttgcgccctttcagaaggcagcaaaaaagaaaacaaaaaagcgagatactaaggtgggcaccatagacgacgaccccgaatatcgaaaatttctggaatcatacgccaccgataacgaaaagatgaccagtactcctgagacactgctggaagagatagaggctaagaacagagagcttatcgcaaaaaaaactacccctttgctctcctttctcaagaataaacagcgcatgagagaggagaagagggaggagagaaggagacgagaaatcgaacggaaacggcagagggaagaagagcgaaggaaatggaaagaggaagaaaaacgcaaaagaaaagacattgaaaaactgaaaaagatcgatcgcattccagagcgagacaagctgaaggacgagccaaagataaaggtccaccggttcctgctgcaggctgtgaaccagaagaacctgctcaagaagcctgaaaagggagatgagaaggagctggataagcgcgaaaaggcgaaaaaactggacaaggaaaatttatcagacgaacgtgcgtcaggccagagctgtacacttccaaaacggtccgattcagagctgaaggacgaaaagccaaagagaccagaggacgaatccgggagggactatcgcgaacgtgaaagagaatacgagagggatcaggagagaatactaagagaaagagagcgactgaagagacaggaagaagaacgcaggagacagaaggagagatatgagaaagaaaagactttcaagcgcaaggaagaagaaatgaagaaagaaaaggatactctccgcgataagggcaagaaggcggaaagcacggaatctatcggcagcagcgaaaagactgaaaagaaggaggaggtagtcaaacgggaccggatcaggaacaaagaccggccagctatgcagttgtatcagcctggagctaggagtcggaaccggctgtgtccaccagacgactctaccaaaagcggagattctgctgcagaacgcaaacaggaaagcggaataagccatcggaaagaaggcggggaggagtag

SEQ ID NO: 210913 - DNA, 1413 bp, synthetic construct
  misc_feature 1..1413: note = Description of Artificial Sequence: Synthetic coding sequence
  source 1..1413: mol_type = other DNA
atgaaggaggagaaggagcaccggcccaaggagaagcgggtgaccttactcacccctgcgggtgccactggcagcgggggcggtacctccggggacagctccaagggcgaagacaagcaggatcgcaataaggagaaaaaagaggcactgagcaaggtcgtgatccgccggctgcccccaactttgaccaaagaacagctccaggaacacctgcagcccatgccagaacatgactattttgagttctttagtaatgacacctcgctctacccccatatgtatgcacgggcatatatcaacttcaagaaccaagaagatataatcctgttcagagacaggttcgatggctacgtgttcctcgataacaagggacaggagtacccggccattgtggagttcgcaccattccaaaaagccgccaaaaagaagacgaagaagcgtgatacgaaagtcggtaccattgacgatgaccccgagtatcgaaagttcctagagtcctatgcaactgacaatgagaagatgacctctactccagaaaccctccttgaagagatcgaggctaagaaccgagagctgatagcgaagaaaacaactccgcttctttcgttcttgaagaataagcaacggatgagggaggagaaacgggaagagagaagacgtcgcgaaatcgaacgcaagcggcaacgagaggaggagcggcgaaagtggaaggaggaagaaaaacgcaaaaggaaggacatcgagaagcttaagaagattgacagaatccctgagcgggacaagctgaaggacgagcccaaaattaaacttcttaaaaagccagagaaaggggatgagaaggaactggacaaacgggagaaggccaaaaagctagacaaggagaacctctccgatgagcgagcctcgggtcagtcttgcacactgcccaaaagaagcgattccgaactgaaagacgagaagccaaagagaccagaggatgagtcagggcgcgactatcgagagagggagagagagtatgagcgcgaccaagagcggatccttagggaacgagaaagactgaaaagacaggaggaagagcgaagaagacagaaagagagatacgaaaaggagaaaacattcaagcgcaaagaagaggagatgaaaaaagaaaaagatacgctccgcgacaaaggtaagaaagctgagagtacagaaagtattgggagctcagaaaaaaccgaaaaaaaggaagaggtggtgaaacgggaccggatccgcaacaaggacagacccgctatgcagttgtatcagcccggtgcccgatcccggaataggctgtgcccacccgatgatagcactaaaagcggagatagcgccgcggaaagaaagcaggagtccgggattagccatcggaaggagggaggcgaggaatag

SEQ ID NO: 210914 - DNA, 657 bp, synthetic construct
  misc_feature 1..657: note = Description of Artificial Sequence: Synthetic coding sequence
  source 1..657: mol_type = other DNA
atgaaggaggagaaggagcaccggcccaaggagaagcgggtgaccctgttgacccctgcgggggctaccggcagcggaggtggcactagcggcgactcttctaagggagaggacaagcaggaccgcaataaagaaaagaaggaagccctgtccaaagtggtcattagacgacttccacctaccctgactaaagagcaactccaagaacaccttcagccgatgcccgagcatgactacttcgagtttttctcaaacgatactagtctgtatccccacatgtacgctcgtgcatatatcaacttcaagaaccaggaggacataatcctgttccgcgacaggttcgacggatacgttttcctggataataaaggtcaagagtatccagccatagtcgagttcgccccattccagaaggccgcaaagaagaaaacaaagaaacgggacacaaaagtgggcaccatagacgatgaccccgagtaccggaaattcctggagtcgtatgcaacagacaatgagaaaatgacgtccactcccgaaaccttgctcgaagagatcgaggctaagaaccgagaactgatcgcaaagaaaacgacacctctgctgtccttcctgaagaacaagcagcgaatgcgcgaggaaaagagggaagatttttag

SEQ ID NO: 210915 - DNA, 441 bp, synthetic construct
  misc_feature 1..441: note = Description of Artificial Sequence: Synthetic coding sequence
  source 1..441: mol_type = other DNA
atgatgtggcagaagtacgccggcagccggcggagcatgcccctgggcgcccgtattttgttccatggcgtgttttatgccgggggctttgccattgtatattatctgatacagaaatttcattcccgcgccctctactacaagctggccgtcgaacaactgcaaagccatcctgaggcacaagaagcactgggtccccccctgaatatccactacctgaagctcatagatcgggaaaactttgtggacatagttgatgcaaaactgaaaattcctgtgtccgggtcaaagtcagaaggtctcctctatgtccactcaagtagaggtggcccattccaacgttggcacttggatgaagtctttctggagttgaaagacggtcagcagattcccgtgtttaagctgtccggggaaaacggtgacgaggttaagaaggaatag

SEQ ID NO: 210916 - DNA, 2667 bp, synthetic construct
  misc_feature 1..2667: note = Description of Artificial Sequence: Synthetic coding sequence
  source 1..2667: mol_type = other DNA
atggagggcgacgactgcgagttccggtacggcgacggcaccaacgaggcccaggataacgactttcccaccgttgagcgctcgaggttgcaggaaatgctgtctctattgggcttggagacttatcaggtccagaaactctcgctccaggattccctgcagatatcatttgactcaatgaagaactgggctcctcaggttccaaaggacctgccgtggaatttcctgagaaagctccaggcccttaatgctgacgcaaggaacacaacaatggtgttggacgtgttacccgatgcgagaccagtcgaaaaggagtctcagatggaggaagaaatcatctattgggatccagccgacgatctcgccgcagatatctactccttcagtgagctgcccacgcctgacacaccagtcaaccccttggaccttctttgtgctctgctgctgagtagcgactccttccttcagcaagagattgctctgaagatggcactctgccagttcgccctgcccctggtcctgcctgatagcgaaaaccactatcatactttcttgctctgggcaatgcgcggtattgtgcggacctggtggagtcagcccccacgaggcatgggtagctttagagaggatagcgtagtgctgagtcgggcacctgcttttgcctttgtaaggatggacgtaagttccaattctaagagccagcttttgaatgctgtattaagcccagggcaccggcagtgggattgcttctggcacagagacctaaacctaggtactaacgctagagagatatccgacgggctggtagaaatttcctggttcttcccatccggacgagaggatctggacatttttcctgagccagtcgctttcctgaatctcaggggggacatcggaagccattggttgcaattcaagcttctgaccgaaatttcatccgcagtgttcatcctgaccgacaacatcagtaagaaagagtacaaactgctgtatagcatgaaggagtcgaccacaaaatattatttcatcttaagtccataccggggcaaaagaaatacgaatctgagatttttgaataagctcatccctgtactcaaaatcgaccactcccacgttttggtcaaggtttcttcgacagacagcgacagcttcgtgaagcgtatcagagcaatcgtgggaaacgttttaagggcaccatgccggcgtgtgtccgtggaggatatggcccacgccgctcgcaaactgggcctgaaggtggatgaggattgcgaggagtgccaaaaggcgaaggaccgtatggagcgcattacaaggaagatcaaggattccgatgcatatagacgcgacgagttacgactgcagggtgacccatggaggaaggccgcccaagtggagaaagagttctgtcagctgcagtgggctgtcgacccccctgagaagcacagagcggagttgcgcaggcgccttctggaactccgcatgcagcagaacgggcatgaccccagtagcggagtgcaggaattcatctccggcatctcttccccttcactatccgaaaaacagtactttctccgatggatggaatggggcctggcccgggtggctcaaccaaggctaaggcaaccacctgaaaccctgctgacgctccgcccaaaacacggggggaccactgatgtcggggagcctctttggccagaacccctcggtgtggagcacttcctgcgggagatgggccaattctatgaagccgagtcctgccttgtggaagccggccgcctccctgcagggcaaaggcgctttgcacacttcccaggactcgcctccgaactgttactgactggtttgcctttggaactgatcgacgggagcactctctctatgcccgtgaggtgggtgactgggctacttaaagagttacacgtcaggttggaacgccggtcccgtctggttgtgctgagcaccgttggagtccctggcacagggaagagtaccctgttaaataccatgtttggactccgctttgctactggaaagtcctgcggtccaaggggcgccttcatgcagctcatcaccgtcgccgaggggttttctcaagacttgggctgtgaccatattttagtgatcgactccggtgggctaatcggaggcgccctaacttccgcgggggaccgatttgaactcgaagcttcccttgctaccctgctgatggggctgagcaatgttacagtgatatctctggctgaaactaaggacattccggccgcaattctccatgcatttctgcgccttgaaaagaccggccatatgcccaattaccaatttgtgtatcagaatctgcacgatgtgtccgtgcctggcccgagacctcgagataagcgacagctgctggacccccccggcgatttatctcgagctgcagctcaaatggagaaacagggcgatggattccgcgctctggcaggcctggccttctgcgaccctgagaaacagcatatctggcacatccccgggctgtggcacggcgcaccccctatggccgccgtgtccctagcctattccgaagcgatttttgaactcaaacgctgtcttctggaaaatattaggaatggtctgagcaatcaaaacaaaaatattcaacagcttatcgagctggttaggagactgtag

SEQ ID NO: 210917 - DNA, 2769 bp, synthetic construct
  misc_feature 1..2769: note = Description of Artificial Sequence: Synthetic coding sequence
  source 1..2769: mol_type = other DNA
atggccagccccggccacagcgacctgggcgaggtggcccccgagatcaaagccagcgagcggaggacagctgtcgccattgcagacctcgaatggcgcgaaatggagggtgacgactgtgaatttaggtacggggatggaaccaacgaggcccaggataacgattttcctaccgtcgaacgctcacgcctgcaggagatgctaagcctcttgggcctggagacttatcaagtgcagaagctaagtcttcaggactccctgcagatctcgtttgatagcatgaagaactgggccccccaggtccccaaggatttaccctggaactttctcaggaagctacaagcactgaacgccgacgcgcgaaatacaacaatggtcctcgacgtgcttccggacgcacggccagtggaaaaggaatcccagatggaagaggagatcatttactgggatcctgctgacgacttggccgcggacatctacagttttagcgaacttccaacccccgatacccccgtcaaccccctcgacctactctgcgccctccttctctcttctgactcattcttgcagcaggagatcgctttgaagatggccttgtgccagttcgcccttcccctggttctccccgacagcgagaaccattatcacacgtttctcctctgggccatgcggggcattgttagaacttggtggtctcagccacccagggggatgggttctttcagggaagatagcgtggtgttatcacgtgcccccgccttcgcctttgtgaggatggacgtaagtagcaactcaaagagtcagctgctcaacgccgttctgtcccccggccacagacagtgggactgcttctggcaccgggacctgaacctgggcacaaatgcacgggaaatctcggacggactggtggaaatttcttggtttttcccgtcggggcgcgaagatttggacatcttccccgaaccagtggctttcctcaatctgaggggggacataggttctcactggctccaatttaagctcttaaccgagatatctagcgccgtgtttatccttacggataacatctccaagaaggagtataaactcttgtatagcatgaaggagagcactaccaagtactattttattctgagtccgtaccgtggaaagcgaaacaccaatctgcggtttctcaacaaacttatacctgtcctgaaaatcgaccactcccatgtcctggtcaaggtgagttccaccgatagcgattccttcgtgaagagaattagggctatagtgggtaacgtgctgcgcgccccatgccggagagtcagtgtggaagacatggcccacgccgcacggaaattgggactcaaagttgacgaagattgcgaggaatgtcagaaggcaaaggatcggatggagagaatcactaggaagatcaaagactctgatgcctacagacgcgatgagcttcgcctccagggtgacccttggagaaaagccgcgcaggtagaaaaagaattctgccagctgcagtgggccgttgacccaccagagaagcatcgagctgagctgagacggcggctgctggaactgagaatgcaacaaaacgggcacgaccccagttccggagtccaagagtttataagcggtatctctagtccctcattgtctgaaaagcagtattttttgaggtggatggaatggggtctggcacgcgtggcccaaccgcggttgcgacagcctcccgagacccttctcaccctgagaccaaagcacggcggcacaactgacgttggcgaaccattgtggccggagcctctgggcgtggagcatttcctacgagaaatggggcaattctatgaggctgaatcttgtttagtcgaagcgggtcgcctcccagctggtcagagaagattcgcccattttccgggactagcatctgagctcctgctgacgggactacccctggaactcattgacggttctacactcagtatgccagttagatgggtcaccggactcctaaaggagctgcatgtgagactcgagcgcaggagtcgcttagtcgtactgagcacagtgggagtgccgggcaccgggaaaagtaccctgttaaacacgatgtttggcctgagattcgccacagggaagtcctgtggccctagaggtgctttcatgcagctcattactgttgccgagggtttttctcaagatctgggttgtgatcacattctggttattgactctggaggcttgatcgggggtgccttaaccagtgccggggataggtttgagctagaggcctcgctggctacgctgcttatgggcctgtccaacgtgactgtcatcagtcttgccgagaccaaagatatcccagctgctattctccacgccttccttagactggagaagactggacacatgccgaactatcagttcgtttaccagaacttgcacgatgtgagcgttccaggacctcggccccgcgataagaggcagctgcttgacccccctggggacctttcacgggctgctgcgcagatggaaaaacaaggcgacgggtttagggcacttgccggtcttgccttttgtgacccagagaaacagcacatttggcatatcccaggcctgtggcacggcgccccacccatggcagctgtgtctctagcctactccgaggctatttttgagctcaagcgatgtctgctagaaaatatcagaaatggtctctctaaccaaaacaaaaacattcagcaactcattgaacttgtgcggcgtctgtag

SEQ ID NO: 210918 - DNA, 492 bp, synthetic construct
  misc_feature 1..492: note = Description of Artificial Sequence: Synthetic coding sequence
  source 1..492: mol_type = other DNA
atggagggcgacgactgcgagttccggtacggcgacggcaccaacgaggcccaggacaacgatttcccgacagtggagagaagtcggctgcaggagatgctgtccttgcttggcttggaaacctaccaggtgcagaagctttctctccaggattccctgcagattagctttgacagcatgaaaaactgggcccctcaggttcccaaagacctgccctggaatttcctcagaaaacttcaggccttaaatgctgacgcgcgcaatactacgatggtgttggacgtgctgcccgacgcacggcctgtcgaaaaagaatcacaaatggaagaagaaatcatctactgggatcccgctgatgacttggccgctgacatttattccttttctgagcttcccacccccgacactccggtaaatcccctagatctgctttgtgccctgttgctgtcttctgactcctttctccagcaggagatcgctctaaaaatgtag

SEQ ID NO: 210919 - DNA, 2667 bp, synthetic construct
  misc_feature 1..2667: note = Description of Artificial Sequence: Synthetic coding sequence
  source 1..2667: mol_type = other DNA
atggagggcgacgactgcgagttccggtacggcgacggcaccaacgaggctcaggacaacgatttcccgacggttgaacgatccagactccaggagatgctatcattgttgggcctggaaacttatcaagtgcagaagttatctctgcaagattccctgcagattagttttgactctatgaagaattgggcgccacaggtccctaaggatttgccctggaacttcttgcggaaactccaggctctcaatgccgacgctcggaacaccaccatggtgcttgatgttctccctgatgcgaggcctgttgagaaggaatcacagatggaagaagagataatctactgggatcccgcagacgatcttgcggccgacatctattccttttcggagctgccaacacccgacacaccagtgaacccgttggacctcctgtgtgccttgttgctgagctcagattcattcctgcaacaggagattgcactgaaaatggcactctgtcagttcgccctgccgcttgttttgccagattccgagaaccactaccatactttccttctgtgggctatgagaggcatcgttcgcacttggtggtcacagccacctcgaggcatgggctccttccgagaggatagcgtagtgctgagtcgcgcacccgcatttgctttcgtgcggatggatgtctcatctaattcaaaaagccagctgctgaacgccgtactgtcccccggtcatcgacagtgggattgcttttggcaccgcgatctaaatctcggtactaatgcccgggagatttctgatggcctggtggagatttcgtggttttttcccagcggccgagaagacttggatatcttccctgagcccgttgcgttcctcaatttgaggggcgacatcgggagccactggctccagtttaaactccttacggaaattagctccgctgtatttattctgactgataacatcagtaagaaagagtataaattactttactctatgaaggaaagtacgacaaaatattatttcattcttagcccgtacagaggcaagagaaacaccaacctgcgcttccttaacaaattgatacccgtgctgaaaatcgaccactcacacgtgcttgtgaaggttagttccacagattctgatagctttgtgaagcggatcagggcgattgtcgggaacgtgctgagggccccttgtaggcgggtgtctgtggaagacatggctcacgccgcccgcaaactggggctgaaggtcgatgaagattgcgaggagtgccagaaggcaaaggatcggatggagcgcatcacacgcaagataaaggactcggatgcatacaggcgggatgaactgcgtctacagggcgatccctggcgaaaggctgcccaggtcgagaaagagttctgccagcttcaatgggccgtggacccccccgaaaaacaccgtgccgaactgaggcggcgcctgctcgaactgcggatgcagcagaatggacacgaccccagctcaggcgtccaggagttcatcagtggaatcagctcaccctccttatcagagaagcaatactttctgcggtggatggagtggggcctggcccgggttgcccagcccagactccgccagcccccagaaaccctcctgacactccgcccaaaacacggcggtacgacggacgtgggggaaccactttggccagaacccctgggcgtcgagcattttcttcgagaaatggggcagttttacgaagcggagagctgcctagtggaagctggcaggcttccggccggccagagaaggttcgcccactttccagggctagcgtctgaattgcttctcaccgggctccctcttgaactgatagatggtagcactctgagcatgcccgtccggtgggttacaggactgctaaaggaactgcacgtccgtctggagcgaagaagcagacttgtggtcctaagtacagtaggcgtgcccggtaccggaaagtcgacgctattgaatacaatgttcggcttgcgctttgccacaggcaaatcttgtggcccccggggggccttcatgcagctgattactgtcgccgaaggatttagtcaagacctgggctgcgaccatatcttagtgatcgattccgggggccttatcggaggagcactgacctccgctggagaccgattcgaattggaagcttctctcgctacactccttatggggctcagcaatgtaacagtgatttctctggctgagacaaaagatatacccgcagcaatactgcatgcgtttcttagacttgagaagacagggcacatgcccaattaccagtttgtgtatcagaacctgcacgacgtgagtgtgcctggccccagaccaagagataagcggcaactcttagatcctccaggcgatctaagccgggcggcagcccaaatggagaagcagggcgacgggtttcgcgcactcgccggactggccttttgtgacccagaaaagcaacacatttggcacattcctggactgtggcatggcgccccccctatggctgctgtttccttggcttattccgaggcaatcttcgaactgaagcgctgtctcctggaaaatatccgcaatggcctgtcaaatcagaataagaatatccagcagctaatcgagcttgtgcgtcgtctgtag

SEQ ID NO: 210920 - DNA, 2667 bp, synthetic construct
  misc_feature 1..2667: note = Description of Artificial Sequence: Synthetic coding sequence
  source 1..2667: mol_type = other DNA
atggagggcgacgactgcgagttccggtacggcgacggcaccaacgaggcccaggataacgattttcctacggtggaacgcagccgcctccaggagatgctgtcactgctgggactagaaacctaccaggtacagaagttgagcttacaggattcactccaaatctcctttgactctatgaagaactgggctccccaagtccctaaggacttgccatggaactttttgcgcaaactgcaggcacttaacgccgacgccaggaataccactatggtcttggacgtgctccccgacgctagaccagtggagaaagaaagccagatggaagaagagataatatattgggatcccgcagacgatctggcagccgatatatatagtttttccgagttgcccacgcctgacacccccgtgaacccattagatctgctctgtgcgctgctgctgtcaagcgactccttcctgcagcaggaaatcgctctgaagatggcgctatgccagtttgcgctgcccctggttctaccagactcagaaaatcactaccacaccttccttctatgggcaatgaggggaatcgttcgaacctggtggagtcagccacccagggggatggggtcattcagagaggattccgtggtcctgagccgcgcaccggcatttgcgtttgtcagaatggacgtgtcctcaaactccaaatctcagctgctcaatgcggtgctgtccccaggacaccgtcagtgggactgcttctggcatagggatctaaacctgggaactaatgcccgtgagatatcagacgggctggtggagatttcttggtttttccctagtgggcgggaggacttggacattttcccggaacccgtggctttccttaatctgcgcggcgacattggcagccattggctgcagttcaaactgctgactgagatcagttccgctgtgttcattctgacagataacatttcgaagaaggagtacaagcttctttattccatgaaggaatctacgaccaagtattactttatcctgtcgccctatcgtggcaagcggaacacaaatttacggtttctcaacaaactgattccagtgctcaaaattgatcactctcatgtccttgtgaaagtttcctccacggattcagactccttcgtgaagcgaattcgagcgatagtgggcaacgttctgagagccccctgtaggcgggtcagcgtcgaggacatggcacacgctgccagaaaactgggtctgaaggtggacgaggattgtgaggaatgccagaaagccaaggaccggatggaacggataacgagaaaaattaaggactcagacgcataccgcagggatgagctcaggctgcagggcgatccctggcgaaaagccgcacaggtggaaaaagagttctgccagctgcaatgggccgtcgaccccccggagaagcaccgagcagagctgcgaaggcgtctgctggaactgagaatgcagcagaatgggcatgatccctcctccggcgtccaggagtttatcagcgggatctcttctccttctctgtccgagaagcagtattttttacgctggatggagtggggattagctcgagtggcccagcctagactcaggcaaccgcctgagacgctgctgacccttcgccccaagcatgggggtacaactgatgtaggcgaacctctctggccagagcctctgggagttgaacattttctgcgcgaaatgggccaattttacgaggcggagtcttgcctcgtggaggccggtagattgccagccggacagagacggtttgcccatttccccggactggccagtgagttgttgcttaccggcttgcccttggagctgatagacggttctaccctgtcgatgccagtgcggtgggtcaccggattgttgaaggaacttcatgtgcgcctcgagcgacgatctcgactggtcgtgctgtcgaccgtgggtgtgcctggaaccggcaaaagcaccttactgaacaccatgttcgggctgcggttcgccacaggaaaatcttgtggtccccgaggagcctttatgcagttgattacagtcgcagaagggttctcccaagatctgggttgcgaccacatccttgttatcgactccggcgggcttattgggggtgccctcacaagtgccggagacaggtttgaactggaggccagcctggccacattgctcatgggcctttccaacgtcaccgttatctctttagctgagacaaaagacatacctgccgcaatattacacgccttcctgagattggagaaaactggtcatatgccaaattatcaatttgtgtaccaaaatctccatgacgtgtctgtccctgggccccggccacgcgataagagacagctgcttgacccccccggagatctcagccgggcagccgctcagatggaaaaacagggcgatggttttagagccctggccgggcttgcattttgcgatccggaaaagcaacatatctggcatatcccaggcctgtggcacggagctccaccaatggcagcagtgtccttagcgtactccgaggctatctttgagttgaagcggtgtctgctggagaacatacgaaacggcttgtccaaccagaataaaaacattcagcaactcattgagttagtgcggaggctttag

SEQ ID NO: 210921 - DNA, 2796 bp, synthetic construct
  misc_feature 1..2796: note = Description of Artificial Sequence: Synthetic coding sequence
  source 1..2796: mol_type = other DNA
atggccagccccggcatcgaggtggagctgctgggcaagggccactccgacctgggcgaggtggcccctgaaataaaagcttcagagagaagaacagccgtggcgatcgcagaccttgagtggcgggagatggagggtgacgactgcgaattcaggtatggggatgggacaaacgaggctcaggataatgacttccccactgtggagagaagcaggctacaggagatgctgagcttactcggcctagaaacataccaggtgcaaaaactgagtttacaagattcattacagatctcctttgatagtatgaagaattgggcccctcaagtacccaaagatttgccgtggaacttcctgcggaagttacaagcactcaacgcggacgcgcggaatactacaatggtgcttgacgtgctcccagacgcccgacccgtggagaaggagagccagatggaggaagaaatcatttattgggaccctgccgacgaccttgctgctgacatctacagtttttcagagttacccactccagatacaccggtgaaccctctggatctgctttgcgcccttttactctctagcgattcctttttacagcaggaaattgctctgaagatggcactgtgtcagttcgcgctccccctcgtactgccagacagtgagaatcactaccacaccttcctgctgtgggccatgcggggtattgtaaggacttggtggagtcagccccctcgcgggatggggtcgtttcgggaggatagcgtggtactcagccgggccccagcattcgccttcgtccggatggatgtatctagcaactcaaagtctcagctgttaaacgctgtgctgagccctggccacaggcagtgggactgtttttggcaccgcgatctaaacctggggacaaatgccagagaaattagcgatggattggttgagattagctggttttttccatcgggtcgcgaagatctggatatattccccgagcccgtggcattcttgaatctcagaggagacataggatcccattggctgcagttcaagttactcactgagatctcatcagctgtattcattttgacggataacatctccaaaaaagaatacaaactgttgtattctatgaaagaatcgaccactaagtattatttcatcctctcgccttaccgagggaagcgaaatacaaatctgcgctttctcaacaaactgatccccgtcctcaagatcgaccactctcacgtcttggtcaaggtctcatccaccgacagtgactcattcgtcaaacggatcagagctatcgtggggaacgtgctccgtgcaccgtgccgtagggtgagcgtggaagatatggcacatgccgcccgcaagctcggcctgaaagtcgatgaggattgcgaggagtgccagaaggctaaagacagaatggagaggatcactcgaaagatcaaagactccgacgcgtaccggcgcgatgagcttaggttgcagggagatccatggaggaaagcagcccaggtcgagaaagagttctgccagctgcagtgggccgtcgacccgccagaaaaacacagggccgaattacgaagaaggctgttagagctccggatgcagcagaatgggcatgaccccagctccggtgtccaggagttcattagcgggatttcttctccgagtctaagtgagaagcaatatttcttgagatggatggagtggggacttgcccgtgtggcacagcctcggctcaggcagcctcctgagacacttctgaccctgcgccctaagcacggtggtacgacagacgtcggcgaacccctgtggccagaacccttgggagttgaacactttttgcgggagatgggacagttttatgaagctgagtcttgtctcgttgaggccgggcgcttacccgccggacagcgccgctttgctcacttccctgggttagcatccgagctcctgctgactggccttcctctagaacttatcgatggcagcaccctgagcatgccggtgcgctgggttactggcttgctgaaggaactgcacgtgagactggagagacggtcacgacttgtggttttatccacagtaggagtcccaggcacggggaaatctaccttgttgaatactatgttcggactacgctttgccactggcaaaagctgtgggcctagaggcgcttttatgcagctgattaccgtggccgaggggttttctcaggatcttggctgcgaccacatccttgtgatcgattccggaggattgataggaggcgctctcactagtgccggggatagatttgagttagaggcttcattggccaccctcctgatggggctgagcaatgtgaccgtgatcagtttggcagagaccaaagacatccccgctgccattctgcacgccttcttgcggttagagaagaccggacatatgccaaattaccagttcgtctaccagaaccttcacgatgtctcagtaccaggtcctcgaccacgggataagagacagttgctggacccacccggtgacctgtctcgggccgctgctcaaatggagaagcaaggagacgggttccgcgcactcgccgggctcgcattttgcgatccagagaaacagcacatctggcatatcccaggcctgtggcatggggccccacccatggctgctgtatcacttgcttattctgaggccattttcgaactcaagcggtgcctgttagaaaacatacgcaacggtttgtccaaccagaataagaacattcagcagctaatcgagttggtcagaaggctatag

SEQ ID NO: 210922 - DNA, 369 bp, synthetic construct
  misc_feature 1..369: note = Description of Artificial Sequence: Synthetic coding sequence
  source 1..369: mol_type = other DNA
atggagggcgacgactgcgagttccggtacggcgacggcaccaacgaggcacaggacaacgacttcccaaccgtggagcgatcgagactccaggaaatgctttcccttcttggccttgaaacatatcaagtccagaaactttctcttcaggatagcttacagatctccttcgatagcatgaagaattgggcgcctcaggtgcccaaggacttgccatggaacttcttgcgcaagctgcaggcactgaacgctgatgctagaaacaccaccatggtgctggacgtgttgccagacgcgaggccagtggaaaaagagagccaaatggaggaagagataatctactgggaccccgcagacgacctggcttag

SEQ ID NO: 210923 - DNA, 1623 bp, synthetic construct
  misc_feature 1..1623: note = Description of Artificial Sequence: Synthetic coding sequence
  source 1..1623: mol_type = other DNA
atggcctgggtgctgaagatggacgaggtgatcgagagcggcctggtgcatgactttgatgcctccctctccggcatcggtcaagaactgggagccggggcgtactctatgagtgacgttcttgccctccctatctttaagcaagaggacagctcactgcccttggacggtgagactgagcatcccccttttcaatacgttatgtgtgcagctactagccccgctgtgaaacttcacgacgagactctgacttatctcaatcagggccaatcatacgagatccgaatgttggataatcgtaagatgggcgatatgccggagattaatggcaagttggttaagagtatcattcgggtggttttccacgacaggcggctccagtacaccgagcatcaacagctagagggatggaaatggaacagacctggagatagacttcttgacctggacatacccatgtccgtgggcatcatagacacgcgcactaacccctctcaactgaacgccgtggagttcctgtgggatcctgctaaacgcaccagcgcctttatccaggtgcactgtatatctactgagttcacgccaagaaagcacggaggggagaaaggtgtaccgttccgcattcaggttgacacttttaaacagaatgaaaatggagagtatacagaccaccttcacagcgccagctgtcagatcaaagtgtttaagccaaaaggtgctgatcgcaagcagaagactgatagggagaagatggaaaagcgcacagcacatgaaaaggagaagtaccaacccagttatgacacaaccatattgactgagatgaggttggagcccatcatcgaggacgctgtggaacacgagcaaaagaagagctccaaacggaccctgccagcggattatggagattcactggccaagcgggggagctgctccccctggccagacgctccaaccgcatacgttaataacagtccttcaccagcccctacttttacgagccctcagcagtctacttgttctgtacctgatagcaattccagttcgcccaaccaccaaggtgatggcgccagtcagaccagcggagaacagattcagccttctgcgactatccaggagactcaacagtggctgctgaaaaaccgattttcatcctacactaggttgttctccaacttctccggcgcagatcttcttaagttgaccaaggaagacctcgtgcaaatctgcggtgctgccgacggaatccggctgtataatagcctgaaatctcgctctgtgcgacccaggctcacaatctacgtttgccgcgagcagccctcgagtaccgtgctgcagggacagcagcaggccgctagcagcgccagcgaaaatggcagcggagctccatatgtgtaccatgccatatacttggaagagatgattgccagcgaggtagcacgtaagctcgccctcgtgttcaacatcccactgcaccagattaaccaggtgtaccgccaaggaccgaccggcatccacattttagtcagcgaccagatggtgcagaactttcaggatgagtcctgcttcctctttagtaccgtgaaagccgagtcctctgatggcattcacattatactgaaatag

SEQ ID NO: 210924 - DNA, 1623 bp, synthetic construct
  misc_feature 1..1623: note = Description of Artificial Sequence: Synthetic coding sequence
  source 1..1623: mol_type = other DNA
atggcctgggtgctgaagatggacgaggtgatcgagagcggcctggttcacgactttgatgccagcctttccggaattggtcaggagttaggcgccggcgcatacagcatgtccgacgtactcgcccttcccatattcaagcaggaagactcaagcctgccactcgacggagaaactgagcatcccccattccaatatgtgatgtgcgctgctaccagtcccgccgtgaaattgcatgacgagacattaacatatttgaaccagggtcagagctacgagatcaggatgctagacaatcgcaagatgggtgacatgccggaaattaatggcaaactggtgaaatccatcatccgtgtggtgttccacgacagacgactccaatatactgagcaccagcagcttgaaggctggaaatggaaccgtcctggagacagactcctggatctggacattccaatgagtgttggtattatcgacacccgcacgaacccctcacaactgaatgcggtcgagtttctgtgggatcctgccaagaggacgtctgcctttatccaagtgcactgtatctccacagaattcacccctagaaaacacggaggagagaagggagttccgttccgcatacaggttgacaccttcaagcagaatgaaaatggagagtatacggaccacctccactccgcctcctgccagatcaaggtttttaaacccaagggagccgatcgtaagcagaagaccgatcgggagaagatggaaaaacgtacagctcacgaaaaggaaaaatatcagccctcgtacgatacaactattctgactgaaatgagactcgagccaatcatcgaggacgctgtggagcatgaacaaaaaaagtcgagtaagagaaccctccctgccgattatggcgattccctggctaagaggggttcctgttctccgtggccggatgcccccaccgcgtatgtgaacaatagccctagcccggccccaaccttcacaagtccgcagcagagcacatgcagtgtccccgatagcaactcttcaagtcccaatcaccagggcgacggcgcctcccagacatccggtgaacagattcagcctagcgccactatccaggagacccaacagtggctgctgaagaatcgctttagctcctatacacgcctattttctaatttcagcggtgccgacctgcttaaactgaccaaagaagacctggtccaaatatgcggtgccgcggacggcattagactgtataactctctgaagtcccgaagtgttaggcctaggctgacgatctatgtgtgccgggagcagcccagctccacggtgttgcaagggcagcagcaggctgcgtccagcgcttccgaaaacggctctggggctccttacgtgtatcacgctatctacctggaggagatgattgcatccgaggtcgctagaaaacttgcgctcgtattcaacatccctcttcaccaaataaaccaggtgtatcgacagggacccaccggcattcatatcttggtatcagaccagatggttcagaattttcaagacgagagctgttttctgttttcaaccgtgaaagctgaaagttccgacggcatccacattatcctgaaatag

SEQ ID NO: 210925 - DNA, 1515 bp, synthetic construct
  misc_feature 1..1515: note = Description of Artificial Sequence: Synthetic coding sequence
  source 1..1515: mol_type = other DNA
atggcctgggtgctgaagatggacgaggtgatcgagagcggcctggtgcatgactttgacgcttcactctccgggatcggtcaggaactcggcgcgggcgcatacagtatgagcgacgtgcttgcacttccaatattcaaacaagaggatagctcacttccactggatggggaaacagagcacccaccatttcaatacgtgatgtgtgcggcaacctcccctgcagtcaaactgcatgatgaaactctaacttacttgaaccagggccagtcttatgagattagaatgctggataaccgcaaaatgggcgatatgcccgagataaatgggaaactggtaaaatccattattcgggtggtgtttcacgatcgcaggctgcagtacactgagcaccaacagcttgaaggctggaagtggaaccgacctggggatcgactattggatcttgatatccccatgagcgtcggaatcatagacaccaggactaacccctctcagcttaatgcggtagagtttctttgggaccccgctaagagaacctctgcttttatacaagtgcattgcattagcaccgagtttaccccgagaaagcacgggggagagaaaggggtgcctttccgtattcaggtagacacattcaaacaaaatgagaacggggaatatacagaccatctgcactcagcatcctgccagatcaaggttttcaagccaaaaggggccgatcgcaagcaaaaaaccgatagagaaaagatggaaaaacggacagcccatgagaaggagaaatatcagccatcatatgatacaacaatcctgacggaatgctccccgtggccagacgcccccacagcctacgtgaacaatagtccatctccggcgcccaccttcaccagcccacagcagagcacctgcagcgtgcccgatagcaattcttctagtcccaatcaccaaggagatggcgctagccagaccagcggcgagcaaatccagccatccgccaccatccaagagacccagcagtggcttctcaagaaccgcttttccagctacactcggcttttttctaatttcagtggcgcagacctgttgaaattaaccaaagaggacctcgtgcagatctgcggggcagccgatggaatccgactctataacagcttgaaatctcgttcagtgcgcccacgcctcactatttatgtgtgtagggaacagccttcatcaaccgttctgcaaggccaacaacaagccgcctcctcagcatcagagaacggctctggcgcaccttatgtgtaccatgctatttatctggaagagatgatcgcctctgaggttgccagaaaactggccttagtttttaatattccgctacatcagataaatcaagtctatcggcagggaccaacgggcatccatattttagtgtctgaccagatggtccagaatttccaggatgagtcatgtttcttgttctccactgtgaaagcggaaagcagcgacggaatccatataatcctaaagtag

SEQ ID NO: 210926 - DNA, 447 bp, synthetic construct
  misc_feature 1..447: note = Description of Artificial Sequence: Synthetic coding sequence
  source 1..447: mol_type = other DNA
atggcctgggtgctgaagatggacgaggtgatcgagagcggcctggtgcacgacttcgatgccagcctgagcgggattgggcaggaactgggggccggcgcttactccatgtctgatgtacttgcgctgcccatcttcaaacaggaagatagctccttaccactcgacggagagactgaacaccccccatttcagtacgtaatgtgtgcagccacatcccctgctgtgaaattgcacgacgagaccctaacatatctgaaccagggacagtcgtacgagatacggatgctggacaataggaagatgggagacatgccagagattaatggtaaactcgtcaaatctattatacgcgtggtgttccacgatcggcggctgcagtacactgaacaccagcagctcgaagggtggaagtggaaccgccctggagacaggctgctggattag

SEQ ID NO: 210927 - DNA, 2295 bp, synthetic construct
  misc_feature 1..2295: note = Description of Artificial Sequence: Synthetic coding sequence
  source 1..2295: mol_type = other DNA
atgaacggcgaggccgactgccccaccgacctggagatggccgcccctaagggtcaggatagatggtctcaagaggatatgctgaccctgctcgaatgtatgaagaacaaccttccgagcaacgattcgagcaagtttaaaaccaccgaaagtcatatggattgggaaaaagtcgcctttaaggactttagcggcgacatgtgcaagttgaagtgggtggaaatctccaacgaggtgcggaaatttcgtactctgaccgaactgattctggacgcacaagaacacgtgaaaaatccttacaaaggtaaaaaacttaaaaaacacccagacttcccaaagaaacctctgaccccttactttcggttctttatggaaaagcgggccaagtacgccaagctgcaccctgagatgtcaaacctggatctgaccaagatcctgtccaagaagtataaagaacttcctgaaaaaaagaaaatgaaatatatccaggatttccaacgtgagaagcaggaatttgaacgaaacctagctcgattcagagaagatcacccagacctcatacagaacgctaagaaatctgacattccagagaaacccaaaacacctcagcagttatggtatactcacgaaaaaaaggtttatcttaaggtgcgccctgacgcgacaaccaaggaggtgaaggacagtctcggcaagcaatggtctcagctgagtgacaaaaagcggctgaaatggatccacaaagccctcgaacagaggaaggagtatgaagaaatcatgcgcgattacattcaaaagcacccggagctgaatatctctgaggagggaatcaccaaatccaccctcacaaaggctgagcgacagctgaaggacaaatttgatggccggcctactaagccccctccgaacagttatagtctgtactgtgctgaactcatggcaaacatgaaggatgtgccgagcacagaacggatggtactctgctcccaacagtggaaattgctatcacagaaagagaaggatgcgtatcacaagaagtgcgatcagaaaaaaaaggactacgaagttgagctgcttagattcttagagagtctcccagaggaggaacaacagagggtgctcggagaggaaaagatgttgaacattaacaaaaagcaagccacatcaccggcgagcaagaaacccgcccaggagggagggaagggcggaagtgaaaagcccaaaagacccgtgtcagcaatgttcattttcagcgaagagaagcggcggcagttgcaggaagagaggccagaactatcggagagtgagcttacccgtctgctggcacggatgtggaatgacctgagcgagaagaaaaaggccaagtataaagcccgagaggctgctcttaaggctcagtcggagcggaaacctggaggagaaagggaggagagagggaaactgccagagtccccgaaacgcgcagaggagatatggcagcagtctgtaatcggcgactacttggcgagattcaagaatgaccgtgttaaggccttgaaggccatggagatgacatggaacaatatggaaaaaaaagagaagctgatgtggattaagaaggcggcagaagatcagaagagatatgaacgggagctcagtgagatgagagcgcccccagctgccacgaactccagcaaaaagatgaagtttcaaggagagcctaaaaaacctcctatgaacggttaccagaagttcagccaggagctgttgagtaacggcgagctcaatcacctcccactgaaagagagaatggtcgaaatcgggtcccgctggcagagaatctcccagtcacaaaaggagcactataagaaactggctgaggaacagcagaaacaatacaaagtgcacttggatttgtgggtcaagagcctgtctcctcaggaccgggcggcctataaagagtacattagtaataaaaggaagagtatgactaagctcagaggacctaatcccaaatcatcccggactacactgcagagtaagtcagaatctgaggaggacgatgaagaggatgaggatgatgaagatgaggacgaagaggaagaagatgatgagaacggtgactcttccgaggatggcggcgactcgagcgagtcatcaagtgaagacgaaagcgaggatggcgatgaaaacgaggaagatgatgaggatgaagatgatgacgaagatgatgacgaagacgaagataacgaatctgagggtagctccagcagcagcagctcttctggcgactcctcagactcggacagcaattag

SEQ ID NO: 210928 - DNA, 2184 bp, synthetic construct
  misc_feature 1..2184: note = Description of Artificial Sequence: Synthetic coding sequence
  source 1..2184: mol_type = other DNA
atgaacggcgaggccgactgccccaccgacctggagatggccgccccaaagggtcaggaccgatggtctcaggaggacatgcttactcttctggaatgcatgaagaataacctgccgtcaaacgatagttcaaaattcaaaactacggagtcacatatggactgggagaaggtggctttcaaggacttttctggagatatgtgcaagttaaagtgggtcgaaatttccaatgaagttcgcaaatttcgcacccttactgaactcattctggatgcccaggagcatgtgaagaacccttataagggaaagaagctgaaaaaacaccctgacttcccaaaaaagccactcaccccttattttaggttcttcatggagaaaagggcaaaatatgccaagttgcaccccgaaatgtccaacctggatttgaccaagattttgtcgaaaaagtataaagaactgcccgaaaagaaaaagatgaagtacatacaggattttcagagagaaaagcaagagttcgagagaaacctcgcacggttcagagaggaccacccggatctgattcagaacgctaagaaatcagacatcccggaaaaaccaaaaacacctcagcaactgtggtacacacacgagaagaaggtgtatcttaaggtcagacccgacgaaatcatgcgcgattacattcaaaaacatccagagctgaatattagtgaagaaggcattacaaaaagcacgcttacgaaggcagaacgccagttaaaagataaattcgatggcaggcccacaaagccaccacctaacagctacagcctatattgcgcggagctgatggccaatatgaaagacgtcccctccacagagagaatggtgctgtgctcacagcagtggaaattattgtcacaaaaggagaaggatgcataccacaagaaatgcgaccaaaaaaagaaggattacgaagtggagctgctcagatttttagagtcattgcccgaggaagagcagcagcgcgtcctcggtgaggagaaaatgttgaacatcaacaaaaagcaagccacttcacccgctagtaaaaagccagcccaggaggggggcaaagggggctctgagaagccaaaaaggccagtatccgcaatgtttatttttagcgaagaaaaaagaaggcagcttcaggaagagcgtccagagcttagcgaaagcgagctcacccgcctcctagctcgaatgtggaacgacctctccgaaaaaaaaaaggcaaaatacaaagcccgtgaggcagctctgaaggcccagagcgagcgcaagcctggcggggagagggaggaacgtggtaaattgccagagtctcccaagcgagccgaagaaatttggcagcagtccgtgattggcgactaccttgcccggttcaaaaacgatcgtgtgaaggcactgaaggctatggaaatgacatggaataacatggagaaaaaggagaagctcatgtggatcaaaaaggctgccgaggaccagaagcgctacgaacgcgaactgtccgagatgagggccccccccgctgccactaactcaagtaagaagatgaaatttcagggcgaaccgaagaagcctcccatgaatgggtaccagaaattctctcaagaactgctgagtaacggggagctgaaccatttgcccctgaaagaacggatggtagaaattggctctcgatggcagcgaattagtcagagccagaaggaacactataaaaagctcgcagaggaacagcagaagcagtacaaagtacacctcgacctgtgggtgaagagtctgagtcctcaggatcgcgccgcgtacaaggagtatatctcaaataagcggaaaagtatgactaagcttaggggtcccaacccaaaaagcagccgaactaccctgcagtctaagtcagagagtgaagaggatgacgaagaagacgaggatgacgaagatgaggacgaggaggaggaagacgatgagaacggagactcctcagaggacggaggtgattcatcagagagctcctccgaggacgagtcggaagatggagacgaaaatgaagaggatgacgaggacgaggatgacgatgaggacgacgatgaggatgaggataatgagtctgagggatcctcatccagcagcagttcttccggagatagctctgactccgactccaactag

SEQ ID NO: 210929 - DNA, 2184 bp, synthetic construct
  misc_feature 1..2184: note = Description of Artificial Sequence: Synthetic coding sequence
  source 1..2184: mol_type = other DNA
atgaacggcgaggccgactgccccaccgacctggagatggccgcccccaagggtcaggaccggtggtcccaagaagacatgctaacattgttagagtgcatgaaaaacaatctgcccagtaatgattcaagcaagtttaagacgacagaatcacacatggattgggagaaggttgctttcaaggatttctctggagacatgtgtaaactgaaatgggtcgaaatcagcaatgaagtgcgcaagtttcgtacattaacagagctcatcttagacgcccaggaacatgtgaagaacccttacaagggaaaaaaattaaaaaaacatcccgatttccccaagaaacctttgaccccctacttccggttcttcatggagaagagagctaaatatgcaaaactccaccccgagatgtccaatctggatcttaccaaaatactctcaaagaaatataaagagctccctgagaagaaaaagatgaagtatatccaggattttcagcgcgaaaagcaggagttcgagcgaaacctagccaggttccgcgaagaccaccccgacctgattcagaatgccaaaaagagtgacatcccagagaagcccaaaaccccccagcagctttggtatacacacgaaaaaaaggtatacctcaaggtgcgtccggatgaaatcatgcgcgattatatccagaagcaccctgagctcaacatctcagaagaggggattaccaaatctacattgacaaaagccgaacggcagcttaaagataagttcgatggccgccctaccaaaccaccaccaaacagctactccctgtactgtgccgagttgatggcgaatatgaaggacgtgccctcaacggaaaggatggtcctctgctcccaacaatggaaactgctctcccagaaagagaaagatgcttatcataagaaatgtgatcagaagaaaaaggactatgaagttgaactgctgcgtttcctggaatcccttccggaagaggagcagcaacgggttctgggcgaagaaaagatgttaaatatcaataagaagcaggcaacgagtcctgcatctaaaaaacctgcccaggagggtggaaaagggggctccgagaagcctaaaagacctgtttctgccatgtttattttctccgaggagaagcggcggcaattgcaggaggagaggcctgagctctctgagagtgaattaacaaggcttctcgcccgaatgtggaatgatttgagtgaaaaaaaaaaagcaaagtataaagccagggaagccgcactgaaagcacagtctgaaagaaaaccgggcggggagcgggaagaacgcggaaaactgcccgaaagccctaaaagagcagaggagatctggcagcagagcgtcatcggtgactacctggccagattcaagaacgaccgtgttaaagccctgaaggccatggagatgacatggaataatatggagaagaaggagaagctgatgtggattaaaaaggctgcagaagatcaaaagaggtacgagcgcgaactgtccgagatgcgtgcaccccctgccgccacgaattccagcaagaagatgaaattccaaggggaaccaaaaaagccgcccatgaacggatatcagaaattttcccaggaactgctcagcaatggtgaacttaatcatctgccactgaaggaaaggatggttgagatcggctcacgctggcagagaatctcacagagccagaaagagcactacaaaaagctggcagaggaacaacagaaacagtacaaagtccacctcgatctgtgggtcaagtccttaagccctcaggatcgggcagcttacaaggagtacatcagtaataagcgaaagagcatgactaaattacggggccccaaccctaaaagttcacgcaccactctgcaatcgaaaagcgaaagcgaggaggacgatgaagaggacgaagacgatgaagatgaggatgaggaggaagaggatgacgaaaacggcgactcttctgaggacgggggtgactcatcagaatcctcttctgaagatgaatctgaggacggcgacgagaacgaggaggatgacgaagatgaggacgacgatgaggacgatgatgaggacgaggacaacgagtcagagggctcttctagttcgtccagctcatctggagattcatcagatagtgattctaactag

SEQ ID NO: 210930 - DNA, 2295 bp, synthetic construct
  misc_feature 1..2295: note = Description of Artificial Sequence: Synthetic coding sequence
  source 1..2295: mol_type = other DNA
atgaacggcgaggccgactgccccaccgacctggagatggccgcccccaaaggacaggacagatggtcccaggaagacatgctgactcttttggagtgcatgaaaaataaccttccttctaacgactcatctaagttcaagacaacagaatcacatatggattgggagaaggtggcgtttaaggatttctctggtgatatgtgtaagctgaaatgggtggagataagcaacgaggtcaggaagtttcggacactgaccgagttaatcctggacgctcaggagcacgtcaagaacccgtacaaggggaagaaactgaaaaaacaccctgattttcccaaaaaacccttaacaccttatttcagatttttcatggagaagcgggcaaagtacgccaagctgcatcctgagatgagtaacctggatcttacaaagatcctgtcaaaaaagtataaagaactccctgagaaaaaaaagatgaagtacatccaggattttcagagagaaaaacaggaatttgaaaggaacctggcccgtttccgagaagatcatcctgatctcatacagaacgctaaaaagagtgacattcctgagaaacctaaaactcctcagcagctgtggtacacacatgagaaaaaagtgtacctaaaggtccgccccgacgctacaactaaggaggtgaaagattccctggggaagcagtggtcacaactttcagacaagaagagactgaagtggattcacaaggccctggaacagcgcaaagaatacgaagagatcatgcgcgactatattcagaagcatcccgaattgaacatttctgaagagggtatcacgaaaagcacacttactaaggccgagcgccagctgaaagacaaatttgacggcaggcctactaagccgccacctaattcatactcactttattgtgcggagctgatggctaatatgaaggatgtcccgtcaaccgagagaatggttttatgttcccagcaatggaaactcttgagtcagaaggagaaagacgcatatcataagaagtgtgaccagaagaaaaaggactatgaagtggagctgcttagatttctggagtccctcccagaggaagaacagcagcgcgtcctcggagaggaaaaaatgctcaacataaacaagaaacaagccacatccccggcgagtaagaaaccggcccaggaaggcgggaagggtggatcagaaaaacccaaacgaccagtgtctgcgatgttcatattttcagaggaaaaacgaaggcagttgcaggaggagcggcctgaactctccgagtcagaactgaccagactgctcgctcgtatgtggaatgatctcagtgaaaagaagaaagccaaatacaaggccagggaagctgccttgaaagctcagagtgaacgaaagcccgggggtgaaagggaagagagagggaagctaccggaaagtcctaaaagggcagaggaaatatggcagcagagcgtcattggcgattacctggcacgctttaaaaatgatcgcgtgaaagccctgaaagccatggagatgacgtggaataatatggaaaaaaaggagaaactgatgtggatcaagaaggccgcagaggatcaaaagcgatacgagagagaactgtctgagatgcgcgctccccccgctgcaacaaattctagtaaaaaaatgaaatttcagggtgagcctaaaaaaccacctatgaatggataccaaaagtttagtcaagagctgctctcgaacggagaattaaatcacctgcctctgaaggaaaggatggtcgagattgggagccgctggcagcgcatctcccagagccaaaaggagcactataaaaagctggctgaagagcagcagaagcagtacaaagtgcaccttgacctgtgggtgaaatctttatcgcctcaagaccgggccgcatataaagaatacatttccaataagcggaagtcaatgaccaagctgcgtggtcctaatcccaagtcttcccgcactactctccagagcaagtcagaatcagaagaggatgatgaagaagatgaggacgacgaggatgaagacgaggaggaagaagacgacgagaatggagactcgagcgaagatggaggagactctagtgagagttcaagcgaagatgaatccgaggatggagacgagaacgaggaagacgacgaagatgaggatgatgatgaagacgacgacgaagatgaggacaacgagtcggaaggttcttcctccagctcctccagcagcggtgactcttctgacagtgacagcaactag

SEQ ID NO: 210931 - DNA, 2184 bp, synthetic construct
  misc_feature 1..2184: note = Description of Artificial Sequence: Synthetic coding sequence
  source 1..2184: mol_type = other DNA
atgaacggcgaggccgactgccccaccgacctggagatggccgcccctaagggccaagacagatggagccaggaggatatgcttacactgctagagtgtatgaagaacaacctgccgagtaatgattccagcaaattcaagaccacggaatcacacatggattgggagaaggtcgccttcaaggactttagtggcgatatgtgcaaactgaagtgggtcgagatctctaacgaggtgagaaaattccgcaccttgaccgaactgatccttgatgctcaggagcacgtaaagaacccttataaaggcaaaaaactaaagaagcacccagactttcctaaaaagccgctcactccgtacttccgattttttatggagaagagggccaaatatgcaaaactccaccctgaaatgtctaatctggacctgacgaagatcctgagcaagaaatataaggagcttcccgaaaagaaaaagatgaagtacatccaagactttcaaagagaaaaacaggagttcgagcgaaacttggctcgatttcgcgaagatcaccccgatctgattcagaatgccaagaaatctgacattccagagaagcccaaaaccccgcagcagttgtggtacacccatgagaagaaagtctacctcaaagttaggcctgacgagataatgcgggattatatccaaaaacaccccgagcttaacatatccgaggaaggaatcactaagagcaccctgaccaaggctgagcgtcagctcaaagataagttcgacggtcggccaacaaagcctccaccaaactcttactctctctactgcgcggagttaatggccaacatgaaggacgtcccaagtaccgagagaatggtgctttgctcccaacagtggaagcttttgtcacagaaggaaaaggacgcttatcataagaagtgcgaccaaaagaaaaaagattatgaggtcgagctcctgaggtttctggaatctctccccgaagaagaacagcaacgcgttctaggagaggagaagatgctgaatatcaacaaaaagcaggcaacatcccccgccagtaagaagccggctcaggagggcggtaaaggcgggtccgagaaaccaaaacggcccgtgagcgcaatgttcattttctcggaggaaaaacgacgacaattgcaggaggagagacctgagctctccgagtccgagttaaccaggctgttggcgaggatgtggaacgacctgtccgagaagaaaaaagccaagtacaaagcgcgcgaggcagctcttaaggcacagagcgagcggaagccgggcggcgagcgtgaagagcgcggtaagctgccggagtccccgaaacgtgccgaagagatctggcagcagagtgtcatcggcgattatctagcccggtttaagaacgaccgcgttaaggccttgaaagctatggaaatgacatggaataatatggaaaaaaaggagaaactgatgtggattaaaaaggcggcggaggaccagaagaggtacgagagagagctttccgaaatgcgggcacctccggcagcaaccaattcctctaagaagatgaaatttcaaggtgagcctaaaaaacctcccatgaacggttatcagaagttttcccaggagttgctgagtaacggggagctcaaccacctcccgctgaaggaacggatggtggagattggttctagatggcaaaggattagccaatcgcagaaagagcactacaaaaaactggcagaagagcagcaaaagcagtacaaagttcatctcgacctctgggtgaagtccctgtcaccccaggatagggccgcttataaggagtatatctcaaataagcgaaaatctatgactaagttgcgagggcctaaccccaaatcgtcaaggacgacgctgcagtccaaatcggagagtgaggaagacgatgaagaggatgaggatgacgaagacgaggatgaggaagaggaagacgacgaaaatggggactcatctgaagacggtggcgattcctccgaatcatcatccgaagacgagagcgaggacggggacgagaacgaggaggacgacgaggacgaagatgatgacgaggatgatgacgaagatgaagacaatgagtcggaggggtcaagctcaagtagctcttctagcggcgatagttccgatagcgactccaattag

SEQ ID NO: 210932 - DNA, 2295 bp, synthetic construct
  misc_feature 1..2295: note = Description of Artificial Sequence: Synthetic coding sequence
  source 1..2295: mol_type = other DNA
atgaacggcgaggccgactgccccaccgacctggagatggccgcccccaagggacaagaccgctggagccaggaagatatgcttacgctactggagtgcatgaaaaacaacctgccatctaacgattctagcaaattcaaaactactgaatctcatatggattgggagaaagttgcatttaaggatttctcaggagacatgtgtaaactgaagtgggtggaaatttcgaacgaggtgaggaagttccgaactttgacagaactgattttagatgcacaggagcacgttaagaatccttacaaaggaaaaaagctgaaaaagcacccggatttccctaagaaaccactgacgccatacttccgctttttcatggaaaagcgcgcaaaatacgccaagctgcaccctgagatgtccaacttggacttgactaagatcctgagtaaaaagtacaaagaactgcctgaaaagaagaagatgaagtatatacaggattttcagcgcgagaaacaggaattcgaacgcaatttagcgcgatttagggaggatcatcctgatctgattcaaaatgctaagaagtctgatataccagaaaagcccaagacaccccaacagctgtggtacacccatgaaaagaaggtgtacctgaaagttcggcctgacgccacgaccaaagaagttaaagactcactggggaagcaatggagccagctgagtgacaagaaacggctaaaatggattcataaagcccttgaacagaggaaagaatatgaggaaattatgcgggattacattcaaaaacatcctgaactgaatatttcggaggaggggatcaccaagtccactctgacgaaggcagagcgccagttaaaggataaattcgatggccgcccaactaagccacccccaaattcttatagtctttattgcgccgagcttatggccaacatgaaggacgtgcccagtacggagaggatggtgctgtgttctcagcaatggaaattactttcccaaaaggagaaagatgcctatcataagaaatgtgatcagaaaaaaaaagactacgaagtcgaactccttcgctttctcgaatcccttcctgaggaagagcagcagcgcgtcctcggagaagagaagatgctgaacattaacaagaaacaggctacctcaccagctagcaagaaacccgctcaggagggggggaaaggggggagtgaaaaaccgaagcggcctgtgagcgccatgtttatcttctccgaggagaaaaggaggcagctgcaagaggaaagacccgaactgtcagaatcagagttgacccggctgcttgccagaatgtggaacgatctttctgagaagaagaaggcgaagtacaaagccagagaagccgcactcaaggcccaatctgagcgtaagccagggggggaaagagaagaacgagggaagctgcccgaatctcccaaacgggccgaagagatatggcagcaaagcgttataggagattatttggccagattcaagaatgaccgtgtgaaagcactgaaagcaatggagatgacctggaacaatatggagaagaaagagaagctgatgtggatcaagaaagccgctgaagatcaaaagaggtatgagcgagagttgtccgaaatgagagctccacctgccgctactaattctagcaaaaagatgaagtttcagggtgagcctaagaaacctccaatgaacggctatcaaaaattttcacaggaactgctctctaacggggagctgaaccatctgcccctcaaagagcgaatggtcgagatcggatccaggtggcagagaatttcgcagagccaaaaggagcactataaaaagctcgcagaggaacagcagaaacaatacaaagttcacctggacctatgggtgaagtcgctgagtcctcaagatagggctgcatacaaggagtacatttccaacaagcgcaagagcatgaccaagcttcgcggccccaatcccaagtcctcacggacaacattgcagtccaaatccgagtcagaggaagacgatgaagaagacgaagacgacgaagacgaagacgaggaggaggaagatgatgagaacggcgactcgtccgaggatggaggcgacagctccgaaagttcttctgaggacgagtccgaggacggggacgaaaatgaggaggacgacgaagatgaggatgatgacgaggatgacgatgaagacgaggataacgaaagtgagggtagctcctcctcttcttcatcttccggtgattcctctgattccgatagcaactag

SEQ ID NO: 210933 - DNA, 2184 bp, synthetic construct
  misc_feature 1..2184: note = Description of Artificial Sequence: Synthetic coding sequence
  source 1..2184: mol_type = other DNA
atgaacggcgaggccgactgccccaccgacctggagatggccgccccgaagggccaggataggtggagccaggaggacatgttaaccctgctcgagtgcatgaagaataatctgccttcaaatgactcctcaaaatttaagacaacagagtcacatatggattgggagaaggttgcatttaaggatttctcaggtgatatgtgcaaactcaaatgggtcgagatatcaaacgaggtgcggaaattccgcacattaactgagctgatactggatgcccaggaacatgttaagaatccctataaaggcaagaaattgaaaaagcatcccgacttcccaaagaaacctctgacaccctacttcaggttcttcatggagaagagagccaagtatgcaaaactccatcctgagatgtcaaaccttgacctcacaaagatattaagcaagaaatacaaagaacttcctgaaaaaaaaaaaatgaagtatattcaggattttcagagagagaagcaggaatttgagaggaatctggcccgatttcgcgaggaccaccctgatctgatccagaatgcgaaaaaatcagacattccggagaagcctaagacgccccagcagctgtggtacacacacgagaaaaaggtatatctgaaagttcgacccgatgagataatgagagattatattcaaaagcatcctgagctcaacatcagcgaagaaggcataacaaaatctactctgacaaaggctgagagacagctcaaagataaatttgatggcagacctactaaaccgccaccaaacagttatagtctttactgtgctgaactgatggccaatatgaaggatgtgccttcaaccgagaggatggtactgtgctcacagcagtggaaactcttgagccagaaagagaaggatgcttaccacaaaaagtgcgatcagaagaagaaggattacgaggtagaactgctccggtttctagagtccctgccggaagaggagcagcagagagtcctgggagaagagaagatgctgaatattaacaaaaaacaggctacaagccccgcatcaaagaagcccgcccaggagggcggcaagggaggtagtgagaagcctaaaaggccagtgtctgccatgtttattttttcagaggaaaaaagaaggcaactgcaagaggaaagaccagagctgagcgagtccgagctgacaagactgctcgcgcgtatgtggaatgacttgagtgaaaagaaaaaagccaagtataaggcgagggaggcagcactgaaggcacagagcgagagaaagccgggcggggagagagaggagagaggcaagctgcctgagtcccctaagcgggccgaagaaatatggcagcagtccgtaattggagactacctggccagattcaagaacgatagggtgaaggctctgaaagcaatggaaatgacctggaacaacatggaaaagaaggagaaacttatgtggatcaagaaggcagccgaggatcaaaagagatatgagcgtgaactctcggaaatgcgggcaccgccggccgcaaccaacagctcaaaaaagatgaagttccagggcgagccgaaaaaacccccaatgaacggataccagaagttttctcaggagttactctcaaacggtgaactgaaccacctacccctgaaggaaagaatggtcgagattggaagccggtggcagagaatttcccagtctcagaaagagcactacaaaaaactggcagaggaacagcaaaaacagtataaggtgcacctcgacctctgggtgaaatcgctcagtccacaggatagagctgcctacaaagaatacatctccaacaaacgcaaatcgatgaccaagctccgcgggcctaacccaaagtcctcccgaaccaccttacaatccaagtccgaatcagaggaagatgacgaggaagatgaggatgacgaggacgaagacgaggaggaggaagacgacgagaacggcgactcttctgaagatggaggcgacagctccgaaagctccagtgaagacgaaagcgaggacggggacgaaaacgaggaggatgacgaagatgaagatgacgatgaggatgatgacgaagacgaagataacgagtcagaaggttcgagtagcagctcatcttcatccggagattcatcagattccgacagtaactag

SEQ ID NO: 210934 - DNA, 849 bp, synthetic construct
  misc_feature 1..849: note = Description of Artificial Sequence: Synthetic coding sequence
  source 1..849: mol_type = other DNA
atgaagggccagcagaagaccgccgagaccgaggagggcaccgtgcagatccaggagggtgccgttgctactggcgaggacccaacttcagtggctattgcctctatacagagcgccgccacatttccagaccctaacgtaaaatatgttttcagaacggagaatgggggccaggttatgtaccgggtaatacaggtctcagaggggcagctcgatgggcagacagagggcaccggggcaattagtggctatcctgcgactcagtccatgactcaggcagttatacagggtgctttcaccagcgatgatgcagtcgatactgaaggtacagcagcagagactcattacacttactttccaagtactgctgtgggggatggtgccggggggcagttttttgtgatgatgagccctcaggaagtgctccagggcggaagccagagaagcatcgccccaaggacccatccatactcccccaagagcgaggccccaagaactaccagggacgagaaaagaagggcgcaacataacgaagtcgagcgtagacgccgggataagattaataactggattgtgcaactctccaagattattcctgattgtagcatggagagtaccaagagcggccagtccaaaggaggcatcctgtccaaggcatgtgactacatacaggagctgcgccagagtaatcacaggttatcagaagagttgcaaggcctggatcagttacagctcgataatgacgttcttcgccagcaggtggaggatctaaagaataagaatctgctactccgtgcccagcttcggcaccatggtctggaagtcgtgatcaaaaatgactcaaactag

SEQ ID NO: 210935 - DNA, 933 bp, synthetic construct
  misc_feature 1..933: note = Description of Artificial Sequence: Synthetic coding sequence
  source 1..933: mol_type = other DNA
atgaagggccagcagaagaccgccgagaccgaggagggcaccgtgcagattcaggagggtgctgttgcaactggagaggatcccactagtgtcgcgattgcctccatccagagcgctgccaccttcccggacccaaatgtgaagtatgtcttccgaacagagaatggagggcaggtgatgtaccgggtgattcaagtgtcagagggtcagctcgacgggcagaccgaaggcactggcgcaatttccggctaccctgccacccaaagcatgacccaggctgtcatccagggggcgttcacgtctgacgatgcagtggacaccgaaggcaccgcggccgaaacgcattacacatactttccctcgactgccgtcggggacggtgccggcggcacaacgtcaggttcaaccgcagccgtggttacaacacaggggagcgaagcattactcggacaggccacacctcctggaacaggccagtttttcgtgatgatgagcccccaggaagtcttgcaaggagggtcccagcgttccatcgcaccccgtactcacccctatagccccaagtcagaggccccacgcacaacacgcgacgaaaagcggagggcccagcataatgaagtggagaggcgaagacgcgacaagatcaataactggattgtgcagttatctaagataatcccagactgcagcatggaatccacgaagtctgggcaatccaaagggggcatcttaagcaaggcttgtgattatatccaggaattgcgacaaagtaaccataggctgagcgaggagcttcaggggctcgaccaactgcagttagacaacgatgtactgcgccagcaggtggaggatctcaagaacaaaaatctgcttcttcgcgcacagttacggcaccacggcctggaggtggtcattaagaatgatagtaactag

SEQ ID NO: 210936 - DNA, 933 bp, synthetic construct
  misc_feature 1..933: note = Description of Artificial Sequence: Synthetic coding sequence
  source 1..933: mol_type = other DNA
atgaagggccagcagaagaccgccgagaccgaggagggcaccgtgcagattcaggagggagcggtggccacaggagaagatcccaccagtgtggcaattgccagcatacagtccgctgctaccttcccagatccaaacgtgaagtatgtctttcggactgagaatgggggacaagtaatgtatagagtcattcaagtgagcgaaggtcagctggatggtcagaccgagggcacgggggccattagcggctatcctgctacacagtccatgactcaggcagtaattcagggggcttttacatctgacgacgctgtggacactgaaggcaccgctgctgagacccactacacctacttccctagcaccgctgtgggggatggggcaggaggaaccacctcggggtctaccgcggcagttgttactacacagggcagtgaggcactgctagggcaggcaactccacccgggaccgggcagttcttcgtgatgatgtcacctcaggaggtgctgcaaggtggaagccagcggagcatcgccccacgaacacacccttatagccccaagagtgaggccccgcgcaccactcgtgacgagaagagacgagcacagcataatgaagtggagaggcgcaggagagataaaataaacaattggatcgtgcaattatccaagataatccctgattgctccatggagagcacgaagtctggccagagcaagggcgggatactgagtaaggcgtgcgactatattcaggagctgagacagtctaatcatcggttatccgaagaactgcaaggactggaccagcttcagctggataatgacgtgctgcgccagcaggtggaggaccttaaaaacaagaatctgctcctgcgtgctcagctgcgacatcacggactcgaggtcgttattaagaatgattcaaactag

SEQ ID NO: 210937 - DNA, 756 bp, synthetic construct
  misc_feature 1..756: note = Description of Artificial Sequence: Synthetic coding sequence
  source 1..756: mol_type = other DNA
atgtaccgggtgatccaggtgagcgagggccagctggacggccagactgaagggacaggggctataagtggataccctgccacccagagcatgacacaggcagtgatccaaggggcttttacaagcgatgatgccgttgacaccgaaggaactgcagctgagacgcattacacatacttcccctccacagcggtgggcgacggcgccggaggaacgactagtgggtcaactgcagccgtagtcacgactcagggcagcgaagctctcctgggacaagccacgcctccaggaaccggacaattctttgttatgatgtccccccaagaggttttacagggtggctcacaaagaagcatcgcccctcggactcatccatattctcccaagtctgaggctcctagaaccacacgtgatgaaaagcgacgcgcccagcacaatgaagtggagcgacggagacgagataagatcaacaattggatcgtacaactgtccaaaatcattccggattgctcaatggagagtaccaagtcgggccaaagtaaaggcgggattctgtcaaaggcgtgcgactacattcaggagctgcggcagtccaatcacaggctgagtgaagaactgcagggcttggatcagttacagctggataatgacgtcctgaggcagcaagtggaagatctgaagaacaagaacttactgttgagagcccagctcagacaccatggcctcgaagtggtgattaagaacgattcaaactag

SEQ ID NO: 210938 - DNA, 1155 bp, synthetic construct
  misc_feature 1..1155: note = Description of Artificial Sequence: Synthetic coding sequence
  source 1..1155: mol_type = other DNA
atggccggcgccgagtggaagagcctggaggagtgcctggagaagcatctcccgcttcccgatttacaggaggtcaaaagggttctatacggaaaggagttgcgcaagctggatctgccacgcgaggccttcgaggccgcttctagggaggatttcgaactgcaaggttacgcctttgaagccgccgaggagcagctgcggcgcccacgcatagttcatgtaggcctcgtacaaaataggattcccctgcccgcaaacgcgcctgtggccgagcaagtgtctgctctccaccgtagaatcaaggcgattgtggaagtggccgccatgtgtggtgtgaacatcatatgcttccaggaagcctggaccatgccctttgcattctgtacacgcgaaaagctgccctggacagaatttgccgagtctgcagaagatgggcctaccacacggttttgccagaaattagcaaagaaccacgacatggtggtggtgtcacccattctggagagggatagcgagcatggcgacgtgctgtggaatacagccgtggttatcagtaactccggcgccgtgctaggcaaaactcggaaaaatcatataccccgcgtgggcgattttaacgagtctacctactatatggagggaaacctagggcatcctgtgtttcagacacagttcggacgaattgccgtcaatatctgctatgggcgccatcaccccctgaattggttaatgtattccatcaacggagcagagatcattttcaaccccagcgctactattggggcgttgtcagaatctttatggccgattgaggccagaaatgccgcaattgctaaccactgcttcacgtgcgccatcaatcgggttggcacagaacattttccaaatgaattcacctccggcgacggaaaaaaggcgcaccaggacttcggctatttctatggttcgtcctacgtcgcagcccccgattccagcagaactcccggactgtctaggtctagagatggccttttggttgctaagttggacttgaacttgtgccaacaggtaaacgatgtgtggaacttcaagatgactggtagatacgaaatgtacgcgcgcgagttagccgaagctgtcaaatcgaattactccccgacaatcgtgaaggagtag

SEQ ID NO: 210939 - DNA, 951 bp, synthetic construct
  misc_feature 1..951: note = Description of Artificial Sequence: Synthetic coding sequence
  source 1..951: mol_type = other DNA
atgctgggcgaggcccccgccgccccccggctggccggcagcgaggcccgctccctgtggcagggaactcaggtgtcagccttacatcgacggattaaggcaatagtcgaagtggctgctatgtgcggggtcaacatcatttgtttccaggaggcctggactatgccattcgcattctgtaccagagagaagctgccctggactgagttcgctgaatctgcagaggacgggcccaccacacggttctgccagaaattagccaaaaaccatgacatggtcgtcgtgtccccaattctggagcgcgactctgaacatggggatgttttatggaacactgccgtggttatctctaatagtggggccgtgctaggaaaaacacgaaagaaccacatccctcgagtgggagactttaatgaaagcacttactatatggagggcaatctgggccatcccgtgttccagactcagtttgggcggatcgcagtaaatatctgctacggcaggcaccacccccttaactggctgatgtatagcatcaacggggccgagatcatcttcaaccccagcgcaacgatcggagccttgagcgagtcactctggccaatcgaggcacgcaacgcagcgattgcaaatcactgttttacatgtgccattaatcgagtgggaaccgaacactttccaaatgaattcaccagcggtgacggtaagaaagcccatcaggacttcgggtacttctacggtagctcctacgtagcagctccagattcttctaggaccccaggactgtcaagatcgcgggacggcctactagttgctaagctggacctgaatctgtgccagcaggtgaacgacgtgtggaatttcaaaatgacaggcaggtacgagatgtacgcccgcgagcttgctgaagccgtcaagtcgaactacagccctaccatagttaaagagtag

SEQ ID NO: 210940 - DNA, 561 bp, synthetic construct
  misc_feature 1..561: note = Description of Artificial Sequence: Synthetic coding sequence
  source 1..561: mol_type = other DNA
atggccggcgccgagtggaagagcctggaggagtgcctggagaagcacttgcctctgcccgacttgcaggaggtcaagagagtcctgtacgggaaggagctgcgcaaacttgacctccccagggaagcatttgaggcggcatcaagggaagactttgagcttcagggatacgccttcgaggctgcggaagagcagctccggcgcccccgaatagtccacgtcgggttggtccagaaccgtatacctctccctgccaacgctcccgtcgcagaacaggtgagcgccttgcaccggagaatcaaggcaatcgtagaggtcgcagccatgtgcggagtcaacatcatctgcttccaggaggcctggatcctgcggccccatcaccaggaacctcgacctccttgttgttatgcaccctcatgttgcttgatcccgtcagtgttcccacatcggtccgaatccattcgcagctctccaagcttgtaccatcatctcgtccaggcacccggctcttccccacttgcatttgtgatcccttcatcctggagtcccgtgccatcctag

SEQ ID NO: 210941 - DNA, 2955 bp, synthetic construct
  misc_feature 1..2955: note = Description of Artificial Sequence: Synthetic coding sequence
  source 1..2955: mol_type = other DNA
atggacgaccggtaccccgccctgcagcgggcccagctgcggctggacttcatccatgccaattccaccactcactccttcctcttcggcgccttagccgagctgttagataatgcgagagacgccggggccgagcgcctggatgtctttagcgtggacaacgagaaattgcaagggggattcatgctttgtttcctagatgacgggtgtggaatgtcccccgaggaggcctccgacatcatttatttcggaagaagtaagaagagactctccacactgaaatttataggccagtatggaaacggtttaaaatccggctcaatgaggattgggaaagattttatcctgttcactaaaaaggaagaaactatgacatgtgtttttttttctcagactttttgcgaggaggagagcctgagtgaagttgttgttcctatgccatcatggctgattcgtacgagggaatcagttacagatgatcctcagaagttcgctatggagttgagtatcatttataaatatagtcctttcaagaccgaggcagagctcatgcaacaatttgacgtgatctatggaaagtgcggaacactgcttgtgatttacaatctgaagttactactgaatggggaaccggaacttgatgttaagaccgataaggaagacattttaatggcaggtgcacttgaagatttccctgcccgatggtctttccgcgcatacactagcgttctgtatttcaacccatggatgcgaatcttcatacaggccaagcgcgttaaaaccaaacatctctgctattgcttatacaggccccggaagtacctgtacgtgacaagttccttcaaaggggcctttaaagacgaagtcaaaaaagccgaggaggcagtgaagatcgctgagagcatcctgaaggaggcacaaataaaggtgaaccagtgcgacagaacctccctgtccagcgcaaaggatgtcctgcagcgggcactcgaggatgtggaagcaaaacagaaaaacttgaaggagaagcagcgagaactcaagaccgccaggactctgtcccttttttacggcgttaacgtggagaatcggtcccaggctggcatgttcatctacagcaacaaccgactcatcaagatgcacgaaaaagtgggatcacagctcaaactaaaaagcctgttgggagctggggtggtcgggattgttaatatcccactcgaggtcatggaacctagtcataacaagcaggaattcctaaacgtccaggagtacaaccatttgctgaaggtgatgggacagtatttggttcagtactgcaaagacacaggcattaacaatagaaatctgacactattctgcaacgagttcggataccagaacgatatcgacgtggaaaaacccctcaatagcttccagtaccagcggcgccaggctatggggataccatttattatccagtgcgatctctgtctcaaatggcgagttctgcctagtagcacaaattaccaggagaaggaatttttcgacatatggatctgtgccaacaacccaaatagattagagaattcctgccaccaagttgagtgtcttccctcaattccccttggaactatgagtaccatctccccatctaagaatgaaaaggagaagcagctcagagaatctgtaattaagtaccagaacaggcttgctgaacagcaacctcagccacaattcataccagtggatgagattacagtgaccagtacttgcctgacaagtgcgcataaagagaatactaaaactcagaaaatccgcctcttgggcgatgatttgaagcatgaatcgcttagttcatttgaactttccgcatctaggaggggccaaaagaggaatatagaggagactgacagcgacgttgagtacatctcggaaacaaagattatgaagaaatcgatggaagagaagatgaacagccagcagcagcggatccccgtggcactgccagagaatgtgaaattggccgaaagaagtcaaagatcacagattgctaacattactacagtgtggcgggcacagcctacagagggatgtctgaaaaacgcccaggccgcaagctgggaaatgaaaaggaagcagtcactcaatttcgtggaggagtgtaaagttctgacagaggatgaaaataccagcgactcagatatcatcctggtcagcgataaatccaatactgacgtatcccttaaacaggagaagaaggagatccctttgctcaatcaggagaagcaggagttgtgcaatgatgtcctggcaatgaagaggtcctcttccctgccttcctggaaatcgctgcttaacgtccccatggaggacgtcaacctgtcttcaggtcatatcgcccgggtttctgtgtcgggctcttgcaaggtggcaagcagccccgccagtagccagtcaacgcccgtaaaggaaactgtgcgcaaactgaagagtaaactcagggagatcctcctctactttttccctgagcaccagttaccctccgaactggaggaacctgctctgagttgcgaactggagcagtgtccagaacaaatgaataaaaaattaaaaatgtgctttaatcagattcagaatacctatatggttcagtatgagaaaaaaatcaagaggaaattgcaaagcattatttacgatagcaacaccaggggcatccacaacgaaattagcctgggccagtgtgaaaataagcggaaaatctctgaggacaaactaaagaacttgcgcatcaaactagcactgttgctgcagaaactccagctgggcggccctgagggcgacctcgagcagactgacacgtacctggaggccctcctgaaagaggacaacctcctgtttcagaataatctgaacaaggtaactattgacgcccgccacaggctccccctggaaaagaatgagaagactagtgaaaactag

SEQ ID NO: 210942 - DNA, 618 bp, synthetic construct
  misc_feature 1..618: note = Description of Artificial Sequence: Synthetic coding sequence
  source 1..618: mol_type = other DNA
atgctggagatcctggagcagcagaagaaggtggacgccgagaccgtgggaagggtcaagcggttcatacaggaaaatgtgttcgttgctgccaatcacaatggcagtccgttaagtattaaggaggcccctaaggagctgtcatttggcgctagagccgaactgccacgaatccatcccgtcgcatctaaactgttacggctgatgcagaaaaaagaaactaatctatgtttgtcggccgacgtgtccctcgcccgggagctcctccaactggccgacgcactcggaccatctatatgcatgttgaaaactcatgtggatatcctgaacgatttcaccctggacgttatgaaagagctaatcacgctggcaaaatgtcatgaattcctgattttcgaggatcgtaagtttgctgatattggaaataccgtgaagaagcagtatgagggtgataacctggggcaacagtataactctccacaggaagttatcggaaaaagagggtcagatattatcatcgtgggcaggggcataatctctgcagcagacagactagaagcagctgagatgtaccgcaaggctgcctgggaagcatacctgagtagattgggcgtgtag

SEQ ID NO: 210943 - DNA, 1167 bp, synthetic construct
  misc_feature 1..1167: note = Description of Artificial Sequence: Synthetic coding sequence
  source 1..1167: mol_type = other DNA
atgctgatccggcggaaggagaccaaggactacggcaccaagcggttggtggaagggaccatcaatcccggagaaacatgtcttatcatcgaggacgtagtaacatcagggtccagcgtgttggaaactgtggaggtgctgcagaaggaagggctgaaggtgactgacgctattgtgcttctggacagggaacagggggggaaggataaactccaggcccacggtattaggctccactccgtgtgcaccctctctaagatgctcgagattctggaacaacagaagaaagtcgatgccgaaactgttggccgtgtgaagcggttcatacaggagaatgttttcgtcgcagcaaaccacaacgggagtccgttatccatcaaagaagcccccaaagaactgtcgttcggcgctcgggccgagttgcctcgcatccaccccgtggcaagcaaacttctcagattaatgcaaaagaaggagaccaacttgtgcctcagcgccgatgtgagcctggcccgggaactactgcagctcgctgatgccctggggccctctatttgcatgctgaagactcatgtggatatcctcaacgacttcactctagacgtgatgaaggaactaatcacacttgcaaagtgtcatgagtttctgatcttcgaagaccgaaaatttgccgatattggtaataccgtgaagaaacagtacgaaggcgggatctttaagatagccagttgggccgacctggttaacgcccatgtggtgccgggtagtggcgtcgtcaaagggcttcaggaagttggcttaccgctgcacagaggctgcctgttgattgctgagatgagttctactggatcactggctacgggtgattacacccgtgccgctgtccgaatggctgaggagcactcagaatttgtggtgggctttatctctgggtcacgcgtctctatgaaaccagagttcctgcacctgactcctggagtgcagttggaggcggggggggacaacctgggccagcaatacaattccccgcaggaggtaataggtaagcggggaagcgacataattatcgtgggccgaggcatcatttccgctgcggacagactcgaggctgctgagatgtaccggaaggcagcctgggaggcctacttatcgcgcctcggcgtgtag

SEQ ID NO: 210944 - DNA, 909 bp, synthetic construct
  misc_feature 1..909: note = Description of Artificial Sequence: Synthetic coding sequence
  source 1..909: mol_type = other DNA
atgctggagatcctggagcagcagaagaaggtggacgccgagaccgtcggacgggtcaaaagattcatccaggaaaacgtgttcgtggccgctaatcacaacggaagtccgctgtcgatcaaggaggcacctaaggagttgagctttggcgctagggctgaactgccgcgcattcaccccgttgccagtaagctgcttcggctgatgcagaagaaggaaacaaacctgtgtctgtctgccgacgtttctctggcccgcgagctgttgcagcttgctgacgcattgggcccatcgatttgcatgctcaagacgcatgttgacatcctcaacgactttactctggacgtgatgaaagaacttataacactcgccaaatgtcacgaatttctcatattcgaagatcggaaatttgccgatatcggcaataccgttaaaaagcagtacgagggcgggatctttaaaatagcctcatgggcagatctggtgaacgcgcatgttgtgccaggctctggagtcgtaaaaggacttcaagaagtcggtcttcccctgcaccgcggctgcctgttaattgccgagatgtccagcaccggaagcctggccaccggcgactacaccagggcggcggtgcgaatggccgaagagcattcggagttcgttgtgggattcataagcggttcacgggtaagtatgaagcccgagtttttgcaccttacccccggtgtgcagctcgaagccggtggggataacctgggccagcagtataattccccacaagaagtcataggcaagcgcgggtccgacatcattattgtggggcgcggcattattagtgcggcagacagactggaggccgcggaaatgtacaggaaagccgcttgggaggcatatttatcccgcctcggcgtgtag

SEQ ID NO: 210945 - DNA, 933 bp, synthetic construct
  misc_feature 1..933: note = Description of Artificial Sequence: Synthetic coding sequence
  source 1..933: mol_type = other DNA
atggccgccaccggcgccaacgccgagaaggccgagagccacaacgattgccccgtaaggctgctcaatcctaatatcgctaaaatgaaggaggacattttatatcatttcaatttaactacgagccgacacaacttccctgccctattcggtgatgtgaaatttgtatgcgtcggaggctctccatccaggatgaaggcgttcatccggtgcgtgggcgccgagcttggcctcgattgccctgggagagactatccaaacatatgcgcaggcactgacagatacgcgatgtacaaggttggcccagttctgtcagtttctcatggcatgggaattcctagcattagcatcatgctccatgagcttatcaagctgctctactatgcccgatgcagcaatgtgaccatcatcaggattggtacttccggcggcataggcctggagccaggaacagtcgtaatcaccgagcaagccgtggatacctgttttaaagccgaatttgaacaaatcgtcttaggcaagagagtgattaggaagacagatcttaacaagaagttggtgcaggagctattgctatgttcagctgaattgagcgagttcacgaccgtggtcggtaatacgatgtgcaccctggacttttacgaagggcaaggccgactggacggcgccctatgttcctacacggaaaaggataaacaggcttaccttgaagcagcctatgctgccggagtgcgcaacatcgagatggaaagctcagtcttcgctgccatgtgttcagcgtgtgggctgcaggccgccgtggtttgcgttactttgctgaaccggctggagggcgatcagatctcatctcctcgaaatgtgttatccgagtaccagcagcgcccacaacgcctcgtctcgtactttatcaaaaaaaaactcagcaaagcctag

SEQ ID NO: 210946 - DNA, 933 bp, synthetic construct
  misc_feature 1..933: note = Description of Artificial Sequence: Synthetic coding sequence
  source 1..933: mol_type = other DNA
atggccgccaccggcgccaacgccgagaaggccgagagccacaacgactgccctgtgaggcttctgaaccccaatattgcaaagatgaaggaggacatcctgtaccatttcaaccttaccacttctaggcataattttccggctctgttcggcgatgtcaagtttgtatgtgtgggcggatcccctagtcgcatgaaggcgtttatcaggtgcgttggcgccgagctcgggcttgattgcccaggaagagattatcctaatatttgcgccggcacagacagatacgccatgtacaaggttgggccggtattgagcgtcagccatgggatgggaatccccagcataagcatcatgcttcacgaactgatcaagttactctactatgctcgatgttcaaatgtaaccattattaggatcggcacctctggcggcattggactcgagccggggacggtcgtgatcaccgagcaggccgtagacacctgctttaaagcagaatttgaacagatcgttttgggaaagagagttatccgaaagactgacctgaacaagaagctggtccaggagctgctgctctgctcagccgaactgtctgagttcaccactgtggtgggtaacactatgtgtaccctagatttctacgaggggcagggcaggctcgacggggccctttgctcatacaccgaaaaagataaacaggcttatctggaggccgcttatgcagctggagtgcggaacatcgaaatggaaagctcagtgtttgcagccatgtgcagcgcctgtggcctgcaagcagccgtggtgtgtgtgacattgctcaaccgcctcgaaggggatcagatctctagtcctcggaacgtactttccgagtatcagcagcgaccccaaaggctggtgtcttacttcattaaaaaaaaactgagtaaggcttag

SEQ ID NO: 210947 - DNA, 933 bp, synthetic construct
  misc_feature 1..933: note = Description of Artificial Sequence: Synthetic coding sequence
  source 1..933: mol_type = other DNA
atggccgccaccggcgccaacgccgagaaggccgagagccacaacgactgtccagtacgtctgcttaaccctaacatcgcaaaaatgaaagaggacatactgtaccacttcaacctcaccacatcacgccacaattttcccgccctattcggcgacgtaaagttcgtttgcgttggggggagcccatccagaatgaaagcctttataagatgtgttggtgctgagttaggtctggactgccctggaagagattatcctaacatctgtgccggaacagatcggtatgcaatgtacaaggtaggccccgttctgagtgtgtctcatggaatgggtattccttctatcagtatcatgctgcacgagttgattaaactgctctactacgccaggtgcagtaatgtgacaataataaggatagggacatctggaggaataggactggagccaggcacggtggtcataacggagcaggcagtcgacacttgtttcaaagccgagttcgagcaaatcgtgctcgggaaacgggtgatacggaaaacagatcttaataagaagctggtacaggagctcctgctgtgctctgcggagctgtctgaattcaccacagtggtgggtaacacgatgtgcaccctagatttctacgaaggccaagggcgcttggacggtgccctgtgtagttatactgaaaaagataagcaagcatacttggaggccgcctacgctgctggcgtcaggaacatcgagatggagtcctccgtatttgccgccatgtgtagcgcctgcggactacaggccgctgttgtgtgtgttacattactaaatagacttgaaggggaccagattagcagtccgcgcaacgtattaagtgagtaccagcaaagaccccagaggttggtgagctatttcatcaaaaagaaactctcaaaagcttag

SEQ ID NO: 210948 - DNA, 435 bp, synthetic construct
  misc_feature 1..435: note = Description of Artificial Sequence: Synthetic coding sequence
  source 1..435: mol_type = other DNA
atggccgccaccggcgccaacgccgagaaggccgagagccacaacgactgcccagtgagactgcttaacccaaacatcgctaaaatgaaggaggatatcttatatcacttcaacctgactacatcccgtcataactttcccgctctcttcggcgacgtgaaattcgtctgcgtgggaggcagcccatctcgcatgaaggccttcattaggtgtgtcggagccgaactggggctggactgcccgggacgcgattaccctaacatctgcgctggcacggatcggtacgccatgtataaggtggggcctgtgctcagcgtgtctcacggtatggggatcccatccatctcaatcatgctccatgaactgatcaaactcctatactacgctaggtgcagtaatgtcaccattattcgtattggtacctccggaggctag

SEQ ID NO: 210949 - DNA, 516 bp, synthetic construct
  misc_feature 1..516: note = Description of Artificial Sequence: Synthetic coding sequence
  source 1..516: mol_type = other DNA
atggccgccaccggcgccaacgccgagaaggccgagagccacaacgattgccctgtcagactgctgaatccaaacatcgctaagatgaaggaagatatactgtaccacttcaaccttacaactagcaggcacaattttccagcactgtttggtgatgtcaagttcgtatgcgtggggggtagcccctcacggatgaaggccttcatccgctgtgtaggagctgaactcggtctggattgccctggcagagattacccaaatatttgtgcaggaaccgacaggtatgctatgtataaagtcggccctgttctctctgtgtcgcatgggatgggcataccgagtatttctatcatgttacatgaactaattaaacttctgtattacgccaggtgtagtaacgtgacaataatcagaatcggcactagcggcggcattggaatcctcaaacatctacgacgcaaagacactgggaagtccaaggggggacgggagagacgaagcactaagttacgatag

SEQ ID NO: 210950 - DNA, 522 bp, synthetic construct
  misc_feature 1..522: note = Description of Artificial Sequence: Synthetic coding sequence
  source 1..522: mol_type = other DNA
atgcagcggaagctgaaggtgaccagcctggagcccggcaccgtggtgatcacagagcaggccgtcgacacctgcttcaaggctgaattcgagcagattgtgttgggaaaacgtgtcattcggaagaccgaccttaataaaaagctggtccaggaactcctcctgtgttctgctgaattaagtgagttcaccacagtggtaggaaataccatgtgtacgctggatttttacgagggacaaggtagattagacggtgcactttgctcgtataccgagaaagataagcaagcctatcttgaagcggcctatgccgctggcgtgcggaatatcgagatggaatcgtctgtgtttgccgccatgtgctcagcctgtggactgcaagctgccgtggtttgcgtgaccctgttgaatagactggaaggagaccaaatcagcagcccacgtaatgttttatctgagtatcaacagcgccctcagagactcgtcagctattttattaaaaagaagttatccaaggcatag

SEQ ID NO: 210951 - DNA, 90 bp, synthetic construct
  misc_feature 1..90: note = Description of Artificial Sequence: Synthetic coding sequence
  source 1..90: mol_type = other DNA
atggccgccaccggcgccaacgccgagaaggccgagagccacaacgattgcccggtgcgcctgctcaatcctaacattgccaagatgtag

SEQ ID NO: 210952 - DNA, 441 bp, synthetic construct
  misc_feature 1..441: note = Description of Artificial Sequence: Synthetic coding sequence
  source 1..441: mol_type = other DNA
atggccgccaccggcgccaacgccgagaaggccgagagccacaacgattgccccgtcagattattgaatccaaatatcgccaagatgaaagaagatatcctgtaccacttcaatctgactacgtcccgtcacaattttcctgcactctttggggacgtcaagttcgtatgtgttggcggaagtccgtcccggatgaaagcctttatacgatgcgtgggcgcagaattgggactcgattgtcctggccgggattaccctaacatctgtgctggaactgaccggtatgctatgtataaagtgggccccgtgttgtcagtgtctcatggaatgggcatccccagcatctctatcatgcttcatgagttaatcaaacttctttactatgctagatgcagcaatgtgactattatccggataggaacatccggagggatagggtag

SEQ ID NO: 210953 - DNA, 606 bp, synthetic construct
  misc_feature 1..606: note = Description of Artificial Sequence: Synthetic coding sequence
  source 1..606: mol_type = other DNA
atggccagcgccggcggcgaggactgcgagagccccgcccccgaggccgatcgcccccatcaacggccctttctcatcggcgtgtccggcggcactgcatcgggaaaaagcacggtgtgcgagaagatcatggagctcttgggtcagaacgaggttgaacagcgccaacggaaagtggtgatcttgtctcaggacagattctacaaagtactcacagcagagcagaaggccaaagcgttgaagggccaatacaactttgatcaccccgatgcatttgacaacgatctgatgcaccgaactttgaaaaatattgtcgaggggaaaaccgtggaagtgcctacttatgacttcgtgactcactcccgtctgcctgaaaccacagttgtttatcctgctgatgtggtgctcttcgagggaattctcgtgttctacagccaggagatcagagacatgttccacctgcgcctgttcgttgatactgactcagatgtgaggttgtctcgcagagataaagaggtgtgccgatgcgatcaccccgctaggagcgggcagtatggttgtcatcagcctgatagagctgcccatccaggccacagcgagtggtag

SEQ ID NO: 210954 - DNA, 807 bp, synthetic construct
  misc_feature 1..807: note = Description of Artificial Sequence: Synthetic coding sequence
  source 1..807: mol_type = other DNA
atggccagcgccggcggcgaggactgcgagagccccgcccccgaggcagaccgcccccaccaaaggcccttcctgattgggtcaacagtgtgcgagaagattatggagctgttgggccagaacgaggtggagcagcggcagcgtaaggttgtgattctgagccaggaccggttttataaagtgttgaccgccgagcagaaggcaaaggctctgaagggtcagtacaactttgatcacccagatgcgttcgataacgatttgatgcatagaacactcaagaatattgtggagggcaagactgttgaagtcccaacttacgacttcgtgacccacagccgtcttcctgagactacagtcgtctatcctgccgatgtcgtgctgttcgagggcatactggtgttttactctcaagaaatcagagatatgtttcatcttagactgtttgtggatacagattcagatgtgcgcttatcaaggcgggtcttacgagacgtgaggcggggaagagacctggaacagatcctaacgcagtacaccacttttgtaaagcctgcctttgaggaattctgtcttcctactaagaagtatgcagacgtgattattccccgaggcgtagacaacatggtggcaattaatctaatagtccaacacattcaagacattttaaacggggacatttgtaagtggcacaggggaggaagcaacgggagatcatacaaacggacattctcagagccgggggaccaccctggcatgctgacctctggtaaaaggtcccatctggaatcatcttcacgaccacactag

SEQ ID NO: 210955 - DNA, 849 bp, synthetic construct
  misc_feature 1..849: note = Description of Artificial Sequence: Synthetic coding sequence
  source 1..849: mol_type = other DNA
atggccagcgccggcggcgaggactgcgagagccccgcccccgaggctgaccggccacaccaacggcctttcttgatcggcgacgagaggttccaggccggtatccccctcctatgtctgcagtcgacggtatgtgaaaaaatcatggaacttttaggtcagaatgaggtggagcagcgccaacgcaaggtggtaattctatctcaggacagattttataaagtgctaacggctgagcaaaaggccaaggcccttaaggggcagtacaacttcgatcatccagatgccttcgacaatgatctgatgcaccggactctaaagaacatcgtggaaggcaagaccgtggaagtgcctacctacgactttgtgacacatagcaggctaccagagaccacagtggtgtaccccgccgatgttgtgctgtttgaaggaatcctggtgttttattctcaggagatcagggacatgtttcatctgcggctatttgttgacactgattcagacgtgcggctcagtcgtcgggtgcttcgcgacgtgaggaggggcagggacctcgagcagattcttacgcagtacacaacatttgtcaaacccgcgtttgaagagttttgcctgccgaccaagaagtacgctgatgtgattattcctaggggggtcgataacatggttgcgattaatcttattgttcaacatattcaagatatattaaacggtgacatatgtaagtggcatcggggcggcagcaacggaaggagctataagcgcactttctctgagcccggggatcaccccgggatgctcacatctggaaaaagatcccacctggagtccagcagtcgtccgcattag

SEQ ID NO: 210956 - DNA, 834 bp, synthetic construct
  misc_feature 1..834: note = Description of Artificial Sequence: Synthetic coding sequence
  source 1..834: mol_type = other DNA
atggccagcgccggcggcgaggactgcgagagccccgcccccgaggcagaccggccacatcagcggccgttcctcatcggcgtatccggaggcactgcctctggcaagagtactgtctgtgaaaaaattatggagttactcgggcagaacgaggtcgagcagcggcagaggaaggtggttatcctcagccaagatcgtttttataaagtgctgacagctgagcagaaagctaaggcgttgaagggtcagtacaatttcgaccatcccgacgcattcgataacgatttgatgcacaggaccctaaagaatatcgttgagggaaagacagtcgaggtccccacatatgactttgtgacccacagcagattgccagaaaccactgtcgtatatccagccgatgtggtcctgttcgagggcattctggtcttttacagccaggaaattcgcgatatgttccacctgcgtctttttgtggatacggatagcgacgtgcgactcagccgcagggttcttcgcgacgtgaggaggggccgggacttggagcaaatcctgacccagtacactaccttcgtgaagcctgcttttgaggagttttgtctaccaacgaagaagtatgcggacgtaataatccccaggggcgtcgataacatggtggccatcaatctgattgttcagcatatacaggatatcttgaacggcgatatatgcaagtggcacaggggtggctctaacggtcgctcctacaaacgaaccttcagtgagcctggagaccaccccggaatgcttacaagcggaaaacgaagtcacctggagtcatcctcaaggccccattag

SEQ ID NO: 210957 - DNA, 1647 bp, synthetic construct
  misc_feature 1..1647: note = Description of Artificial Sequence: Synthetic coding sequence
  source 1..1647: mol_type = other DNA
atggccgccccccccgcccgggccgacgccgaccccagccccacctcaccacctaccgctcgggatacaccaggacgacaggccgagaagtcagagactgcctgtgaggacagatcaaacgctgagtcactggataggttgttgcccccagtgggcacggggcgaagcccgcgcaaacgaaccactagtcagtgcaaatctgaaccccccctgctccggacaagtaaacggacaatttacacagccgggcgacccccatggtataacgaacatggcacccaatccaaggaagcttttgcaattggcctgggaggaggatccgcttccggcaaaactacagtggccagaatgattattgaggcactggatgttccatgggtggtgcttctttccatggattccttttacaaagtcctcaccgagcaacagcaggagcaggccgcccataacaacttcaacttcgaccacccagacgcattcgattttgatttaattatctcaacactcaaaaagttgaagcaaggaaagtccgtgaaggtgcctatatacgatttcacaactcattcacgtaaaaaggattggaagaccctgtatggtgcaaatgtgatcatcttcgaaggtatcatggcgtttgctgataagactctcttggaattattggacatgaagatcttcgtcgacaccgattctgacattcggttggtacgcaggttgcggcgggatatctctgaacgcggtcgtgatatcgagggagtgattaagcaatacaacaaatttgtcaagccaagtttcgatcagtacatccagccaacaatgcgcctggcggacatcgtggtgccgcggggctcgggcaacacagtggctatcgatctgatcgtgcaacatgtacattcccagctggaggagcgtgagctcagcgtgcgcgcagctctcgcgtcggctcatcagtgccacccactgcctagaaccctctcagtgctgaagtccacaccacaggtccggggcatgcatacaattataagagacaaggaaacctcccgcgacgagttcatcttttattcaaagaggttgatgcgtctgctcattgaacatgccttgagttttctgccatttcaggattgtgtagtccagaccccacagggtcaagactatgcaggtaaatgctacgcaggaaagcagatcactggtgtgtcgattctgagagcaggcgaaactatggaacccgctctgagggctgtgtgtaaagatgttcgaataggaacgatcctcatacagacaaaccagctaactggcgagccggaattgcattacctgcgcttacctaaggacatcagcgacgaccacgtaattctgatggactgcactgtgtcaacgggagcggcggcgatgatggcagttcgcgtcctgttagatcacgatgtgcctgaggataagatttttctgttatcacttctaatggccgaaatgggcgtgcacagcgtggcctacgccttccctagagttagaattattacaacagcagtcgataagcgcgttaacgacctcttcagaataatccccggaataggtaacttcggagatagatattttggaactgacgccgttccagatggctccgatgaggaggaggttgcttatacaggttag

SEQ ID NO: 210958 - DNA, 1260 bp, synthetic construct
  misc_feature 1..1260: note = Description of Artificial Sequence: Synthetic coding sequence
  source 1..1260: mol_type = other DNA
atggccgccccccccgcccgggccgacgccgaccccagccccacctcaccgcccaccgccagagacactcctggccggcaagcagagaaatccgaaacagcatgtgaagaccgatccaacgccgagagcctggataggctgctgcctcccgtcgggaccggaaggagcccgcgcaaaaggacaacatctcagtgcaagagtgaacctcccctgctgcgcacctccaagaggaccatatatacagccggcaggcctccttggtacaatgaacacgggactcaatcaaaggaggctttcgctattgggcttgggggcggtagcgctagtgggaaaacaacggtcgcaagaatgatcatcgaagccctggacgtgccatgggtagtcttactgtcaatggactcattttacaaagtcctcaccgagcagcagcaggagcaggccgcccataataacttcaactttgaccacccagacgctttcgacttcgatctaattatttcaactctcaaaaagttaaagcagggaaagtcagttaaagtgccgatatatgacttcaccacccactctagaaaaaaagactggaagaccctctacggagccaacgtgatcatttttgagggcatcatggctttcgcagataagacattgctggagcttctagacatgaaaatcttcgttgataccgacagcgatatcagacttgtccgccgcttgcgccgggatatatccgaaaggggccgcgatattgagggagtcattaaacagtacaataagtttgtaaaaccctcattcgaccagtatatccagcctacgatgcgactggccgacatcgtggttccacgcggctccggcaatacagttgctatcgatttgatcgtccagcatgtgcatagccagttggaagaaggctgcgccgggctgggaactcccgtgcctcctgctgctcctgatgccgagcgtcccgaagaacacgccgcaggaacaggtcatgcacaccatcaccaggtgcgagcacatcttggtaccgggcgccccagagctcgagcgcctgcccagcttttggcccctcagggacagggagatcagagcaggcgtgtgcacctgttactgcaggagacggacgccgcagcccatagggcccgcgctctgctgcctgccctgtccgggttgcgaagaactgatcctgccggcgccggcctgtgcggccaggtgctgtgcggcgaagccgaccacaggtgtgtgcattccgccaggcgctag

SEQ ID NO: 210959 - DNA, 1647 bp, synthetic construct
  misc_feature 1..1647: note = Description of Artificial Sequence: Synthetic coding sequence
  source 1..1647: mol_type = other DNA
atggccgccccccccgcccgggccgacgccgaccccagccccacctctcccccaaccgctagagacacccctgggaggcaagcagagaagtccgaaaccgcctgtgaggatcgctccaacgcggagagtcttgaccgtttgttacctcctgtgggcactggcagatctccccgaaaaagaaccacatctcagtgcaaatctgagcccccccttctgagaactagtaagcggacaatctacacggctgggagacccccctggtacaatgagcacggtacgcagtccaaagaggcttttgctatcgggcttggagggggcagtgcgtcagggaagaccaccgtagcccgcatgatcattgaggctctggatgtgccatgggtcgtattgctctctatggacagcttttataaggtgctcacggaacaacagcaagagcaggcagcccacaataatttcaattttgaccatccagacgcattcgatttcgatctaatcatctcaacactcaagaaactgaagcagggtaaatctgtgaaagtgccgatctacgattttacgacacacagccgaaaaaaggattggaagacactgtacggcgccaacgtaattatcttcgagggcattatggcattcgcagacaagaccttactcgaactgctcgacatgaagattttcgtagacaccgactccgacatacgcctggtgaggagactgcgcagagatatctctgaaagggggcgggacatagaaggagtcattaaacaatacaataagttcgtgaagccatccttcgaccagtacattcagcccacaatgaggctcgccgacatcgtcgttcctcgaggtagtggcaataccgtggctattgatctcatcgtccagcacgtgcattcgcaattggaggagctgcgattcgtgccccgtgccgcactggcatcggcccaccagtgtcatcctctccctcgaactttgtcagtcctgaagagcacacctcaggtcagagggatgcacacaatcatcagagacaaagagacctccagagatgagtttatcttttacagcaagagactcatgcgcctgctcatcgaacacgctctatctttcttgcccttccaggactgcgtagtccaaaccccacagggtcaagattatgctggcaagtgttatgcgggcaaacaaattacaggggtctctattctccgtgccggcgaaacaatggagccagcactgcgggcagtctgtaaggacgtccgaattggaaccattctcattcagacaaatcagcttacaggagagcctgagctacactacctcaggttacctaaagacataagcgacgatcacgtcattctgatggactgtacggtgtccacaggcgctgccgcaatgatggccgtcagggtgctccttgaccacgacgtcccagaggacaagatctttcttctgtcactcctcatggcagaaatgggcgtgcactccgtggcatacgccttcccgagggtgcgcataattacgactgccgtcgacaagagggtgaatgacctgtttaggatcatcccaggaattggtaactttggcgatcgatatttcgggaccgacgccgtgcctgacggctccgacgaagaggaggtggcctatacaggctag

SEQ ID NO: 210960 - DNA, 1602 bp, synthetic construct
  misc_feature 1..1602: note = Description of Artificial Sequence: Synthetic coding sequence
  source 1..1602: mol_type = other DNA
atgagcagcccccccgcctaccccggcatccggatcagcggctgcagggcgttaggtgcagaagggtcctccaacgcagaatccctggatcgcctcttaccccctgttggtaccggccgctcgcctagaaaacggaccacctcacagtgtaagtccgagcccccactgttgcggacgtctaaacgcaccatctacaccgccggcaggccaccctggtataacgaacatggaactcaaagcaaggaggcgttcgcaatcggacttggaggaggcagtgcctctggcaaaactacagtggcccggatgattattgaagcactcgacgttccttgggttgtactgctgtctatggacagcttctacaaagttctgaccgaacagcagcaagaacaagccgcccataacaactttaacttcgatcacccagacgctttcgatttcgacctaatcatttctaccttaaagaagctgaaacagggcaagtcagtgaaagttccgatttatgacttcactacccactccagaaaaaaggattggaagaccctgtacggcgccaacgtcatcatttttgagggcattatggcctttgcagacaaaactctgctcgaacttctcgatatgaaaatcttcgtggacaccgacagcgacatcaggttagtgcgccggctgagaagagacatctccgagaggggccgcgacatcgaaggggtgattaaacaatacaataaattcgtaaagccctctttcgaccagtacattcagccgacgatgaggctggccgatatcgtggtcccccgagggtctgggaataccgtggccattgatttgattgtgcagcacgtccacagccagctcgaggagcgagaactctctgttagggccgccttagcttcagcgcatcagtgtcacccgcttcccagaacactgtcggtgctcaagagcaccccacaagtgcgtggcatgcataccattatccgagataaggagacatcacgtgatgagttcatcttctattctaaacggttaatgaggcttctcatcgagcatgccctctcctttttgccctttcaggattgtgtggtacagacccctcaggggcaggactacgccggaaaatgctacgccgggaagcagataactggcgtgagcatactccgcgcaggcgagaccatggagccagccctcagggcggtgtgtaaagatgtgaggataggaacaatactgattcagacaaaccaactgaccggggagcccgaactccattatctaagactgccaaaggatatcagtgatgatcatgtgattcttatggactgtacagtctcaacgggggctgccgccatgatggctgtacgggtcttgttagatcacgatgtgccggaggataaaatcttccttctgtcacttctaatggcagaaatgggggtgcattctgtggcatacgcatttccgcgcgtgcggattatcactacagccgtggacaagagagtgaatgatctgttccggatcattccgggcattgggaactttggagatcgatattttggaactgacgccgtgccggacggctcggacgaagaggaggttgcgtatacaggttag

SEQ ID NO: 210961 - DNA, 261 bp, synthetic construct
  misc_feature 1..261: note = Description of Artificial Sequence: Synthetic coding sequence
  source 1..261: mol_type = other DNA
atgagcagcccccccgcctaccccggcatccggatcagcggctgccgcgccctgggcgccgagggatcgagcaatgccgagtctctagacagactgctccctcctgtaggcaccgggcgaagcccccggaagaggaccacttcccagtgcaagtccgagccgcctctgctcagaacctccaagagaacaatctacactgccggccggccaccatggtacaacgaacatggaacccagtcgaaggaagcctttgctatctag

SEQ ID NO: 210962 - DNA, 408 bp, synthetic construct
  misc_feature 1..408: note = Description of Artificial Sequence: Synthetic coding sequence
  source 1..408: mol_type = other DNA
atgcacaccatcatccgggacaaggagaccagccgggacgagttcatcttctattccaagcggctgatgagactactgatagaacacgccctctcttttctgccgtttcaggattgtgtggtgcagacccctcaagggcaagattatgccggtaagtgctatgcaggcaagcagataacgggagtctcaatcttacgggctggcgaaactatggagcccgcattaagggccgtgtgcaaggatgtacgcattggaactatcctgatccagacgaatcagctcaccggagagccagagctacactacctcaggctcccaaaggacatctccgatgaccacgtgattcttatggattgcaccgtgagtacaggggccgctgccatgatggccgtcagggtcttgctgtag

SEQ ID NO: 210963 - DNA, 786 bp, synthetic construct
  misc_feature 1..786: note = Description of Artificial Sequence: Synthetic coding sequence
  source 1..786: mol_type = other DNA
atggccggcgacagcgagcagaccctgcagaaccaccagcagcccaacggaggtgagccattcctgatcggcgtttccggcgggaccgcctctgggaagtcctctgtgtgcgctaagattgtgcagctgcttggccaaaacgaagtcgattatcgccagaagcaagtagtgattctgagccaggactccttctaccgggttctcacatctgaacagaaggcaaaagccctgaagggtcagttcaacttcgaccatcccgatgctttcgataatgaactgatactgaagactttgaaagaaatcacagaggggaagacggtccagattccggtgtacgattttgtgtcacactctcggaaggaagagacagtgaccgtgtatcctgccgacgttgtgctattcgaggggatactcgccttttattcccaagaggtacgcgacctctttcagatgaaactctttgtggatactgatgctgacacccggctttcccggcgtgtgctgcgagatatcagtgagcgcggcagagacctggagcagatactctcacagtatatcacattcgtgaagcctgcctttgaagaattttgcttgccaaccaagaagtatgctgatgtcattatccctaggggagccgacaatctcgtcgcaattaaccttatcgtccagcacattcaggatatcctgaacgggggtccttctaaacgccagacaaatggttgcctcaacggatatacgccctcaagaaagcggcaggcatccgagagcagcagtcgacctcactag

SEQ ID NO: 210964 - DNA, 393 bp, synthetic construct
  misc_feature 1..393: note = Description of Artificial Sequence: Synthetic coding sequence
  source 1..393: mol_type = other DNA
atggccggcgacagcgagcagaccctgcagaaccaccagcagcccaatggtggcgaacctttcctgataggagtgagcggtgggaccgcttccggtaaaagctcagtctgcgctaaaatagtgcagctcctggggcagaacgaggtggactacaggcagaaacaggtggtgattctctcacaggactcgttctaccgggtgctgactagtgaacagaaggctaaagcactgaagggccagttcaatttcgatcaccctgatgcttttgacaacgaactgattctaaaaaccctaaaggagatcacagagggaaaaacagttcagatccccgtctatgacttcgtgagtcatagtcgcataaaagggcaccagagggagcgccagggtagttag

SEQ ID NO: 210965 - DNA, 2031 bp, synthetic construct
  misc_feature 1..2031: note = Description of Artificial Sequence: Synthetic coding sequence
  source 1..2031: mol_type = other DNA
atgagcagcctgcaggccctgtgcagcggcctgcccctgcggcccttaccggagaatagaggacgccaggccggcgtaccacacgctcccgtgagaacgccttctctatcacctgtcgaaaaacagctggccctgaggaatgcccttaggtacttcccccccgacgtgcaggaacttcttgccccggagttcgctcaggagcttcagctatacgggcatatttacatgtaccgcttttgtcccgatatagagatgcgcgcctatcccatcgaacagtatccttgccagacaaaggtggccgccgctattatgcacatgatcatgaataacctcgaccctgctgttgcacagtttcctcaggaactggttacctacggcggaaatgggcaggtgttctcgaactgggcgcagttttggctaactatgttttaccttagcaaaatgacagaggagcagacactggttatgtattctggacatccactaggtctgtttcccagctcccggtccgcgccacggttggtgattacaaacggtatggttatacctaactacagttctcgtaccgagtatgagaagctgttcgccctgggggtgaccatgtatggccagatgaccgccggctcctactgctatatcggccctcagggaatagttcacgggacggtgcttaccgttctgaacgccgcacgcaggtaccttggcatcgaagatctggcaggaaaagtgttcgtgaccagtggactgggagggatgtctggtgcccaagcaaaagcggctgtcatagttggctgcatcggggtgattgctgaggtggataaagccgcacttgagaaaaggcaccgccaagggtggctgatggaggttactgatagtctcgacagatgcatccagaggctcagggaggcaaggaagaagaaagaggtactgtcactggggtaccatggcaacgtcgtcgctttatgggagcggctggtacacgaactagatactactggtgagtgtctcgtagatttaggcagcgatcagacctcctgccacaacccattcaatggcggctactacccagtgcaattgagctttacggaggcgcagagcttgatggcaagcaatccagccgtcttcaaagatctggtccaagagtccctgcgcaggcaagtcagtgcaattaaccgcctcgctgaggaaaagttttttttttgggactatggcaacgcctttctattagaggcccagagggctggagcagatgtcgaaaagaaaggggccggaagaactgaatttcggtaccccagctacgtacagcacattatgggagatattttttctcagggatttggaccgtttcgatgggtgtgcaccagtggagaccctcaggaccttgcagtcacagacgagctcgcaaccagcgtgttagaagaagctattgcggacggcgtcaaggtgagcgtgaaactacagtacatggacaatatccgctggatccgggaggccgctcgccaccgcttagttgtgggctcacaagcaagaattctttattcagaccagaaaggcagggtagctatagctgtggccatcaatcaagccattgcttgtcggagaatcaaggcaccagttgttctctcccgagatcatcatgatgtttcgggcaccgactcccccttccgagagacgtccaacatttatgacggctctgcattttgtgccgacatggcagtgcagaattttgtgggagacgcatgtcggggcgccacctgggtagccctacacaacggaggtggcgtgggatggggcgaagtcattaacggaggcttcggactggttctggacggaactccagaggccgaagggagggctagactgatgcttagctgggacgtctctaacggagtggcccgccgctgttggtctgggaatcagaaggcctacgagatcatctgccagacaatgcaggaaaattctacactggtggtcaccctacctcacaaagtggaggatgagcgtgtgctccagcaggccctgcagctttag

SEQ ID NO: 210966 - DNA, 2211 bp, synthetic construct
  misc_feature 1..2211: note = Description of Artificial Sequence: Synthetic coding sequence
  source 1..2211: mol_type = other DNA
atgagcagcctgcaggccctgtgcagcggcctgcccctgcggcccttgcctgagaatcgcggcagacaggcaggggtcccccacgccccagtgcgtaccccctctctgagccccgttgagaaacagcttgccctgcgtaacgccttgaggtactttccccctgacgtacaggagctgctcgctcctgagttcgcccaggagctgcagctgtacggtcatatatacatgtacaggttttgcccggacattgaaatgagagcttacccaatagagcagtatccatgccagacaaaggtggccgccgccataatgcacatgatcatgaacaacctggacccggctgtcgctcagtttccccaggagctcgtaacttacgggggcaatgggcaggtattctctaactgggcacagttctggctgacgatgttttatttgagcaagatgaccgaggaacagacactggtgatgtactcaggccatcctttggggctgttcccgagtagtcggtctgccccacgacttgtgattaccaacgggatggtcatcccgaactacagtagcaggactgagtacgagaagctattcgctctgggagttacaatgtatggtcagatgacagcagggtcttattgctacatcggcccgcagggcattgtgcacggcactgttctcacagtgcttaatgccgcacgacggtatctcgggattgaagatcttgctggcaaagtatttgtaacttctgggctgggcggcatgagtggggcacaggcaaaggcagccgtcatcgtgggctgcattggagtgatcgcagaggtggataaggctgctctggagaaacgccaccgccaagggtggttgatggaggtcacagattctttggaccggtgcatccagcggttacgcgtcctgcagctggggctccaacaggcgctcggttgggcagggctgcccgcggccttgggcctgtgcgtcctgtcatgcttcgtgaacctcgccccgcttggagaaggaaggtgtctagctccatccgggttcagcagacccctgctgggagcaccagtcctcctgctttgtccgagccgcgaagcaaggaaaaagaaggaagtgttgtccctcggttaccacggtaacgtggtagccctgtgggagagactggtacacgaactggacaccacaggtgagtgcctggttgacctaggatccgatcaaacctcatgccataatccgttcaacggcggatattatccagtacaactctcctttacagaagctcagtcgcttatggcatccaaccccgccgtgtttaaggatctcgttcaggaaagtctgcgaaggcaggtgtccgccatcaataggctagctgaagagaagttttttttttgggattatggaaacgctttcctcttagaggcacagcgggcaggggcagacgttgagaaaaagggtgccgggcgtacggagttcagatatccatcctatgtgcagcatattatgggcgacatcttttcacagggttttggacccttcaggtgggtctgtacaagtggagaccctcaggatctggccgtcaccgacgagttggccaccagtgtgcttgaagaggccatagcagacggggtcaaggtgtcagtgaagttacagtacatggacaacatcaggtggatccgggaagccgccagacaccggctggttgtaggctctcaggcaaggattttgtactcagatcagaaagggcgagtggccatcgctgtcgccattaaccaagccatcgcctgtcggagaattaaggctccagtcgtcctctcacgtgaccaccacgacgtctccggcactgactctcctttccgtgagacttccaatatatacgatgggagtgcattttgcgcggatatggccgttcagaattttgtgggcgatgcttgcagaggagccacttgggtcgccctgcacaacggcggaggagttggctggggggaagtcatcaatggaggcttcggcctggtgctggatggtacaccagaggccgagggtagggcaagacttatgctgagctgggatgtgtccaatggggtggcaagacggtgctggtccggcaatcagaaggcctacgaaataatctgtcaaactatgcaggagaatagcacgttggtggtaacactcccccacaaagtagaggatgagagagtccttcagcaagccctgcaactgtag

SEQ ID NO: 210967 - DNA, 375 bp, synthetic construct
  misc_feature 1..375: note = Description of Artificial Sequence: Synthetic coding sequence
  source 1..375: mol_type = other DNA
atgcggcaggccggccgggccgccctgctggccgccctgctgctgctggtgcagttgtgtcccgggtcatctcaacgcagcccagaggcagctggagtgcaggatccgtcactgaggtggtcacctggcgctcgcaatcaagggggtggggcccgagccctgctcctgctgctggccgagagatttcccaggagggccggacccgggaggctcgggctgggcacagccggggagcggccccgcagggacaacccttccttaagtatcgaccttacttttcatcttttacggacactcctggaactggccaggacgcagagtcagcgcgaacgcgccgagcagaatcgtataatcttcgattcagttggaaaatag

SEQ ID NO: 210968 - DNA, 339 bp, synthetic construct
  misc_feature 1..339: note = Description of Artificial Sequence: Synthetic coding sequence
  source 1..339: mol_type = other DNA
atgacccggtgcgccctgctgctgctgatggtgctgatgctgggccgtgtcttggtagttccagttacgcccatcccaaccttccaactgcgtccacagaacagcccccagaccacaccacggccagctgcatccgagagtccgtccgccgctcctacttggccctgggcggcccaatctcactgctccccgacaagacacccagggtcgcgaatagtcctgagtttagatgtaccgatcggattgctgcagattctgttggaacaggcccgtgctagagcagctcgagaacaagccactactaacgctcgcatcctcgcacgggtgggccactgctag

SEQ ID NO: 210969 - DNA, 1923 bp, synthetic construct
  misc_feature 1..1923: note = Description of Artificial Sequence: Synthetic coding sequence
  source 1..1923: mol_type = other DNA
atgggccagcccagcctgacctggatgctgatggtggtggtggccagctggtttattaccactgccgcaaccgacacgtcggaggcgaggtggtgttcagagtgccactccaatgccacctgcaccgaggatgaggccgtaaccacatgtacctgtcaggaaggattcacgggtgacggcttaacgtgtgtggatctcgatgagtgcgccatccccggtgcccacaactgtagtgccaactcatcctgcgtcaacactcccggcagcttttcatgcgtgtgccccgaaggatttcgacttagtcccgggttaggatgcacagatgtagatgagtgtgcagagccggggttgtcccactgccatgcattggccacatgcgtgaacgtggtgggcagttacctgtgcgtgtgtccagccgggtataggggtgatggctggcattgtgagtgctcacctggatcttgcgggccagggcttgattgtgttcccgagggcgatgccctcgtttgtgctgacccatgtcaagcacacagaacactggatgaatattggcgaagcactgaatacggagaaggttatgcgtgtgatactgacctgcggggatggtaccggtttgtgggacagggtggcgcccggatggccgagacctgtgtgcctgtactgagatgcaacaccgctgccccgatgtggttaaatggcacccacccatcttcagatgaagggattgtgagcagaaaggcctgtgcacattggtctggacactgctgtctatgggacgcttccgtccaggtgaaagcttgcgctggcgggtactacgtttacaatctcacagccccacccgaatgtcatttggcctattgcaccgacccaagctctgtcgagggtacatgtgaagaatgtagtattgatgaggattgtaaaagtaacaatggacgatggcactgccagtgtaagcaagactttaacatcacagacatcagcctgttggaacacaggcttgagtgtggggctaatgacatgaaggtgagcctaggcaagtgtcagcttaagagtctcgggtttgacaaggtcttcatgtacctgagtgacagcaggtgtagtggatttaacgatagagataatagggattgggtgagtgtggttacccccgcccgggacggtccttgtggcacagtgctgaccaggaatgaaacacacgctacctatagtaacaccctctatctggcagatgagatcataataagagacttaaatatcaaaataaactttgcttgcagctaccccctggacatgaaggttagccttaagactgccctgcagcctatggtcagcgccttgaacattcgtgtcggtggaactggcatgtttacagtgcggatggccctgttccagacacccagctatactcaaccatatcaagggagctcagtgactctgagcacggaagcgtttttgtacgtcgggacgatgctagatgggggcgatctgtcaagattcgccctgctgatgacaaattgctatgcgactccctcctcaaacgcaaccgatccactgaagtattttattatccaagaccggtgcccacacacacgcgactccaccatccaagtagtcgagaacggcgagtcttctcaaggaaggttcagtgttcaaatgttcagattcgcaggcaattatgacctggtgtacctacactgtgaagtctacctgtgtgatactatgaatgaaaagtgcaagcccacctgcagtggcacccgatttcggagcggttcagtgattgaccagagtcgagtgctaaacttgggaccgataactaggaagggggtgcaggccaccgtgtccagagcatttagctcccttggcctgctgaaggtctggctgccattgttgttgtcagccacactcactctcacattccaatag

SEQ ID NO: 210970 - DNA, 2022 bp, synthetic construct
  misc_feature 1..2022: note = Description of Artificial Sequence: Synthetic coding sequence
  source 1..2022: mol_type = other DNA
atgggccagcccagcctgacctggatgctgatggtggtggtggcctcctggttcataactactgcagctacggacacttccgaagcacgaacgaaatataactgtcctgcccgctggagttggaggaccccacagagagggggggacacagaacagggcccggatgaggatttcacttcccagggccgctggtgctctgagtgccattctaacgctacatgtactgaggacgaggccgtaaccacttgcacctgtcaggagggctttaccggtgatggtctgacctgcgttgacttggacgagtgtgcaatacccggggcgcacaactgttccgcgaactcctcttgcgtgaatacccccgggtcattctcttgcgtgtgcccagagggatttagattaagtccgggcctggggtgcacagatgtagatgagtgcgcagagccgggcttgtctcactgtcacgctctggccacatgtgtgaatgttgtaggatcttacctgtgtgtttgcccagcgggctatcgcggcgatgggtggcactgtgagtgttccccaggtagttgcggcccgggcctggattgtgtccccgagggcgatgccctagtatgtgccgatccctgccaggctcataggactctggacgaatattggagaagtaccgagtatggggaggggtacgcttgcgacaccgatctgagaggatggtatcggtttgtggggcaagggggggcacgcatggctgagacttgcgtgcccgtactcagatgcaataccgcagcccccatgtggttgaatggtactcacccgtcctccgatgaaggaattgtaagcaggaaggcatgtgctcattggagtggacattgttgtttgtgggacgctagcgtgcaagttaaagcctgtgctgggggttattatgtatacaacctgacagcacccccggagtgtcacttggcctattgcacagatcctagctccgtggaaggaacctgtgaggagtgttctatagacgaggattgtaagagtaacaatggcagatggcattgccagtgcaaacaggactttaacattacggacatcagccttctggaacaccgcttagagtgtggagctaatgacatgaaagtgtccctgggtaagtgccaactcaaaagtcttgggtttgacaaagtcttcatgtatcttagcgacagcaggtgctcgggattcaacgaccgcgacaatcgagattgggtgagtgtggtgactcctgcccgggatggtccttgtggtacggttctgacgaggaatgagacgcacgccacgtacagcaacactctatacctcgctgatgagattataattcgtgatcttaacattaaaataaattttgcctgcagttatcctctcgatatgaaggtgagtttgaagacagccctgcagcccatggtatccgccctcaacatccgcgtggggggcaccggtatgttcactgtgcggatggccctgtttcagactccaagttatactcagccataccaggggtcgtcggtgacactttccacagaggcattcctgtatgtaggtacaatgctcgacgggggagacctgtcccgctttgccctcttaatgacaaactgctacgcgacacctagttctaatgcgaccgaccctctaaagtactttatcatacaggatcgatgcccccacacccgggactctacaattcaggtggtggagaacggagagtcttcccaaggcaggtttagcgtacagatgttccgattcgccggcaactatgatttagtgtaccttcattgcgaggtctatctgtgtgataccatgaacgagaaatgtaagcccacgtgctccggcaccaggttcaggtctggcagtgtgattgaccaatctcgggtgctgaacctgggtcctattacacgtaagggtgttcaagccaccgtgtccagagcgttctcatcgttaggcctcctgaaggtttggttgccattgttgctgagcgcaacgttgaccctcacctttcagtag

SEQ ID NO: 210971 - DNA, 1923 bp, synthetic construct
  misc_feature 1..1923: note = Description of Artificial Sequence: Synthetic coding sequence
  source 1..1923: mol_type = other DNA
atgggccagcccagcctgacctggatgctgatggtggtggtggccagttggttcatcactactgctgccaccgatacaagcgaggcccgatggtgttccgagtgccacagcaatgcgacctgtacagaggacgaagccgtgactacatgcacttgccaggaaggtttcacgggcgacggcctgacttgtgtggacctcgatgaatgcgccatcccaggggcccacaactgcagcgctaattcctcctgtgtgaatactcccgggtctttttcgtgtgtgtgtcccgagggctttaggctttctcctgggctggggtgtactgatgtggacgagtgtgctgaaccaggtctctctcattgccacgccctcgccacttgtgtgaatgtggtcggttcatatctctgtgtttgccctgccgggtataggggcgatggctggcactgtgaatgctctcctggtagttgcggacctggcctggattgtgttccagagggggacgccctggtgtgtgctgatccatgtcaggctcaccgcacgctggacgaatactggcggagtactgagtatggtgaggggtatgcttgcgatacggacttgcgggggtggtaccgttttgttggtcagggcggagcccgcatggcagagacctgcgtcccggtgctgagatgtaatacagctgctcctatgtggctgaatggaacccatccgtccagcgacgaaggaatagtctctagaaaggcctgtgcccattggtctggccactgttgcctgtgggacgccagtgtgcaggtgaaagcctgtgctggtggctactatgtgtacaacttgacggcccccccggagtgtcatcttgcctactgtactgatccatccagcgtggagggtacatgcgaagagtgcagtatagacgaagactgcaagtctaataacggacgttggcattgccaatgcaaacaggactttaacatcaccgatataagcctgctggagcaccgcttggaatgcggtgccaacgacatgaaagtcagcctcgggaagtgccagttgaagtccctgggcttcgacaaggtcttcatgtatttgagtgattctagatgcagcggttttaacgatcgggataatcgtgattgggtttccgtagtgaccccagcacgtgacggcccttgtgggacggtattaactaggaatgagacacatgcaacatattcgaatactctctatttggccgatgagattattatcagagatctaaatataaagatcaacttcgcctgctcctatccattggatatgaaagtcagtctcaaaaccgccttgcagcccatggtcagcgcactaaatatcagggtgggtggtaccggcatgttcacagttcgtatggcactgtttcaaactccaagttacacacaaccttaccagggctcctcagttacactgtctacagaggcctttctttacgtcggaacaatgctggatggaggcgatttgtcccggtttgcgctcttaatgactaactgctatgcaactccctcctccaacgcaaccgaccccctgaagtatttcatcatccaagatcggtgtcctcacactagggacagcaccattcaggtggttgagaatggagagtcgtcacaggggcgtttcagcgtccagatgtttcgatttgccggcaattacgacctcgtctatctgcactgtgaagtgtatctgtgtgacactatgaacgaaaaatgcaaacctacatgctccgggacacggttcaggtcagggtccgtaatcgaccagtcccgcgtccttaatctcgggccgattacccgcaaaggcgtgcaagctacagtgtctagagccttctcaagtctgggccttcttaaggtgtggctgccacttctgctctctgcgactctgactctcacctttcaatag

SEQ ID NO: 210972 - DNA, 1923 bp, synthetic construct
  misc_feature 1..1923: note = Description of Artificial Sequence: Synthetic coding sequence
  source 1..1923: mol_type = other DNA
atgggccagcccagcctgacctggatgctgatggtggtggtggcctcttggtttatcactaccgcagctaccgacacttccgaggcacgctggtgtagcgagtgtcacagcaacgccacgtgcacagaggatgaggcagtcaccacctgcacatgccaggagggcttcacaggtgatggcctgacctgtgttgacctggacgagtgtgctatccccggcgctcacaactgttccgccaattcttcctgtgtgaacacaccaggcagtttcagctgtgtctgtcctgaggggtttcgtctgtctcctggactcggatgcacagatgtggatgagtgcgccgaaccagggctctcccactgccacgccttggccacctgcgtgaacgtcgtcgggagttatctttgcgtctgccccgccgggtacaggggtgatggctggcattgcgagtgtagcccaggcagctgcgggcccggactcgactgcgtgcctgagggcgacgccttggtgtgcgccgatccttgtcaggcccataggacactcgacgaatattggcgctccaccgagtacggcgaaggctacgcatgcgacaccgaccttcgaggctggtatcgtttcgttgggcaaggaggcgctcgcatggcagaaacatgcgtccctgtactcagatgcaatactgccgccccaatgtggcttaacggaacacatcctagcagcgatgagggaatcgtctctcgcaaggcctgcgcccattggagcggtcactgttgtttgtgggatgccagcgtgcaggtaaaggcttgtgcagggggctactacgtctataaccttacagcacccccggaatgtcaccttgcctactgtactgatcctagttcagtcgaggggacctgcgaggaatgtagcatagacgaggactgcaagtcaaataacgggagatggcattgtcagtgcaaacaggactttaatataaccgacataagcctgctagagcacagactggaatgcggcgccaacgacatgaaggtgagcttgggaaaatgtcaactgaagtcactggggttcgataaagtcttcatgtatctaagcgactcccgttgttctggattcaacgaccgggacaaccgggattgggtgtctgtcgtgactcccgcgagggacggcccatgcggcacggttctaactaggaacgaaacccatgctacttactccaatacactttatctggccgacgagatcattataagagatttgaatattaaaataaactttgcctgttcttacccacttgatatgaaagtgtctcttaagacagctctacaacctatggtgagtgccttaaacattagagtgggcggcaccggaatgttcacggtgcggatggccctgttccagactcccagttacacccaaccttaccaagggtcctccgtaacactgtctactgaagcgttcttgtacgtcggtacaatgctagacggaggagatttatcccgatttgcactgctgatgaccaactgttacgccacgccatcttctaatgccacagaccccctgaaatatttcatcatccaagaccgttgtccacacacaagagacagcacaattcaggtggtcgaaaatggtgagtcctcccagggcagattctccgtgcagatgttccggttcgctggtaactatgatcttgtgtatctccattgcgaagtgtatctgtgtgataccatgaatgaaaagtgtaaacccacgtgctctggaacccggttccggagcggttcggtgatcgaccagagccgggttctgaacctgggccccatcactcgtaagggtgtgcaggcgactgtgagtcgagctttttcctctctgggtttgttgaaagtgtggctcccgttactgcttagtgccaccctgaccttaacttttcagtag

SEQ ID NO: 210973 - DNA, 2022 bp, synthetic construct
  misc_feature 1..2022: note = Description of Artificial Sequence: Synthetic coding sequence
  source 1..2022: mol_type = other DNA
atgggccagcccagcctgacctggatgctgatggtggtggtggccagctggtttattactacagccgcaacggacacatctgaggcaaggaccaaatacaactgtccggcccgttggagctggcgcaccccgcagcgcgggggcgataccgaacaggggcctgacgaggattttacatcacagggaaggtggtgtagcgaatgccactccaacgctacttgtaccgaggacgaggccgtaacgacgtgcacctgtcaggagggatttactggcgacggcttaacttgcgtcgacctggatgagtgcgccatacctggagcccataactgcagtgccaacagctcttgtgtaaatacgccggggtccttttcttgcgtgtgcccggaagggtttcgcctgagcccagggctagggtgcactgatgttgatgagtgcgccgaacctggattgtctcattgccatgcgctggccacctgcgtgaatgtggtgggctcatatctatgtgtgtgccccgcagggtatcgcggggacggctggcattgcgaatgcagtccaggatcatgtggacccggcctcgattgtgtgccggagggcgatgctttggtgtgcgctgatccctgtcaagcccatagaacattggatgagtattggcgatccacagaatacggggaaggctacgcatgtgatacagacttaaggggttggtaccgcttcgtgggtcagggaggcgcaaggatggctgagacttgcgtacccgttctgcggtgtaacaccgccgcccccatgtggctgaatggcacacatccttcctccgatgagggcattgtcagtaggaaagcttgtgcccactggagcggtcattgctgcctgtgggatgcctcagtccaggtgaaggcctgcgccggcggctattatgtgtacaacctcaccgctccacctgaatgtcatctcgcgtactgcaccgacccctctagtgtggagggaacatgtgaagaatgtagtatcgacgaggattgtaagtctaataatggccgctggcattgtcagtgtaagcaagatttcaacattacggacatctctctcctggagcatagactggagtgcggcgcaaacgacatgaaagttagtctgggaaagtgtcagcttaaatccctgggattcgataaagtattcatgtacttatccgactctaggtgcagcggtttcaatgaccgcgataacagagactgggtctctgttgttaccccagcgcgagatggcccctgcggaacagtgttgacaaggaatgaaacccatgctacttacagcaacaccctgtacctggccgacgagataatcatccgggatcttaacataaagatcaatttcgcttgtagttatccgttagatatgaaggtgtccctgaaaacagctttgcagccaatggtgtctgcactcaatattagagtcggaggcactggtatgttcaccgtgcgtatggctctgtttcagaccccttcttatacccagccttatcagggatcatccgtgactttatctaccgaagcattcctgtacgttggcaccatgctggatggaggggacctttcaaggttcgcactgctcatgacaaactgctacgcaaccccctcctccaacgctactgacccacttaagtacttcattattcaggacaggtgccctcacacgagagatagcactattcaagttgtcgaaaacggcgaatcttcccaggggaggttttcggtgcaaatgttccggttcgccgggaactacgatctagtatacctccattgcgaggtctatctgtgtgacacaatgaacgagaagtgcaaaccaacatgctctggtacccggttccgctccggtagcgtcatcgatcagtcccgagttctgaatctcggtcccattactagaaagggcgttcaggctacagtgtcaagggccttcagctccctggggctgctgaaagtttggttacccctactgctgtcagccacacttaccctcacatttcagtag

SEQ ID NO: 210974 - DNA, 1857 bp, synthetic construct
  misc_feature 1..1857: note = Description of Artificial Sequence: Synthetic coding sequence
  source 1..1857: mol_type = other DNA
atgggccagcccagcctgacctggatgctgatggtggtggtggcctcctggttcatcaccaccgccgccacggatacgagcgaagcccgatggtgcagtgaatgtcatagtaacgcaacctgtacagaagatgaggctgtgaccacctgtacctgtcaagaggggtttaccggcgacggtctgacgtgcgttgacctcgatgaatgcgccatccccggggcgcataattgttcagcgaactccagctgcgttaacactccaggttccttctcctgtgtttgccccgaggggtttagactgagccccgggctggggtgcacagatgtcgacgagtgcgccgaaccaggcctgtcccattgtcatgctctggcgacctgcgtaaatgtggtggggtcctgcgggcccggtctggattgcgtgcctgaaggggatgccttggtgtgcgctgacccctgtcaggctcatagaacactggacgagtattggagatccactgaatatggcgagggttatgcctgcgatactgacctacgggggtggtatagattcgtcggacagggaggagcaagaatggcggaaacttgcgtgcctgtgctgcgctgcaatacagcagcacccatgtggttgaatggtacacacccctcttcagacgagggaatagtgagcagaaaggcatgcgctcactggagcggtcactgctgcttgtgggatgcatctgtgcaagtgaaggcctgtgccggaggctactatgtatacaatcttactgctcctccagagtgtcatctcgcttattgtacagaccctagcagtgtggaagggacatgtgaagagtgctctattgacgaagactgtaaaagcaataatgggcggtggcactgtcagtgtaagcaggacttcaatatcactgacatctctctgctcgagcaccggctggagtgtggcgcaaacgatatgaaggtgagcttgggcaaatgtcaactaaagagcttggggttcgacaaggttttcatgtatctgtctgacagccgatgttccgggttcaatgaccgagataacagagactgggtatctgtggtcacccccgcacgcgatggaccatgcggaactgtcctgactcggaacgagacccacgctacgtactctaatactctctatctggccgacgagatcatcattagagacctcaacattaaaattaactttgcttgtagttacccactggacatgaaggtcagtctaaagacggcgcttcaacccatggtaagcgccctaaacatcagggtaggcggaaccggcatgttcaccgtgcgcatggctctgttccagaccccaagttacactcagccctatcaggggtcaagtgtgaccctgtccactgaagccttcttatatgtcggaaccatgctggatggaggtgacctttcccgctttgcgttgctgatgaccaactgttacgcaacaccctcatccaacgctacagaccctctgaaatactttattatccaggaccgctgccctcatacacgtgattccacaattcaggtcgtggaaaacggcgaaagctctcagggacgctttagtgttcagatgttccgattcgccggcaactacgatctggtttatctccactgtgaggtgtatttgtgcgacacaatgaacgaaaaatgtaaaccgacgtgtagcggcactcggtttcggagtggaagcgtgatagaccaaagcagggtgctgaatctgggcccaatcaccaggaagggtgttcaagcaacggtatcgagggccttctctagccttggactgttaaaagtctggcttcccctcctcctaagcgcaaccctgaccctcaccttccagtag

SEQ ID NO: 210975 - DNA, 759 bp, synthetic construct
  misc_feature 1..759: note = Description of Artificial Sequence: Synthetic coding sequence
  source 1..759: mol_type = other DNA
atggcccccgccccccaggcccccgagcgggaccccgtgggcagctggtacaacgttaccattctagtcaagatggacttcaaagagttgcagcaggtcgatcctaggctgttgaaccatatgcgactgctccacagtcttgtgactagtgctctccaacccatggcctctacagtccaccacctacatagtgctcccggcaatgccagcacaaccgtctcgagactcctcctgggtcttccccgtcccctgcccgtggcagacgtctcaacgctcctaggggacatcgccaaacgtgtgtacgaggtgatttcggtccaggtgcaggacgtcaacgagtgtttctacgaagagctcaatgcctgctcagggagagagttatgcgcgaacctcgagggatcatactggtgcgtgtgccatcaggaggctccggcaaccagccctcggaagctgaaccttgagtgggaggattgtcctccagtctcagactacgttgtactcaacgtcacctcagatagctttcaggtaagctggagactgaactcaacccaaaatcacaccttccacgtgagagtctacagagggatggagttactcagatcggcaaggacacaatcacaggcacttgccgtggccggcctggaggcaggcgtattgtaccgcgtcaagacctcctatcagggatgtggtgctgatgtatccaccaccctgacaataaaaaccaaatacgtgctggaaaagctggactttcagagctag

SEQ ID NO: 210976 - DNA, 555 bp, synthetic construct
  misc_feature 1..555: note = Description of Artificial Sequence: Synthetic coding sequence
  source 1..555: mol_type = other DNA
atggcccccgccccccaggcccccgagcgggaccccgtgggcagctggtataatgttacaatattggtgaagatggacttcaaggaactccagcaggtagatccccggctcctgaaccatatgagactgctgcactcactggtgacttccgccctacagccgatggcctccaccgttcatcacctgcatagcgcgcctggaaatgctagtaccactgtgtcgcgcctgttattaggccttccgaggccactccctgtggccgatgtttctactctgctcggtgatatcgcaaaacgcgtgtacgaagtaataagtgtgcaagtccaggacgtgaacgaatgcttctatgaggaactcaacgcctgcagcggtcgtgaactgtgtgctaatctggagggttcgtattggtgtgtgtgtcatcaggaggcccctgccactagtccacgcaaactaaaccttgagtgggaggctcgaggcttagaaattcacttagaactgcgggccacgagtacgagtcatggcacccctctgagcagcgctgaaaactgtttatag

SEQ ID NO: 210977 - DNA, 3741 bp, synthetic construct
  misc_feature 1..3741: note = Description of Artificial Sequence: Synthetic coding sequence
  source 1..3741: mol_type = other DNA
atggtgtaccggacccagtacctggtggtggaggtgcccgagagcaggaacgtgaccgactgctgtgaaggatatgagcagctggggctgtattgcgtattacctttgaaccagagcggccagtttacctctaggcccggcgcttgccctgccgaaggcccagagccgtctacctctccttgttcactggacatcgattgtccgggactcgagaagtgctgtccttggtctggaggacgatactgtatggcccctgccccacaggctcccgaacgggaccctgtggggtcatggtacaatgtcacaatcctggttaaaatggactttaaagaactccagcaggttgaccctagactactcaaccacatgagattactgcacagcctggtgacgtcagccctccagccgatggccagcacagttcatcatctgcattccgcaccaggcaatgcctccaccactgtctctaggctgctgctgggtctgccccggcctctgccagtagctgacgtgtcgactctgttaggagacatcgctaagcgcgtgtacgaggttatttccgtccaggtgcaagacgtaaacgagtgcttctacgaggagcttaatgcttgcagtggtagggagctgtgcgcaaatttggaaggatcatattggtgtgtgtgccaccaagaagcgcctgctaccagccctaggaagctaaacctcgagtgggaagactgtccccctgtttccgactatgtcgtgctcaacgtcacaagtgactcatttcaggtgtcttggaggttgaacagtacacagaatcacactttccatgtgagagtgtaccgggggatggagcttctccggagtgcccggacacagtcacaggccctggctgtcgcagggctagaagccggtgtgttgtatagggtgaagactagctaccagggctgcggcgctgacgtcagtaccacattaactatcaagaccaatgcccaggtattcgaagtgacaattaaaatcgtcaaccacaacttgactgaaaaattactcaacagatcctctgttgagtaccaggatttctcccgacaacttcttcacgaggttgagagttcctttccaccagtcgtgtccgacctatatcgctcaggcaagcttcgaatgcagattgtcagtctccaagccggctctgtcgttgtgcggctcaagttaacagtacaggaccccggttttcccatgggtattagcactctcgctccgatcctccaacctctgcttgcttcaaccgtgttccaaatagataggcagggcacacgcgtgcaggattgggacgagtgtgtggatagtgctgaacacgattgtagtccggcggcgtggtgcattaacctggaaggtagctacacatgccagtgtagaaccacacgcgacgctacaccatcacgggccggtagggcatgtgaaggtgatcttgtttcaccgatgggaggaggcctgagcgcagcgaccggggttacagtgcccggcctgggcactggcacagcggcactcggtcttgagaatttcaccctttccccatcgccagggtacccgcagggaacacccgctgctggtcaggcctggacacctgagccatcacctcggcgtggaggaagtaacgtggtcggatatgaccgaaacaacactgggaaaggggttgagcaagaacttcagggcaactccattatggagcccccgagctggcccagccctaccgaggaccctacaggccacttcttatggcacgcaacccggtcaaccagagagactttgctgaaccctacttggttgcggaacgaggatagtggaccaagtggtagcgtggacctcccattgacaagcacactcaccgcgctcaagacccccgcgtgcgtgccagttagtattggccggattatggtgagtaatgtgacttcgaccggcttccacctggcctgggaggccgatctcgccatggacagtacattccagctaacactgacgtcaatgtggtcccccgctgtagttttagagacgtggaacacatcggtgacactgtcagggcttgagccaggagttctgcacctcgttgagatcatggccaaggcttgtgggaaagagggcgctagagcgcaccttaaggtgcgcacagctgcaagaaagctcattggaaaagttcgaataaaaaacgtccgttattctgaaagctttagaaacgcctcaagccaagagtatcgcgacttcctggagctcttttttcgtatggtacgcggaagtctacctgccacaatgtgccaacacatggatgcaggcggagtgagaatggaggtggtctccgtgacaaacggctcaatcgttgttgagtttcacctgcttattatcgcggatgtggacgtccaggaggtgtccgcagccttcctgaccgccttccaaacggtccctttactggaagtaatccgcggggacacattcatccaggactatgacgaatgtgagcgcaaggaagacgattgcgtgcccggcacatcctgtaggaatactttgggcagctttacgtgcagttgcgaaggaggcgctccagatttcccagttgaatacagcgaacgtccatgtgaaggagactcccccgggaatgagacttgggccacatctcctgaaaggccactcacgacagcaggcaccaaggctgcctttgttcaaggaacatctccaaccccccaggggctcccacagagactaaatcttaccggagccgtgagagtgctatgcgagatagagaaagttgttgtggctatacagaagcggtttctgcagcaggagtctattcctgaatcctcactttatttgtctcatcccagctgtaatgtgtcccactcgaatgggacacacgtacttttggaggcggggtggtcagaatgcggcaccttgatgcagagcaacatgacgaataccgtcgtgaggacaactctgagaaatgacctgtcgcaagaaggtatcattcaccatctgaagatcctgtcgccgatctactgcgctttccagaatgatcttctgacaagctccggcttcaccctagaatggggtgtctacacgataatcgaagacttgcacggcgccggaaattttgtgacggagatgcagctgttcatcggagactccccaatcccacaaaactacagcgttagcgcttccgacgacgtccgcattgaggtgggtttgtatagacagaagtcgaatctcaaagttgtcctaaccgaatgctgggcaactccctcaagcaacgctagggaccctattactttctcttttatcaacaattcttgtcccgtgcctaatacatacactaacgtgatcgagaatggcaacagtaacaaggcacagttcaagctccgcatatttagcttcattaatgattctatcgtgtacttgcattgtaagctacgtgtttgcatggaaagcccaggggcaacatgcaagattaactgtaacaacttccgcttgcttcagaatagcgagaccagcgctacacatcaaatgtcctggggacctctcatccgcagtgagggtgaaccaccacacgcagaggccggtttaggtgctggatacgttgtgctcatcgtggtagctattttcgtgctggtagcaggcaccgctaccctgttgattgtccgctatcagcgaatgaacggtagatacaattttaaaatccagtctaataatttcagttatcaggtattctatgaatag

SEQ ID NO: 210978 - DNA, 4125 bp, synthetic construct
  misc_feature 1..4125: note = Description of Artificial Sequence: Synthetic coding sequence
  source 1..4125: mol_type = other DNA
atggtgtaccggacccagtacctggtggtggaggtgcccgagagcagaaatgtgacggactgctgcgagggctatgaacaattggggctgtattgcgttctgcctctgaaccagtccgggcagtttacatcgcggccaggagcctgtcccgcggagggtcctgaaccatccacttcgccatgttctctcgacattgattgccctggcctcgagaagtgctgtccatggtcggggggcaggtactgtatggcacccgctcctcaggctccagaacgggacccagtcggatcttggtacaatgttactattcttgtgaagatggacttcaaagagctccaacaagtggacccgaggctgcttaaccatatgcggctcctgcattccctggtgacttccgccctgcaaccaatggcctcaactgtgcatcacctgcatagtgcccccggcaacgccagcacgaccgtctcccggttgctcctgggcctgccccgccctttgcctgtggctgatgtgagcacacttctgggtgatatcgccaaacgcgtttacgaggtgatttcggtccaggttcaggatgtcaacgaatgtttctatgaagagttaaacgcctgtagcgggcgagagttgtgcgccaatttggagggaagctactggtgtgtatgtcatcaggaggcccctgcgacctcaccccgcaaacttaacttagaatgggaggactgccctccagtcagcgactacgtggtactcaacgtgacatccgattcatttcaggtgtcttggaggttgaattccactcagaaccacacctttcatgtgagggtgtataggggaatggagctgctgagatcagcccggacgcaatctcaggctctcgccgtggcggggcttgaggccggggttctgtatagagttaagacctcatatcagggatgtggcgctgacgtaagtacaaccctgacaataaaaactaacgcccaggtgttcgaggtcactatcaagatagtcaatcacaaccttaccgaaaaactgctgaacaggagctcagtggaatatcaagacttctccaggcagctactgcacgaagtggaatcttctttccctccagtcgtgtctgacttgtataggtccggaaaattacgcatgcagatcgtgtctctccaggctggatctgtggtggtgcgactgaaattaaccgttcaggacccagggttcccgatgggcatttccactttggcccctattcttcaacccctgctcgcatctactgtttttcagattgaccgtcagggcacgcgggttcaagactgggacgagtgcgtggactccgccgaacacgactgctctccagcggcatggtgcataaatttggaagggagctacacgtgccagtgtaggacaacccgcgatgccacgccatcccgggcgggccgggcgtgtgaaggggatctggtctctccgatgggaggcgggctgtcagctgccaccggtgttaccgttcctggactcggcacagggaccgctgctctgggcctggaaaattttaccctgtcacctagcccagggtatccgcagggaacccccgccgcaggacaagcatggacgccagagccatctcccaggaggggcggcagtaacgtggtgggctatgatcgtaacaacaccggaaaaggggtcgagcaagaggtaccttccactgccccaggcctgggtatggatcagggatctcctagccaagtcaaccctagccagggatctccatcacaaggcagcctccgacaggagtccacgtcccaggccagccccagccagcggagtacatcccaagggtccccatcccaggtcaacccctcacaaagaagcacttcccacgctaatagctcacagggctctccttcgcaggggagccccagtcaggaaagtccctcgcagggcagcacatctcaggcctcaccaagtcaccgaaatacaataggcgtgatcggcaccacctctagccctaaggccactgggtcgacgcatagcttccctcccggagccaccgacggcccactcgctctcccaggacagttgcaggggaacagtattatggagccgcccagctggccgtctcccacagaagaccccaccggtcacttcctttggcacgccacaagaagcactcgggaaacactgttaaacccaacttggctccgcaacgaagattccgggccttcagggtccgtggacctgccactcacttctaccctgactgccctgaaaactcccgcttgcgtgccagtttctatcggccgtatcatggtgagcaatgtgactagcaccggatttcacttggcatgggaggcagacctggcaatggatagcacctttcaactgacgctcacctcgatgtggagtccggcagtagtgctggaaacatggaatacctccgtcacgctctctggacttgaaccgggagtcctacacttagtggagattatggccaaagcctgcgggaaggagggagctcgggcccatctcaaggtgcgcaccgccgcccgcaagctgatcggaaaggtgaggatcaaaaatgtcagatatagtgaatcttttcggaacgcctcatcccaggagtaccgggatttcctggaactctttttcaggatggtacggggcagcctgcccgctactatgtgccagcatatggatgccggcggggtgcgtatggaagtggttagcgtaacaaatggttctatcgtggtggaatttcacctactgattattgccgatgtggacgtgcaggaggtgtcggccgcattcctcacagcatttcaaaccgtaccacttttggaggtcatcagaggagatactttcatccaagattacgatgagtgcgagcgcaaggaggatgactgcgtccccggaactagttgtagaaataccttaggatccttcacgtgcagctgcgagggcggagcccctgatttcccagtagaatacagtgagcgaccttgtgagggagactctcccggaaacgagacttgggcaacctctccagaaaggcctctgacaacagcagggaccaaagcagccttcgtccagggtacctcgccgacaccacagggcctccctcagaggttaaatctgacaggcgctgtgagggtcctctgtgagatagaaaaggttgttgttgcgatccaaaaacggttcctccagcaggaaagtattccagaatcgagcctgtatctatcacatccttcctgtaatgtgtcgcattcaaatggaacacatgtgcttttagaggctggatggagcgagtgtggaactctcatgcagagtaatatgacaaatacggtggtccgcactactctgcggaacgacctcagccaggagggaattatccatcatttaaaaatactcagccccatctattgtgcgtttcagaatgacctgctgacgtcatctggcttcacgctggagtggggagtctatacaatcatcgaagacctgcacggcgcaggcaacttcgtgacagaaatgcagctctttatcggcgatagcccaatcccacagaattattccgtatccgcttctgatgatgtcagaatcgaagttgggctttatagacagaagtccaatctcaaagtggtgctgaccgaatgttgggccacccccagcagcaacgctagggatccaattacattcagttttatcaacaatagctgtccagtgcctaatacttacactaacgtgattgagaatggcaatagtaacaaggctcaatttaagcttagaattttctccttcatcaacgacagcatcgtttacctccattgtaagctcagagtttgtatggaatcccccggcgccacctgcaaaatcaactgcaataactttcgactgttgcagaatagtgagaccagcgccacccaccagatgagctgggggcccctgatcaggtcagaaggagagccacctcacgctgaggccggacttggggcgggatacgtggttttaatcgtggtcgccatctttgtattggtggcagggacggcgactttgctcattgtaagatatcagaggatgaatgggcggtacaattttaagattcagagcaataacttttcttaccaagttttttatgagtag

SEQ ID NO: 210979 - DNA, 3957 bp, synthetic construct
  misc_feature 1..3957: note = Description of Artificial Sequence: Synthetic coding sequence
  source 1..3957: mol_type = other DNA
atgctgcggaccagcggcctggccctgctggccctggtgagcgccgtgggcccttcacaggccagcggctttacagaaaagggtttaagcctcctcggttaccagctgtgttcacatcgagtaacacacacggttcagaaggttgaggccgtgcaaaccagctacacttcttatgtaagttgcgggggctggatcccctggcgtagatgtcctaagatggtttaccggactcagtacctggttgtcgaggtccctgagtcgcgcaacgtcacggactgctgcgaagggtatgagcagctcggactgtattgcgtactgcctctgaatcagtctggccagttcacgtctaggcctggcgcttgtcctgccgaggggcccgaaccttccactagtccctgtagcttggacatagactgcccaggcctggagaaatgctgtccctggtcaggaggccgatattgcatggccccagccccacaggctccggaacgcgaccctgtaggcagttggtacaatgttacgattctggtgaaaatggatttcaaagaactgcaacaagttgacccgagattgttaaaccatatgcgactccttcatagcctcgtgacaagcgcccttcaaccgatggcttccacagttcatcacctgcactctgcccccggcaacgcatcaactacagtgtcccgacttttgcttggtcttccccggcctcttcctgtggccgatgtttccacactgctcggagatatagcaaagcgcgtctatgaggtgattagtgttcaagtgcaggacgtgaatgagtgcttctatgaagagttaaatgcttgcagtggacgtgagctctgcgcaaacttagagggctcatattggtgtgtttgtcatcaggaagccccagccacttcccctcgcaaactaaaccttgaatgggaggactgccccccagtctccgactatgtggttcttaatgtgacttcagactcctttcaggtgagctggagacttaactcaactcagaaccatacctttcacgtgcgagtgtatcgggggatggaactgctgagaagcgccagaacccagtcccaggccttagcagtggctggtctcgaggccggcgtgctgtatagagtgaagactagctatcaggggtgcggtgcagatgtgtccactacactcacgatcaagactaatgctcaagtctttgaagtcacaatcaaaatcgtcaatcacaatctgacagagaagttgctgaacaggagttccgtggaataccaggatttcagccgccagttgctccacgaagttgaatcttcttttccccccgtggtttcggacttgtaccgctccggtaaactgcgaatgcagatagtttctctccaagcaggctccgtggtcgtgcgcctgaaattaactgtgcaggacccaggctttccgatggggatcagcaccctggctccgattctgcagcccttgctggcatccactgtgttccagatcgatcgccagggcacccgagtgcaggactgggacgagtgcgtggattcggccgagcacgactgttctccagccgcatggtgtattaacctggaggggtcgtacacctgccaatgccgtacaaccagggacgccacaccaagtcgcgcaggacgcgcctgcgaaggggacctcgtctctcccatgggcgggggactgtccgcagcaacaggcgtgacagttcctggactgggaactggaacggccgccctgggattagaaaattttacactctctccctccccaggatacccgcagggaactcccgccgccggtcaggcttggactccagaaccatcaccacgtagaggaggctccaatgtggtcggctacgatcggaataataccggaaaaggagtagaacaggagctgcagggcaacagcatcatggaacccccatcctggcccagccctaccgaggatcccacaggccattttctgtggcatgctacgcgatccacacgtgagaccctcctgaaccctacctggctccgaaatgaggactccggaccatctgggtccgtcgacctgcccctgacatcaaccctaaccgcactgaagacacctgcctgcgtgcctgtgtcaattgggcgaatcatggtgagtaacgtcacctcgacggggttccatctcgcatgggaggcagaccttgccatggattccacgttccagctcaccctgacttccatgtggagcccggcagtggttttggagacctggaatacttctgtgacattgtccggtctggagcccggggttcttcatctggtcgaaatcatggctaaggcctgtggcaaggaaggagctcgggcccacctcaaagtcagaactgctgcccggaagctcattggaaaagtgaggattaagaacgtgaggtacagtgagtcatttcgaaacgctagctcacaggaatatcgcgatttcctggaactgtttttccgtatggttagagggagtcttcccgcaaccatgtgccagcatatggacgcaggcggggtgcgcatggaggtggtgtccgtgactaatgggtccatagtcgtggagttccatctcctgataattgctgacgtggatgttcaagaggtgtctgccgcatttttgacagcctttcaaactgtccccctgcttgaggttatccgcggcgacactttcatccaggactatgacgagtgcgagcggaaggaggacgattgcgttcccgggacgagctgtcgcaatactttggggtcgttcacctgcagctgtgagggaggagcccccgattttccagtcgagtactcagagcgcccatgtgaaggagactctcctggtaatgagacatgggcaacttcccccgaaaggcctctcaccactgcgggcaccaaggctgccttcgtccagggcacaagccctacacctcaagggctaccccagcgtttgaatttgacaggcgcagtccgagtactctgtgaaattgaaaaggtcgtcgtcgctatccagaaaaggttcttgcagcaggaaagcatacccgaatcatctctgtatctgtcacaccccagctgcaacgtgtcgcactcgaacgggactcacgtgcttctggaagccggttggtctgaatgtgggacgcttatgcagtccaacatgaccaatacggtagtgcggacgacacttagaaacgacctctcccaggagggtataattcatcatctgaagattctgagtcctatctattgcgcattccagaatgatctgcttacttcctccggattcactctggaatggggcgtctacacgatcatcgaagacttacatggagcaggaaacttcgtgacagaaatgcagctgtttataggggacagccccatccctcagaattacagcgtcagcgcctcagatgacgtgcgaatcgaggtaggattgtacagacagaaatccaacctcaaggtagtgctgacagaatgttgggccaccccgagtagcaatgcgagagacccaatcacattctcctttatcaacaatagctgccccgttcccaacacttacaccaatgtgatcgagaatggaaatagcaacaaggcccagtttaagctgcgcattttttccttcattaatgattccattgtgtatttacactgcaaactgcgggtgtgcatggagagcccgggggccacctgcaagataaattgtaacaattttcggctcctccaaaactcagaaacgagcgcaacacaccagatgtcctggggcccacttatcaggtccgaaggtgaacctccacatgccgaggccggattaggcgcaggctacgtggtcctgattgtggtcgccatctttgtgctggtcgccggcactgccactctgctgatcgtacgatatcagaggatgaacgggcggtacaatttcaaaatccagagcaacaactttagttatcaagtgttttacgaatag

SEQ ID NO: 210980 - DNA, 4341 bp, synthetic construct
  misc_feature 1..4341: note = Description of Artificial Sequence: Synthetic coding sequence
  source 1..4341: mol_type = other DNA
atgctgcggaccagcggcctggccctgctggccctggtgagcgccgttgggccgtcccaggcttccgggttcacagaaaaggggctttccctgctcgggtaccagctttgtagccacagagtgacgcacaccgtccagaaggtcgaggcagtgcaaacatcttatacgtcatacgtctcatgcggcgggtggattccatggcgtaggtgccctaaaatggtttatcgtacacaatacctggtggtggaggtgcccgagtcacgcaacgttaccgactgctgtgaagggtatgaacagctcgggctgtattgtgtcctgcccctgaaccaaagcggccagttcaccagcagaccaggcgcctgcccggccgagggtccagagccgagcacgtccccctgtagcctggatatcgattgcccaggactggaaaaatgttgcccatggtctggtggcagatattgcatggcgcctgcacctcaggcacctgagcgtgaccccgtgggcagttggtacaacgttaccatactagttaagatggatttcaaagaattgcagcaagttgaccctcggctcctgaaccacatgcggttattacactccctcgtgacatcggctctgcagccaatggcaagcacggtgcatcatttgcatagtgcccctggaaatgctagcacaacagtgagtagactactcctgggactcccgaggccccttcctgtagctgatgtatcaacccttctgggagatatcgctaaacgggtttacgaagttatctctgtccaggtgcaggacgtcaacgagtgtttttatgaggagctgaacgcttgttctggacgggagctgtgcgccaatctggagggcagttactggtgtgtctgtcaccaggaggctcctgcaacctccccccgtaagcttaacttagagtgggaggattgtcctcccgttagcgactacgtagtgctcaatgtcacaagtgacagctttcaggtctcttggagattgaacagcacacagaaccatacattccatgttagggtatatagaggtatggaactgctgcgctccgccagaacccagagtcaggcccttgctgttgccggactggaggcaggggtattgtacagggtgaaaacgtcataccagggttgcggggccgatgtttcaacaaccttgactatcaagactaatgcacaggtgttcgaagttacgatcaagattgtgaaccataatttaacagaaaagttactcaatcgctccagcgttgagtaccaggacttttctaggcagctgcttcacgaggtagagtcaagtttccccccagtggtatcagatctgtaccgcagcggaaagctgcgtatgcaaattgttagcctgcaagccggcagcgtggtggtgagacttaaattgacggtgcaagaccctgggtttccaatgggaatttctacactagccccgattttacagcctctgctcgcttccacagtgtttcagatagatcgccagggtacacgcgtgcaggattgggatgaatgcgttgactccgccgaacacgattgcagcccggcagcttggtgcatcaaccttgagggcagctacacatgccagtgtaggaccacacgcgacgcaaccccttcgagggcagggcgcgcctgtgaaggagatttggtgtctcccatgggtggaggtctgtccgcagccaccggggtgactgtccccggcctgggcaccggcactgccgccctgggcctcgaaaatttcactctcagcccttctcccggctacccacagggaactcctgcggccggtcaggcctggacccctgagccttccccgcgtcgaggaggctccaatgtggtaggatatgaccggaataataccggtaagggggtggagcaggaagtccccagtaccgctccagggctcggtatggatcagggatcccctagccaagtgaatccaagccagggaagtccatcacagggttccttgcgtcaggagagcacttctcaggcctcaccttctcaaagaagtacaagccaaggatccccatcgcaagtcaaccctagtcaacgtagtactagccacgcaaactcctctcaggggtcccccagccagggtagcccgagccaggaatctccatcgcaaggatccacaagccaggcctcaccatcacacagaaataccatcggcgtcattggaacaaccagcagccccaaagcgaccggatctacacactccttccctcccggggccaccgacgggccactggctctgcctggccagctgcaagggaattctataatggagcccccgagttggcccagcccaaccgaggaccctaccggccactttctctggcacgctacccgatctacccgcgagactctcctgaatccgacctggctccgaaatgaggacagcggcccatccggatcagtagatttgcccctgacctctacgttgacagctctgaaaactcctgcctgtgtgcctgtctccattggtcgcatcatggtgtccaacgtcacttcaacagggtttcacctggcatgggaagcggacctcgccatggacagcacatttcagttgacccttactagcatgtggtctcccgctgtagtgttggaaacctggaatacgtccgtcactctcagtggactcgagcccggcgtgcttcatctggtggagataatggccaaggcatgcggcaaggagggagcgagggcacatctgaaagttagaactgctgcgcgtaaattgattggcaaggtgagaattaaaaacgtgcgatactccgagagcttccgcaacgcttctagccaggagtatcgggactttctcgagttgtttttccggatggtcaggggctcactgcccgccacaatgtgccaacacatggatgcggggggtgtgcggatggaggttgtttcagtcaccaacggctcaatagtcgtcgaatttcaccttctaatcattgcagacgtagatgtccaggaggttagcgcggccttcctgaccgcctttcagactgtgccccttttagaggttattcgcggagacacctttatccaagactatgatgaatgcgagcgaaaagaagatgattgcgtgccaggaacaagctgtcgcaatactctcggaagttttacatgttcttgcgaaggcggggcacctgacttccctgtggaatactccgagcggccttgcgagggcgactcacccgggaacgagacttgggccacctcccccgagcggcccctgactaccgccggcacaaaggctgccttcgttcagggcaccagcccaacccctcagggcctgccacaacggctaaatctgacaggcgctgtgcgggtactctgcgagatcgagaaggttgttgtagccattcagaagcgcttcctgcagcaggagtcaattcccgaaagctctctgtatctttcccatccatcctgcaacgtgtctcattctaacgggactcacgttctattggaggccgggtggagcgagtgcgggacactcatgcagagtaacatgaccaacacggtggtgcgtacaaccctccggaatgatctatcccaggaaggcataatacaccacctgaagatcctgtcaccgatatattgcgcattccagaatgatttgctcacaagcagcgggttcactttggagtggggcgtgtatacgataattgaagatctgcacggcgctggaaactttgtcactgagatgcaactgttcatcggcgattccccaattccacagaactattccgtgagcgctagcgatgatgtcaggatcgaggtagggctctatagacagaagagtaatctgaaggtcgttctgactgaatgctgggccacaccttcctccaacgcccgcgatcccattaccttctctttcatcaacaactcatgcccagtacccaacacttataccaacgttatagaaaacggcaatagcaataaggcccagttcaagctgaggatcttcagtttcataaatgacagcattgtgtatttacactgcaagttgcgggtctgcatggagtccccaggtgccacttgtaaaattaactgcaacaatttccgtctcctgcagaatagcgagacatctgcgacacaccagatgtcctggggtcctctcattcggagtgagggcgagcccccgcacgccgaggcaggcttaggcgctggttatgtggttttgattgtcgttgcaatatttgtacttgtcgccggcacagccacccttctgattgtccgctaccagcgcatgaatggtaggtataattttaaaattcagtcgaacaacttcagctaccaggtattttatgaatag

SEQ ID NO: 210981 - DNA, 234 bp, synthetic construct
  misc_feature 1..234: note = Description of Artificial Sequence: Synthetic coding sequence
  source 1..234: mol_type = other DNA
cccgtgggcagctggtacaacgtgaccatcctggtgaagatggacttcaaagaattacagcaggtagatccaagattgctgaatcatatgcgtctattacattcacttatgtcgatgtccgtgagtatgcggtctagtatgcctgcactggaagggaactgcgcacagacatggagggcccggacaggggcctcagtcaccagaaagttgcaaccccgactgcacggttcttag

SEQ ID NO: 210982 - DNA, 411 bp, synthetic construct
  misc_feature 1..411: note = Description of Artificial Sequence: Synthetic coding sequence
  source 1..411: mol_type = other DNA
atgcagctgttcatcggcgacagccccatcccccagaactacagcgtgtctgccagcgacgatgtgcggattgaagtcggactttatagacagaagtccaatctaaaggtagttctgacagagtgttgggctacccctagctcaaacgcccgagatcccattacctttagcttcatcaataactcttgtccagtcccaaacacctacaccaatgtgatcgaaaatgggaattctaataaagctcagttcaagctccgaattttttcgttcatcaatgatagtatcgtatatctccactgcaaactaagggtgtgcatggaaagcccaggtgctacctgtaaaattgctgcactgggaagacgcacacatgtggactggtgggcgttccctatctcccagtggttgtcttag

SEQ ID NO: 210983 - DNA, 1221 bp, synthetic construct
  misc_feature 1..1221: note = Description of Artificial Sequence: Synthetic coding sequence
  source 1..1221: mol_type = other DNA
atgaagaagaagcagcagcaccccggcggcggcgccgacccctggcctcacggtgctcccatgggcggagctccgccgggcctcggctcatggaaacgccgcgtgccactcctgcctttccttcggttcagtctgcgggattatggtttctgcatggccacactgctggttttctgtctcggttcattactgtatcagttgtcaggtgggccaccaaggttcttgctggaccttagacaatacctggggaacagtacatatcttgacgaccatggaccgcccccctcaaaggtcctcccgtttccgtcccaggttgtatataacagggttggtaaatgtgggagcaggaccgtagtcctcctgttgcgtatcctgagcgagaaacatggctttaacctggtgacatccgacattcacaacaagacgcgactaacaaaaaacgaacagatggaactcattaagaacatctcaactgcagaacagccgtacctgttcactcggcatgtgcatttcttaaacttttcccgctttggtggcgatcagccagtatacattaatattatcagagaccccgtgaaccgattcctgagcaactacttctttcgccgctttggagattggcggggggaacagaaccacatgattcggacaccgagcatgcgtcaggaggaaaggtacctggacatcaacgagtgcattctggagaactacccagagtgtagcaatccacgcctgttttacattataccttatttctgtggacagcatccacgatgccgcgaaccaggggaatgggccctggagcgcgctaaattgaacgtcaatgagaacttcctgcttgtcggcatcctcgaggagctggaagacgtgttgttgctgttggagcgttttctgccccattacttcaagggggtgcttagtatttacaaggaccccgagcacagaaagctcgggaatatgacggtcaccgtgaaaaaaactgtacccagtcccgaagctgtccagatcttatatcagcggatgcgatatgaatatgagttttaccactatgtgaaggagcagtttcacctgctcaagagaaagtttggcctcaagtcacatgtgtcgaagccccccctccggccacacttcttcatacctacccctctggaaactgaggaaccgatcgatgacgaggagcaagacgatgaaaagtggttagaggatatttacaagcgctag

SEQ ID NO: 210984 - DNA, 2274 bp, synthetic construct
  misc_feature 1..2274: note = Description of Artificial Sequence: Synthetic coding sequence
  source 1..2274: mol_type = other DNA
atggtgcccgacaccgcctgcgtgctgctgctgaccctggccgccctcggagcttccggccaggggcagagcccactgggcagcgaccttggcccacagatgctaagagagctgcaggaaacaaatgccgctttgcaggatgtgcgcgaacttctccgacagcaagtaagggaaatcaccttcctaaaaaacactgtgatggagtgtgacgcttgtggcatgcaacagtccgttagaaccggtctgccttcagtgcggccactcctccactgtgctcctgggttctgttttccaggggttgcatgtatccaaactgagagtggagcccgctgcggaccttgcccagctggattcacaggcaatggatcacattgcactgatgtcaacgaatgcaatgcgcacccttgttttccccgagtccggtgtataaacacaagccccgggttcaggtgtgaggcctgcccccccggatatagtgggccaacccatcagggtgtcgggctcgcatttgccaaggcgaataagcaagtttgcactgatatcaacgaatgtgaaaccggtcagcataactgtgtgcctaatagtgtgtgcattaacacaaggggatcgtttcagtgcggtccgtgccagcccgggttcgtgggggatcaggcgtctggttgccaacggcgcgcacaaagattctgtcccgatggtagcccgagcgaatgccatgagcatgctgattgcgtgctcgagcgggacggatctaggtcttgcgtgtgtgctgtgggatgggccggcaacggaatcctgtgcggcagagacacagatcttgatggctttcccgacgagaaactgcggtgccctgagcgacagtgtaggaaagataactgcgttaccgttccaaatagtggccaagaggacgtcgaccgggacgggattggcgatgcttgtgaccctgatgctgacggtgatggggttccaaatgagaaggataattgtcccctggtgaggaaccctgatcagcggaacactgatgaggataagtggggcgacgcttgtgacaactgccgttcgcagaagaatgatgaccaaaaggacacggaccaggacggcaggggtgacgcttgcgatgatgacatagatggagaccgcattagaaaccaggccgataactgtcccagggtccccaacagtgaccagaaagatagtgacggcgacgggatcggcgatgcttgtgacaactgcccgcagaagagcaaccctgaccaggccgatgtcgatcatgatttcgtgggagatgcgtgcgacagcgaccaggaccaggatggcgacggacaccaggacagcagagataactgccccactgtaccaaactcagctcaggaagattctgaccacgacggacagggggacgcttgtgacgatgatgatgacaacgatggagttccagactctagggataactgtaggctggtgcccaacccgggtcaggaagacgcggacagggacggggtcggcgacgtatgccaggacgacttcgacgccgacaaagtggtagataagatcgacgtgtgccccgaaaatgctgaggtgacccttacagatttccgagccttccagaccgtggtgctggatccagagggagacgcacagattgaccccaattgggtggtgctcaaccagggacgagagatcgtacagacaatgaactcagaccctggcctggccgtcggatacactgcttttaacggcgttgactttgagggcacctttcacgttaataccgtaacagacgacgactatgccggattcattttcggatatcaggacagttccagtttttatgttgtgatgtggaagcagatggaacagacttactggcaggctaatccgttccgtgcggtggccgaaccaggcatccagctgaaagctgtgaagagttcaacaggccctggagagcagctcagaaatgcactgtggcacacaggcgatacggagtcccaggtccgcttgctgtggaaagatcctcggaacgtcgggtggaaagataagaagagctacagatggttcctccaacacagaccacaggtgggatacatcagagtccgattttacgaaggccccgaactggtggctgactccaatgtggtcctcgacacaaccatgcggggggggaggttaggcgtattctgtttttcacaggaaaacatcatttgggccaacttacgctaccgctgcaatgatactatccctgaggactatgagacacaccagctcaggcaagcatag

SEQ ID NO: 210985 - DNA, 822 bp, synthetic construct
  misc_feature 1..822: note = Description of Artificial Sequence: Synthetic coding sequence
  source 1..822: mol_type = other DNA
atggccagcgccgccgccgccgaggccgagaagggcagccccgtggtggtggggctgttagtcgtcggcaatattatcatcctcctgagtggactctcactgttcgcagaaacgatttgggtgacggctgatcagtaccgcgtgtaccccctaatgggcgtatccggtaaggatgacgtcttcgcaggcgcgtggatcgcaattttctgcggatttagcttctttatggtagcctcatttggggttggggcagcactgtgccgccggaggagcatggtactcacgtacctcgtgttaatgctgatcgtttacatcttcgagtgtgcctcctgcataacaagttatacacatagagactacatggtatccaatccgagcctcatcactaagcagatgctgactttctattccgctgataccgaccagggacaagaattaacacgtctgtgggaccgggttatgatagagcaggagtgctgcgggacttcaggaccaatggattgggtgaacttcacaagcgccttcagggcagcgactccggaggtggtcttcccctggccacctctgtgttgtagacggacagggaacttcattcctctgaatgaggaaggatgtagactgggccatatggattacctttttactaaggccggggtccagtggcacaacttgtcatcactacagaggctgccaccagggtttaagggattcagccacttgagtttccagtcgtcatgggattatcgagctgcttccaacaccagcgcaacgccctctacggcaaccaggggcgtttcacgtggactcggattgccttcttag

SEQ ID NO: 210986 - DNA, 783 bp, synthetic construct
  misc_feature 1..783: note = Description of Artificial Sequence: Synthetic coding sequence
  source 1..783: mol_type = other DNA
atggccaaggacaacagcaccgtgcggtgcttccagggcctgctgatctttggcaacgttatcatcggttgttgtggcatagccctcactgctgaatgtatcttcttcgtttcagatcagcactcactgtatcctttgctcgaagccaccgataacgatgacatctacggtgctgcctggattgggattttcgtcggcatttgtttgttctgtctgtctgttctcggaatcgtgggtattatgaagagttcacgcaaaattttgctggcttattttatcctgatgttcatcgtgtacgcctttgaagtggcatcatgtatcacagcagcgacccagcaggacttctttacacctaacctcttcctcaagcagatgctggaaagataccaaaacaattcacccccgaataatgacgaccagtggaagaacaatggagtgacaaagacttgggaccggcttatgctacaggacaattgttgcggtgttaatggtccatctgactggcagaagtatacaagtgctttcaggactgaaaataatgatgcagactatccatggccgaggcagtgctgtgtcatgaacaatctgaaggaaccacttaacctagaagcctgcaagcttggggtgcccggcttttatcacaaccaggggtgttacgaactgatttctggccccatgaaccggcatgcctggggcgtggcttggtttggctttgcaatcttgtgctggactttctgggttctgctcggtaccatgttctactggtcgaggatcgaatattag

SEQ ID NO: 210987 - DNA, 510 bp, synthetic construct
  misc_feature 1..510: note = Description of Artificial Sequence: Synthetic coding sequence
  source 1..510: mol_type = other DNA
atggccaaggacaacagcaccgtgcggtgcttccagggcctgctgattttcggtaatgtgatcataggctgctgcggcattgccttaactgcagagtgcatttttttcgtctccgaccagcacagcttatatcccctgcttgaggcaacagacaatgatgatatatacggagccgcttggatagggatcttcgtgggaatttgcctgttttgcttatcagttctgggtatcgttggtatcatgaagagcagtcggaaaatcctgctagcctatttcattttgatgtttatcgtgtacgccttcgaagtggcctcttgcatcacggccgccactcaacaagacttttttactcccaatttatttctcaaacaaatgctcgagagatatcagaacaactccccccccaataacgacgaccagtggaagaataatggcgtgacaaaaacttgggacagattgatgctgcaggacaattgttgcggggtcaatggaccctctgactggcaatag

SEQ ID NO: 210988 - DNA, 570 bp, synthetic construct
  misc_feature 1..570: note = Description of Artificial Sequence: Synthetic coding sequence
  source 1..570: mol_type = other DNA
atggccaaggacaacagcaccgtgcggtgcttccagggcctgctgatcttcggcaacgtgatcatcggctgctgtggaatcgctctgactgccgagtgtatattctttgtgtcagaccaacactccctttatcccctgctagaggccacggacaacgatgatatatatggagccgcctggattgggattttcgtggggatttgcctgttctgcctttctgttttaggcatcgttggcataatgaaatccagcagaaaaattttgctggcttatttcatcctcatgtttattgtgtatgcatttgaggtggccagttgtattaccgctgcgactcaacaggacttcttcacgcctaatctttttctcaaacagatgcttgagcgttatcagaataatagtccgccaaacaatgacgatcaatggaagaacaatggggtgaccaaaacatgggaccggctgatgctgcaagataattgttgcggcgtgaatggcccatcagattggcagaaatacactagcgctttccgcacagaaaataatgacgctgattacccctggcctagacagtag

SEQ ID NO: 210989 - DNA, 555 bp, synthetic construct
  misc_feature 1..555: note = Description of Artificial Sequence: Synthetic coding sequence
  source 1..555: mol_type = other DNA
atggcccccctgctgcccatccggaccctgcccctgatcctgatcttgctggctctactgtcccccggcgcagccgatttcaacatcagcagcttgtcaggactgctgagtccagccctgactgagtcactgttagtcgcgctgcctccctgccacctgacggggggtaatgccaccctgatggtccgacgtgccaatgattctaaggtcgtgacaagctcttttgtcgtgcccccttgtcgaggacggcgcgagttggtgtctgtcgtggatagcggagctggcttcaccgtgaccagactctctgcatatcaggttacaaaccttgtgcccggcaccaaattctacatttcatacctcgtcaagaaagggacggctacagaatcttcaagggaaattcccatgtctaccctgccccggagaaacatggagtcaataggactcggcatggccaggaccggaggtatggtggtcatcaccgttctcctgtccgtcgcaatgttcctcctagtgcttggtttcatcatcgctctcgcactgggttcccgaaaatag

SEQ ID NO: 210990 - DNA, 333 bp, synthetic construct
  misc_feature 1..333: note = Description of Artificial Sequence: Synthetic coding sequence
  source 1..333: mol_type = other DNA
atgagcatgaccgacctgctgaacgccgaggacatcaagaaggccgtgggcgcgttcagcgccacggactctttcgatcataaaaaattctttcagatggtcggtcttaaaaagaagtccgcagacgacgtcaagaaagtttttcacatgctggacaaggacaaatcaggctttattgaagaggatgagctcggattcattttgaagggcttctcccctgacgcgagggacttgtctgctaaggaaacgaaaatgcttatggcggcaggggataaagatggagacggcaagattggtgttgatgagttctccactctggtcgccgagtcctag

SEQ ID NO: 210991 - DNA, 501 bp, synthetic construct
  misc_feature 1..501: note = Description of Artificial Sequence: Synthetic coding sequence
  source 1..501: mol_type = other DNA
atgccccccctgtgggccctgctggccctgggctgcctgcggttcggctcagcagtcaacctacaaccccaactcgcctctgtgacctttgccaccaacaacccaacccttacaacagtggccctggaaaaaccgctctgtatgtttgatagcaaggaagccctcacagggacccacgaggtttacttgtacgtcctcgttgactctgtcaccccttacagtactatagacacatggcccggtcgccggagtggtggcatgattgtgattactagtattctgggctcgctaccgttttttctgttggtggggttcgctggggctatcgcactatcgttagtcgatatgggcagctccgatggagagacaacgcatgacagtcagatcacccaggaagctgtccctaagagtctaggcgcgagtgagtccagctacacttctgttaatagagggcctcccctcgacagagccgaggtctatagtagcaaattgcaggactag

SEQ ID NO: 210992 - DNA, 963 bp, synthetic construct
  misc_feature 1..963: note = Description of Artificial Sequence: Synthetic coding sequence
  source 1..963: mol_type = other DNA
atgggcctgccctggggccagccccacctgggcctgcagatgctgctgctggcccttaattgcctcaggccaagcctgtccctaggggaatgggggagttggatggacgcatctagtcagacccagggagctgggggcccagcaggagtcataggcccatgggcccccgccccactgcgcctgggcgaagctgcacccggaacgccgactcctgtgtccgttgcccatctgctcagccccgtagccaccgagctcgtcccttacacacctcagataacagcttgggatctggaagggaaggtgacggcaacgaccttcagtctggagcaaccgagatgcgtgtttgacggattggcctcggcctccgacactgtgtggctagtggtggccttttcaaatgccagccggggcttccagaaccctgagacactcgccgacattcctgcaagccctcagctactgaccgatggccactatatgacccttccactgagtcccgaccagctgccatgcggtgatcctatggccggcagcgggggagcccctgtgctgcgcgtgggtcacgaccacggctgccatcagcagccgttttgcaacgccccccttcccgggccaggaccttatcgcgaagatcctcgaatccaccgacatttagcccgagcagccaagtggcaacatgatcgccactatctgcacccgctgttctccggacgcccacctacactgggactcctgggaagcttgtaccacgctctcctccagcctgtggtagccggaggcgggcccggagctgccgctgaccgtctattgcacgggcaggcactccatgaccctccccatccgacccagagggggaggcacacagccggcggcctccaggcatggccagggccgcctcctcagccccaacccctggcgtggcccctctgtatgggcctcggcgagatgggacgatgggagtag

SEQ ID NO: 210993 - DNA, 831 bp, synthetic construct
  misc_feature 1..831: note = Description of Artificial Sequence: Synthetic coding sequence
  source 1..831: mol_type = other DNA
atgggcctgccctggggccagccccacctgggcctgcagatgctgctcctggcattgaactgtttgagaccatccctgtcccttgagctcgtcccttacaccccacagataacagcctgggacctggagggaaaggtaactgccacaaccttcagcctggaacaacccaggtgcgtttttgatgggcttgcttcagccagcgatactgtctggctggtggtggctttttccaacgccagccggggatttcaaaatcctgaaacccttgctgatattcccgcgagtcctcaattgttgaccgacggccactacatgaccctgccgctgtcccccgatcagttgccgtgcggtgatcccatggccggatccggcggtgctccggtgttgagggtcggacatgatcacggctgccaccaacaacccttctgtaacgcacctcttcccggccccggcccatatagggtgaaattcttattgatggatacacgtgggtcccctagggcagaaactaaatggtccgaccccatcaccctacatcagggaaagaccccaggaagtatagatacctggcctgggcgccgaagtggctctatgatcgtgattacatcaatcctttctagcctggcaggcctgctgcttttagctttcttggcagcgagcacaatgagattctcatccctgtggtggccagaagaagcccctgaacagctgcgaataggtagttttatgggaaagcgatacatgactcaccatatacccccacgggaggcagccactttgccagttgggtgcaagcctggcctggaccccctccctagtctgtcgccttag

SEQ ID NO: 210994 - DNA, 963 bp, synthetic construct
  misc_feature 1..963: note = Description of Artificial Sequence: Synthetic coding sequence
  source 1..963: mol_type = other DNA
atgggcctgccctggggccagccccacctgggcctgcagatgctgctgttggccttaaattgcctccgtccctctttaagcttgggggaatggggctcctggatggacgcttcatcgcagacgcagggagcggggggaccagctggtgtgatcgggccttgggctccagccccgcttaggctgggggaggcggcgcccgggacaccaactcctgtttctgtggcccacctgctgtcccctgtcgccactgagctggtcccttacactccacaaataacagcgtgggacctggaaggcaaagtcaccgccacaacatttagcctggagcagccacggtgtgtctttgatgggttggcttccgcttccgacaccgtttggcttgtagtggcctttagtaacgcttcccggggctttcaaaaccctgaaaccctcgctgacattcccgccagcccccagttgctgaccgacggtcattacatgacgctgcccctctcccctgatcagctgccctgcggcgaccccatggccggatctggcggggcccctgtgctacgagtgggacatgaccatgggtgccatcaacagcctttttgcaatgccccactcccaggccccggcccttaccgcgaggatccacgtattcatcgccacctggctagagccgcgaaatggcagcacgaccgccattacctccaccccctctttagtggtcgcccccctaccctgggtctgctcggcagcctgtatcacgccctcctgcaacccgttgtagcaggcgggggccccggggccgctgccgacagattgttgcacgggcaggcactacacgatccccctcatcctacccagcgaggcagacacacagctggtgggcttcaggcatggccaggaccgccccctcagccccagccactggcctggcccctgtgtatgggcctgggcgagatggggcggtgggagtag

SEQ ID NO: 210995 - DNA, 831 bp, synthetic construct
  misc_feature 1..831: note = Description of Artificial Sequence: Synthetic coding sequence
  source 1..831: mol_type = other DNA
atgggcctgccctggggccagccccacctgggcctgcagatgctgctactggcactgaattgcctgagaccttcattgagtctcgaactagtcccatatactccccaaatcaccgcgtgggatcttgaggggaaagtcacagcgacaaccttctccctggagcagccaaggtgcgtcttcgacgggttggcctcggcctcagacactgtgtggctggtcgtcgctttctctaatgcatctaggggctttcaaaaccccgagactctggccgatattcccgcatctccgcaactgctaacagacggccactatatgacattgcctttgtcgcccgaccagctgccctgcggcgatcctatggcggggagcggaggggcaccagtcctcagagtgggccacgatcacggatgccaccagcagcccttctgcaacgctccactgcccggtcctggaccatacagagttaagttcctcttaatggataccagagggagccccagggccgaaacaaaatggtctgatcctattacactgcatcagggaaagactccaggcagtatcgacacttggcccggcaggagatccggttcaatgattgtgataacaagcattctgagcagtctagccggactgctacttctggcattcctggccgctagtaccatgcgttttagcagcctgtggtggcctgaagaggcaccagaacagctccggatcggaagtttcatgggtaaacgttatatgacgcaccatattcctccacgcgaggccgcaacactgcccgtaggctgcaagccagggctggaccccttgcccagcctgagtccatag

SEQ ID NO: 210996 - DNA, 963 bp, synthetic construct
  misc_feature 1..963: note = Description of Artificial Sequence: Synthetic coding sequence
  source 1..963: mol_type = other DNA
atgggcctgccctggggccagccccacctgggcctgcagatgctgctgcttgctctgaactgcctccgaccgtctctgtcactcggcgaatggggcagctggatggacgcatccagccagacccagggcgccggtgggcccgcaggggtcattggaccttgggctcccgccccccttcgcctcggggaggccgcaccgggcacccctactcctgtcagtgttgctcacctgctcagcccggtcgcgactgaactggtgccttatacaccccaaattactgcttgggatcttgaaggtaaagtcaccgccactactttttcgttagagcaaccgaggtgcgtatttgacgggctcgcctctgcctctgacaccgtctggctggtggtggccttctcaaatgcaagtcggggttttcaaaacccagaaactctggctgatattcccgcaagtcctcagcttctcacagatggccactatatgacattgccactgagccctgatcagttaccgtgtggcgatcctatggccgggagtggaggggccccagtcctgagggttggccatgaccatgggtgccatcaacagccattttgcaacgcacctctccctggccctggcccgtaccgcgaagatccacgcatccatcgccatttggccagagcagctaaatggcagcatgacaggcactacctccaccccctgttttctggtaggccacctacactggggctgctcggatcactctaccatgctctcttgcagccagtggttgctggagggggtccgggggcggccgccgatcgcttgctccacggccaggcactgcacgacccgccgcatcccacccaacggggccggcatacagcaggcgggcttcaggcatggccaggcccaccccctcagccccagccattagcctggcccctgtgtatgggtctcggtgagatgggccgttgggagtag

SEQ ID NO: 210997 - DNA, 1104 bp, synthetic construct
  misc_feature 1..1104: note = Description of Artificial Sequence: Synthetic coding sequence
  source 1..1104: mol_type = other DNA
atggaggccaacggcctgggcccccagggcttccccgagctgaagaacgacacgtttttgcgagcagcttggggtgaggagactgattatacccccgtctggtgcatgaggcaggctggccggtatctccctgaatttcgagagacccgtgctgcacaagacttcttttcaacttgtcggagtcctgaggcctgttgcgagctgacactgcagcctctgcgccgcttcccactcgacgccgcaattatcttctccgatattttagttgttccacaggcgctgggaatggaggtaactatggtgcctgggaagggaccttccttcccagaacccttgcgcgaagagcaagacctggaaagattacgggatcccgaagtggtagcttctgaacttggatatgtcttccaagctatcacacttaccagacagcgccttgctggaagggtgcctttgatcggcttcgccggggcaccatggactcttatgacttatatggttgagggaggaggatcttctactatggcccaggccaagcggtggctgtaccaacggcctcaagcatctcatcagctgctgagaatcctgacggacgccctggtgccatacctggtcggccaggtagttgccggcgcccaggctctgcagctcttcgagagtcacgccggacatctcggaccccagctcttcaacaagttcgcgttgccttacatcagagatgttgccaagcaggtcaaggcccggctgcgcgaggccggacttgcacctgtgcccatgataatcttcgcgaaagacggtcattttgcgctggaagagcttgctcaggccgggtatgaggttgtgggcctggattggactgtcgccccaaagaaggcacgcgaatgtgtcggaaagaccgtgacgcttcaggggaatctagatccatgtgcactgtatgcttccgaagaagagattggccaactcgtgaaacagatgttggacgactttggaccgcatcgctatatagccaacctggggcatgggctctatccagatatggatcctgaacatgtgggcgcattcgttgacgctgttcacaagcattccaggctgctgaggcagaattag

SEQ ID NO: 210998 - DNA, 582 bp, synthetic construct
  misc_feature 1..582: note = Description of Artificial Sequence: Synthetic coding sequence
  source 1..582: mol_type = other DNA
atggaggccaacggcctgggcccccagggcttccccgagctgaagaacgataccttcctgcgcgccgcctggggtgaggaaaccgattacacgcctgtgtggtgcatgcgacaggcaggaagataccttcccgagtttagggaaactagggccgcacaggatttttttagcacatgcagatccccggaagcatgttgcgaactgacgttacaagctctggggatggaggttaccatggtgcccgggaaaggtccttctttccctgaacctttacgggaagaacaggatttagaacggctccgtgaccccgaagtggtggcctccgaactcgggtatgtcttccaggcaatcacactgaccagacaaaggctggctggtcgggttccgctaataggctttgccggtgcaccttggaccctgatgacctacatggtggaggggggaggttcgagcaccatggcccaggcaaaaagatggctatatcagcgcccacaggccagtcatcagcttttgcgtattctcaccgacgccctggttccctatctggttggtcaggtggtcgccggcgcacaggcgttatag

SEQ ID NO: 210999 - DNA, 684 bp, synthetic construct
  misc_feature 1..684: note = Description of Artificial Sequence: Synthetic coding sequence
  source 1..684: mol_type = other DNA
ccccagggcttccccgagctgaagaacgacaccttcctgcgggccgcttggggggaggaaaccgattacacacctgtctggtgtatgcgccaggccggccggtatctgccagagtttcgggaaacacgtgctgcacaagattttttcagtacatgccgcagccccgaagcctgctgcgagctaaccttgcaaccgctaagacgtttccccctcgacgccgcgatcatcttctcagatatccttgtagtacctcaggcactgggcatggaagtcacaatggtaccaggaaagggccctagttttccagaacctttgcgagaggaacaggacctggagcgactcagggatccagaggtggtggctagcgagctcggctacgttttccaggccattacgctcactcggcagagactggccggccgcgtgcctttgatcggctttgcaggtgccccagccctgcagctttttgagtctcacgcagggcatcttggtccacagttgttcaacaagtttgctctcccgtacataagggacgtcgcaaaacaagtgaaagcacgcctaagggaggccggcctcgcacccgtgcccatgataattttcgccaaagacggccacttcgcactggaagagctggcccaggccggctacgaggtcgttggactagattggacagtggcaccgtag

SEQ ID NO: 211000 - DNA, 687 bp, synthetic construct
  misc_feature 1..687: note = Description of Artificial Sequence: Synthetic coding sequence
  source 1..687: mol_type = other DNA
tgaccccagggcttccccgagctgaagaacgacaccttcctgcgggctgcatggggcgaggaaacggactataccccggtgtggtgcatgcggcaggctgggcggtacctcccggagttccgggagacaagagcagctcaggacttcttctcaacgtgccggagcccggaagcatgctgtgaacttaccttgcagcctctaagaagatttcccctcgacgcagccatcatattttccgacatcctggtggttccccaagctctgggtatggaggtgaccatggtccccggaaaagggccctcttttccagagccgttgagagaggagcaggatctcgagcggctcagggaccccgaggttgtggccagcgaactgggctacgtctttcaggccataaccctgactcgacagcggttagccggtcgggtgcccttgatcggctttgctggcgcacctgcactgcagctttttgagtctcacgccggtcacttaggcccccagttatttaataaattcgctctgccatacattagagatgtcgcaaagcaggtgaaagcgcgccttagggaagctgggttggctcccgtacccatgattatcttcgcgaaggacggccatttcgcactggaggaactcgcgcaggccggctatgaggtggtcggcctcgattggactgtggccccatag

SEQ ID NO: 211001 - DNA, 582 bp, synthetic construct
  misc_feature 1..582: note = Description of Artificial Sequence: Synthetic coding sequence
  source 1..582: mol_type = other DNA
atggaggccaacggcctgggcccccagggcttccccgagctgaagaacgacaccttccttagggctgcatggggtgaggaaaccgactacacgcctgtttggtgcatgaggcaagcaggcaggtacctgcctgagtttagggagacccgggctgcccaggattttttttctacatgcagatcgcctgaagcctgctgtgagctgacgcttcaggctctaggaatggaggtaaccatggtgcctggcaagggccctagcttcccagaacccttgagggaggaacaagaccttgagcggctgcgggaccctgaggttgtggccagtgaactgggctacgtctttcaggccattaccttaacaaggcagcggctagccggaagggtacccttgataggatttgccggcgctccgtggacactcatgacgtacatggtggaaggtggagggtcatctactatggctcaggccaaaaggtggctgtatcagagaccacaagctagtcaccagctcttgaggatactgaccgacgccctggtgccatatcttgtggggcaggtggtggctggtgctcaagccctttag

SEQ ID NO: 211002 - DNA, 402 bp, synthetic construct
  misc_feature 1..402: note = Description of Artificial Sequence: Synthetic coding sequence
  source 1..402: mol_type = other DNA
atgaaggtgctgctgctgaaggacgccaaggaggacgactgcggccaggacccctacataagagagctcgggctgtatggattagaggcaacccttatccctgtactgagttttgaattcctctccctgccttctttctccgaaaaactgagccatcccgaggactacgggggcctgatcttcacgtctccacgggccgtggaggctgccgaactctgtttagagcagaacaacaagaccgaagtgtgggaacgttccctgaaagagaaatggaacgccaaaagtgtctatgtcgtcggcaacgcgacagcatcccttgtgagcaagattgggctggatactgaaggcgaaacctgtgggaatgccgaaaagctggctgaatacatttgtagctccaagtag

SEQ ID NO: 211003 - DNA, 420 bp, synthetic construct
  misc_feature 1..420: note = Description of Artificial Sequence: Synthetic coding sequence
  source 1..420: mol_type = other DNA
atgaaggtgctgctgctgaaggacgccaaggaggacgactgcggccaggatccttacataagagagctgggattgtacgggctggaggccacgttaatccccgtgctgtcatttgagtttctcagtcttccttcattttctgagaaactctcgcatccagaggattatggtggactcatcttcacctctccgcgtgcagtcgaagcagctgagttgtgcttggaacagaataacaagacggaagtgtgggaacggagccttaaagaaaaatggaatgcaaaatccgtctacgtagtaggcaacgcgacagcttctctcgtgtccaagatagggctggatacagaaggagagacctgcggaaacgcagagaaactggcagagtatatctgttcatccgaagaggtgaagggcatcttttag

SEQ ID NO: 211004 - DNA, 798 bp, synthetic construct
  misc_feature 1..798: note = Description of Artificial Sequence: Synthetic coding sequence
  source 1..798: mol_type = other DNA
atgaaggtgctgctgctgaaggacgccaaggaggacgactgcggccaagacccctatattcgggagttaggcttgtatggcctcgaggctactttgattcctgtattgagctttgaatttttatctttgccaagttttagcgaaaagctgtcgcatcccgaggattacggaggtcttattttcacctcgcctagggccgtcgaagcagccgagctgtgtctagagcaaaataacaagacagaggtttgggaacgctcattgaaagagaaatggaatgcaaaaagcgtatacgtggtgggcaacgccacagccagcctcgtctccaagatcggactggatactgaaggtgagacctgcggaaatgctgagaagttagccgaatacatatgcagtcgcgagtcgtccgctttgcccttattattcccgtgtgggaacctcaaacgagagattctgcccaaggcactcaaagataaaggcatcgctatggagtctatcacggtgtaccagaccgtggcccacccaggtatccagggaaatctgaattcctactattcccagcagggagtgccagctagtatcaccttcttttccccgtccggcctaacctattctctcaaacacattcaggagcttagcggggataatattgaccagataaagtttgcagcaattggtcccacaactgctcgggctctggctgcccagggccttccggtcagttgtaccgcggagtcgcctaccccacaagctttggccaccggcattcggaaggccttacaacctcacggctgctgctag

SEQ ID NO: 211005 - DNA, 798 bp, synthetic construct
  misc_feature 1..798: note = Description of Artificial Sequence: Synthetic coding sequence
  source 1..798: mol_type = other DNA
atgaaggtgctgctgctgaaggacgccaaggaggacgactgcggccaggacccttatattcgagagctgggcctgtatggactcgaggcaacactgatcccagttctgtcatttgagttcctgtcactgccttccttttccgagaaactttctcaccctgaggattacgggggtctgatttttacatccccccgggcagtggaggcagccgagctgtgtctggagcaaaacaacaagacggaggtgtgggagaggtcccttaaggagaaatggaacgcgaagagcgtgtacgttgtgggtaacgctactgcaagtttagtatctaaaatcggtctggacaccgaaggagaaacctgcggcaatgctgagaagcttgcggagtacatctgcagtcgggagagtagtgcactgccactcctattcccctgtggcaacctgaaaagagagatcctgcccaaagccttgaaggataaaggaatcgctatggagagcataacagtgtaccagaccgtggcgcacccgggaatccaggggaacctgaactcctactactcccagcaaggagtgccagccagcattaccttcttctctccttccggtttaacatactcactgaagcatatacaggagcttagtggcgacaatatcgaccagatcaagtttgccgcgataggaccaaccacagctcgggccctggccgctcaaggcttgcccgtgagttgtacagcggagtccccaacaccgcaggcgcttgctaccgggattcggaaagccctccagccacacgggtgttgttag

SEQ ID NO: 211006 - DNA, 558 bp, synthetic construct
  misc_feature 1..558: note = Description of Artificial Sequence: Synthetic coding sequence
  source 1..558: mol_type = other DNA
atgaaggtgctgctgctgaaggacgccaaggaggacgactgcggccaagatccctacattcgtcttagccaccccgaggactatggggggctgattttcacttctcctagagcagtggaagcagctgaactgtgtcttgagcagaataacaagactgaggtgtgggaaagaagcctgaaagagaaatggaacgccaaatccgtgtacgtcgtgggtaatgctaccgccagcctggtcagtaaaattgggttggacaccgagggcgagacttgcggaaacgctgaaaaacttgccgagtatatttgctcccgcgaatcaagcgccctcccactcctatttccttgtggcaaccttaagcgtgagatacttccgaaggcattaaaagataaggggatcgcaatggaatccatcaccgtgtaccagaccgtggctcaccctggaatacagggcaacctgaactcttactatagccagcagggagtccctgccagtatcacattcttttcgccctccggcctaacatactctttaaagcatatccaagagctgtctgggtag

SEQ ID NO: 211007 - DNA, 2700 bp, synthetic construct
  misc_feature 1..2700: note = Description of Artificial Sequence: Synthetic coding sequence
  source 1..2700: mol_type = other DNA
atggaccggaaggtggcccgggagttccggcacaaggtggacttcttaattgaaaacgatgctgagaaagactatctatacgatgtccttcgcatgtaccatcagaccatggatgtggccgtgctagtaggagatctgaaacttgttatcaatgaaccgtcacgactcccactatttgacgcaataagaccactcatacccctgaaacatcaggtcgagtacgaccagctgacaccaaggcggagccggaaattaaaggaggtaaggcttgatcggttgcatcctgaaggtctggggctgtccgtcagaggaggcctggagttcggttgcggcctgttcatctcacaccttatcaaaggggggcaagcagactcagttgggttgcaagtaggggatgaaattgtgcggatcaacggctattccattagctcctgcacacacgaggaggtgatcaatctgatacgcacgaagaagacagtcagtatcaaggtccggcacattggactgatccccgtgaagtccagccccgacgagccattaacatggcaatacgttgaccagttcgtttccgagagcggcggcgtacgcggatccctggggagccccggcaacagggaaaataaggagaaaaaggtctttattagcctggtcgggagcaggggcctgggctgtagcatcagttctggccccattcagaagccaggtatttttatctcccatgtgaagcccggctcacttagcgcagaagtgggactggaaatcggagaccaaatcgtggaggtaaacggagtagatttctctaacctggaccataaggaggctgtgaatgtgctcaagtcttcccgcagtctgacaatttctatcgtggcagccgccgggagagagttatttatgacagatcgagagcggcttgcagaggccaggcagagggagctgcaacggcaagaattgctgatgcaaaagcggttggccatggagagtaacaaaattctacaggaacagcaagagatggaaagacagcgcaggaaggagattgcccaaaaggctgctgaggaaaatgagagatatcggaaggagatggagcagattgtggaggaggaagaaaagttcaagaaacagtgggaagaagactggggtagcaaagaacagcttttactgccaaagaccataaccgctgaggtgcatccggttccacttcggaaacccaaaagctttggatggttctaccggtacgacgggaagtttcctaccataagaaaaaagggcaaagacaagaagaaggctaagtacggttccctccaagatcttcgtaaaaacaagaaagagcttgagttcgagcagaagctctataaagaaaaagaagagatgctcgagaaagagaaacagctgaagatcaacagactggcccaggaggtgtccgaaactgaacgagaagatctggaggagtccgaaaagattcaatactgggtagagagactttgtcagacgaggcttgaacagatttcatccgcggacaatgaaatttctgaaatgacaaccgggcccccgcccccgccgccttctgtcagccccctggctccacctctgaggcgatttgccggtggactgcacttacacactaccgacctcgatgacattccgctggatatgttttactacccccctaaaacccccagcgccctccccgtgatgccccaccctccacccagtaatccccctcataaggttcccgctccacctgtgctgcctcttagcgggcacgtgagcgcttccagctctccatgggtccagaggactcccccgccaattcctattccaccccccccctctgtcccgactcaggatcttactcccacaagaccactgccttctgctctagaagaagccctgtccaaccatccgttccgaacgggagatactggtaaccctgtcgaggactgggaggctaagaaccatagcggtaagcctaccaactctcccgttcctgagcaatctttcccacccacccccaaaaccttctgcccgtcgcctcagcccccgcgaggcccgggagtgtccacaatcagcaaaccagtaatggtgcaccaagaacctaactttatctaccggcccgccgtaaaatctgaggtgcttccacaggaaatgttgaagcgcatggtggtttatcagaccgcatttaggcaagacttccggaaatatgaggagggcttcgacccttatagcatgttcactccagaacagataatgggaaaagatgtgcgtctgctccgaataaagaaagaagggagtctagacctggctttagaaggaggagtggacagtccaatcggaaaggtcgtcgtgtcagcagtgtacgagaggggcgcagcggagcggcacgggggtatcgttaagggggatgaaatcatggccattaacgggaagattgtgactgattacacactggctgaagcggaagctgccttacaaaaggcttggaatcaaggtggtgactggatcgacttagtcgtagccgtgtgtcctcctaaagagtatgacgatgagcttgcttccctgccaagtagcgtggctgagagtccccagcctgtccgaaaactgctagaggacagggccgccgtccaccgacacggttttctgcttcaactcgagcctaccgatctcttgttaaagtcgaaacggggaaaccaaattcacagatag

SEQ ID NO: 211008 - DNA, 1659 bp, synthetic construct
  misc_feature 1..1659: note = Description of Artificial Sequence: Synthetic coding sequence
  source 1..1659: mol_type = other DNA
atggaccggaaggtggcccgggagttccggcacaaggtggacttcctcatcgagaatgacgcagagaaggactacttgtatgatgttttgcgaatgtaccaccagacaatggacgtggcggtgttggtcggagacctcaaattggtgataaacgagccttctaggctgccattgttcgatgcaatccggcccctcatccccctaaagcaccaggtcgaatacgatcaattaacacctcgaaggtctcggaagttgaaggaggtgcggctggaccgtctgcatcctgaagggctgggtctgtctgtccggggaggcctggagttcggttgtggcctgtttatttcacacctgatcaagggtgggcaagctgactctgtggggctgcaggtgggggatgagatcgtgcgaatcaacggttattcaataagtagttgtacccatgaggaggtgatcaacctaattaggactaaaaaaaccgtgagtatcaaggtcagacacattggtttgatccccgtgaaaagctcgccagatgagcccctgacatggcagtacgtggatcaattcgtttcggaatccggcggggtacggggttccctgggaagccccggcaatagggagaataaggagaagaaagtattcataagtctagtggggtcccgcggcttgggatgcagtattagttcaggaccaattcagaagccaggcatatttattagtcacgtcaaaccggggagtctgtcagccgaagtcggactggagatcggggaccaaatcgtcgaggtcaatggcgtcgactttagcaacctcgaccataaggaagctgtgaacgtgctaaaaagcagccggtctctaacaatctcgatcgtggctgcagccgggagagagctgttcatgactgatcgggaaagacttgccgaggctcggcagcgagaacttcagcgccaggagctgctcatgcagaagaggctcgcaatggaatcgaataagatactccaggagcagcaggagatggagaggcagcggcgtaaggagatcgcgcagaaagccgcagaagagaatgaacgttatcgaaaggaaatggaacaaatagtggaggaagaggagaagtttaaaaaacagtgggaggaggattgggggtcgaaagagcagttgttactacccaaaacaattaccgcagaagtgcaccccgtccccctgcgcaagccgaagtacgatcagggcgtggaacctgagctcgagccagcggacgacctggacggtggaaccgaggagcaaggggagcaggactttcgcaaatacgaggaaggttttgacccatactctatgtttactccggaacaaatcatgggcaaggacgtacgcctcctgagaatcaaaaaagaaggttctttggatcttgctctggaggggggggtggatagtcccattgggaaggttgtagtgtccgcggtttacgaacgcggagctgccgagcggcacggtgggatcgtcaaaggcgacgaaattatggccatcaatggaaaaatcgtcaccgattacaccttggcagaggcggaagccgccctccagaaggcgtggaatcaaggaggagattggatcgacctggtcgtagccgtgtgccctccaaaagagtatgacgacgagttgacctttttctag

SEQ ID NO: 211009 - DNA, 1602 bp, synthetic construct
  misc_feature 1..1602: note = Description of Artificial Sequence: Synthetic coding sequence
  source 1..1602: mol_type = other DNA
atggaccggaaggtggcccgggagttccggcacaaggtggacttcctcatcgagaatgacgccgaaaaagattacctgtacgacgtgctgcgaatgtatcatcagacaatggatgtcgccgtattggtcggcgacctcaagctggtcattaacgagcccagtagactgccattgtttgacgctatcaggcctctcattcctctgaagcaccaggtcgaatatgaccaattaacgcccaggaggagccggaaattaaaagaggttagactcgaccgacttcacccggaagggttgggcctgtctgtccgaggggggctggagttcggctgcgggctgttcatctcccatctgatcaaaggcggacaagccgatagtgtggggctgcaagtgggtgacgaaatcgtccgtataaacggatatagtatctcttcctgcactcacgaagaggttattaacctgatacggactaaaaaaaccgtcagtatcaaagtgagacatataggccttatcccagtgaaaagttcaccggatgagcctctgacttggcagtatgtagatcagtttgtctctgaaagtggcggcgttaggggcagtctgggatccccgggcaacagggagaacaaagagaagaaggttttcataagccttgttggaagtcgggggttgggatgttcgatttcttccggccctattcagaagcccggcattttcatctcacatgttaagcctggaagtctgagcgcggaggtggggctggaaattggggaccaaatcgtagaagtgaatggagtagattttagcaatctggatcacaaagagggacgagagctatttatgaccgatagagaacgcctggccgaggctcgacagcgcgagctgcagagacaggaactgctaatgcaaaagagactagccatggagtcgaacaaaatcctccaggagcagcaagaaatggagagacagaggcgcaaggaaattgcccagaaggctgcagaagaaaacgaaagataccgcaaggagatggagcagatagtggaagaggaagagaaattcaagaagcagtgggaggaggattgggggtccaaggagcaattgctgctacccaagacaataaccgctgaggtacacccagttccactgcggaaaccaaagtacgatcaaggagtggaacccgagctagaacccgctgatgacctggatggtggtacagaagaacagggtgagcaagatttcagaaagtatgaggagggattcgacccttatagcatgttcacacccgagcagattatgggcaaagatgtgcggctactgaggataaagaaggagggtagcttggatcttgccttggaaggcggtgtcgacagccctattggcaaggttgttgtgagtgctgtatacgaaaggggtgccgctgagcggcatggaggcattgtcaaaggcgatgaaatcatggccatcaacggaaaaatcgtcacagactacacgctggccgaagcagaggctgcgctacagaaggcctggaatcagggaggggattggatcgatctggtggtggctgtgtgcccccccaaggagtatgatgatgaactgacctttttttag

SEQ ID NO: 211010 - DNA, 1566 bp, synthetic construct
  misc_feature 1..1566: note = Description of Artificial Sequence: Synthetic coding sequence
  source 1..1566: mol_type = other DNA
atgtaccaccagaccatggacgtggccgtgctggtgggcgacctgaagctcgtgatcaatgagccctcacggcttcctctgtttgacgcgatccgtccattgatccccctaaagcatcaagttgaatatgatcagctgacgcctaggcggtcacgcaaattaaaagaggttcggctagaccgcttacaccccgaagggctcggactgtctgtaagaggtggattagagttcgggtgtgggctcttcattagccatctgataaaaggcggtcaggctgattccgtaggcctgcaagttggtgacgaaattgtgcgcataaacggatactccatttcctcctgcacccacgaggaagtaatcaacctgattcggacgaaaaagaccgtgagcattaaagtgcggcatattggactgatccctgttaaatcctctcctgatgagcctctcacttggcaatacgtggatcagtttgtctcagagtctggcggggtcagaggctccttgggatctccaggcaacagagaaaataaggaaaaaaaagtgttcatctcactggtgggcagcagggggctgggttgctccatctcatccggaccgatccagaagcctggtattttcatttctcacgtgaaaccaggcagcctatctgccgaggtaggcctcgaaataggagaccaaatcgtggaagtcaacggcgtagatttttcgaacctggatcacaaagaagcggtgaacgtgctcaagagcagccgatcgctgaccatcagtatcgtggcggccgcggggcgcgagttattcatgacagatcgagaaagactggccgaggctaggcaacgcgaattgcaaagacaagaattgctgatgcagaagcggctggccatggagagtaacaaaattctgcaggagcagcaggagatggagaggcagcggcgcaaagaaattgctcagaaggccgcagaagagaatgaacgttatcgtaaggagatggaacagattgttgaagaggaggaaaaatttaagaaacagtgggaggaagattggggaagcaaagaacagcttctgctaccaaaaactattaccgcagaagtacacccagtgcccctgaggaagcctaagtatgatcagggggttgaacccgagttagagcctgcagacgacttagacggtggaaccgaagagcagggtgagcaagactttagaaaatacgaagagggtttcgacccatactcaatgttcacacctgaacaaattatgggaaaggatgtaagactgctaaggattaaaaaagaaggcagcctcgacctggccctggagggcggggtagactctcccatcggaaaggtggtcgtgagcgctgtgtacgaaagaggggcagctgagaggcatggtgggatagtaaagggcgacgaaatcatggccattaacggtaagatcgtcacagactacaccctagccgaagccgaagccgccctgcagaaggcctggaatcagggcggagactggattgatctagttgtggccgtctgccctccaaaggagtacgatgacgagttgacctttttctag

SEQ ID NO: 211011 - DNA, 2112 bp, synthetic construct
  misc_feature 1..2112: note = Description of Artificial Sequence: Synthetic coding sequence
  source 1..2112: mol_type = other DNA
atgagcgcccgggccacccggccccggagccggcggggccggcacgcccctcccggagaacttgatcccgtggctgaatctagcgaggaggtcgaggcagcctccggctcgagtaaaccatctttcgcgcctccacctgtgagcagtggactggaacagttgggtccaatggaggaagtcagtgggcaaggtctcggatcacgtactgacaaaaaaatggacggagggtcaggccgtgaacttgccagtgcacctgaggtgccacacaaaccagccgtggaggcgcaccaagcgcctgaggccgcccttcagtacaaggaaacagtgcccccaggcaatggggcacccgatgtgtttcagactctgcagcatacgctgtcatcccttgaagctgcagctgcagcctggcgtcatcagccacctagccactccggacccatggaattcgaaggaacctccgaggggggggctgggtcgctcggcaagcaggaaggagctggcagctgccagagggaagcagcacggctggcagagcggaatgcttggctgcgcctcgccttgtcctccagggaggacgagcttgtccgaacccaggcatccttggaagcgatccgggctgaaaaggaaacacttcagaaagaagtgcaggaactgcaagattcactcctgaggctggagccatgcccccatctgtctcataaccaggccggcggatcaggttccggatctagtagttctgaggcagatcgggagccatgggaaacacaggactcgttcagcctcgcccacccattattaaggaggctgcgttcccattcgtcaactcaaattcttggtagtctgcccaatcagcccctgagccccgaaatgcacatcatggaggcgcagatggagcagctgcgaggtagcattgaaaaacttaaatgtttcaataggctactgtcagctgtgctccagggctataaggggcggtgtgagggcctgagcatgcagctcgggcagcgcgaggcagaggctaccgccctgcacctagctttgcagtactctgaacactgtgaagaagcctacagggtcctgctggcactacgggaggccgactcaggtgcgggcgacgaggctccgatgagcgacttgcaggcggccgaaaaggaagcatggagattgcttgcccaggaagaggcagctatggacgccggagcgcaacaaaatccccagccctcgccagagggatcctccgtggacaaacctactccccaagaggtggcttttcagctccgttcatatgtgcagcgactccaggaaagacgcagcctgatgaaaattctctccgagccaggccccacgctagccccaatgccaactgtgcctcgtgccgaagccatggtccaagctattctgggcacgcaagccggcccagccctgcctcgactggaaaagactcagattcagcaggacctcgtcgcagcaagggaggctctggcagatctcatgctgcgcctgcagctcgtaagaagggagaagcggggcctggagcttagggaagccgccctgcgggcactgggacccgcccatgtgctgctccttgagcagcttcgatgggagcgtgcggaactccaggcaggaggcgccaattccagtggcggacactcctcgggcggaggtagctctggggacgaggaagaatggtatcaggggctccccgccgtgcccggaggaacatccggcattgatggcggacaagtgggcagggcatgggaccccgagaaactggctcaagagctcgccgccagcctgactcgaacactggaccttcaggagcagttacagagcttaagacgggagcttgagcaggttgctcagaaggggagggccagaagatcccagtcagctgagctcaaccgggatctgtgcaaggcacactccgctctggttctggcattcaggggcgctcaccgcaagcaggaagagcaaagacgcaagctcgaacagcagatggcacttatggaggcacagcaggcggaggaggtcgccgtgctcgaagctaccgcccgtgccctgggcaagccaaggcctcccctgccccctccccaacttggagatacgttcttgtag

SEQ ID NO: 211012 - DNA, 1152 bp, synthetic construct
  misc_feature 1..1152: note = Description of Artificial Sequence: Synthetic coding sequence
  source 1..1152: mol_type = other DNA
atgagcgcccgggccacccggccccggagccggcggggccggcacgcgccgccaggagagctcgaccctgtagccgagtcctctgaggaggttgaggccgccagcggaagtagtaagccttcctttgcgccaccccctgtgtcatctggcctcgagcaactaggaccgatggaggaagtgtcaggacagggactgggtagtaggaccgacaaaaaaatggatggtggatctggacgagaactcgccagcgcccctgaagtgccgcataaaccagcagttgaagcccaccaagccccagaggcggccctgcaatataaagaaactgtccctccaggcaacggggccccagatgttttccaaactctgcaacataccttgagttcacttgaagctgctgccgcggcctggcgtcaccaaccaccttcccactcaggtcccatggaattcgaagggacgtctgaaggaggagccggttcattgggaaaacaggaaggcgctggatcatgccagcgggaggcagcccggttggcagagcggaatgcctggcttcggctagctctttcgtctcgtgaagatgagctggttaggactcaggccagccttgaggccatacgtgctgagaaggaaaccttacagaaggaggtgcaggaactgcaggattccctcctccgactggagccttgccctcatctaagtcacaatcaggctggcggctcaggctctggatccagctcctctgaagccgacagggagccctgggaaacacaggacagtttcagcctggcccatcccttgctgcgtcggttgcgctcccatagttctactcagatcctggggagcctgccaaaccagccgctgtctcccgagatgcatataatggaggcacagatggaacagcttaggggaagcatcgagaaacttaagtgttttaaccgtctgctgtccgcagtcttacagggttataaaggaagatgcgaaggcctgtcaatgcaactcggtcagagggaagctgaagctacagccctgcacctcgcacttcagtatagggtcttactgtgccacccgggctggagtgctgtcgtgcctagttggcttactgctacaagcgcatcccctgtgcaggttattcttcttccacagccaccagagtag

SEQ ID NO: 211013 - DNA, 1920 bp, synthetic construct
  misc_feature 1..1920: note = Description of Artificial Sequence: Synthetic coding sequence
  source 1..1920: mol_type = other DNA
atgctgcaccccaccgacaagaagatggacggcggcagcggccgggaattagcctcagctcctgaagtgcctcacaaacccgccgtggaggcccaccaagctccggaggctgcgctacaatataaggaaaccgtcccgcccgggaacggcgcccctgacgtgttccaaaccttacagcacaccctgagttcactggaagccgcggccgccgcatggcggcaccaacccccaagtcatagtggtcctatggagtttgagggcacctccgaagggggggcgggcagcctgggcaagcaggaaggagccggctcatgtcaacgggaagccgcacgtctggccgagaggaacgcatggctccgattagccctatccagtagagaggatgagctggtgcggacgcaggcaagtctagaggctatcagagccgagaaagaaactttacaaaaggaagtgcaggagttacaggacagtttgctcaggttagagccctgccctcacctctcccacaaccaggccggagggagtgggtctggtagcagtagtagtgaagctgacagggaaccctgggagacacaggattcttttagtctggcccatcccctcctccggcgtttaaggtcccattcctccactcagatcctcgggagcctgcctaaccaacccttgtcacccgagatgcacattatggaagcacaaatggagcagcttcgtgggagtatagagaagttaaaatgttttaataggctgttaagcgccgttctgcaaggttataaggggcggtgcgaagggctgtcaatgcagctgggccagcgcgaggctgaggcaacagccctgcatctcgcactccagtatagcgagcattgcgaggaagcgtaccgcgtattactggcactgcgcgaagcagacagcggagccggggacgaggctcctatgtcagacctgcaggcagccgaaaaggaggcatggcgattgctggctcaggaagaagctgcaatggatgctggagctcagcagaatccgcagccctcccccgagggctcctctgttgataagccgactcctcaagaagttgcttttcagctccggtcttacgtccagagactccaagaacgaaggagcctaatgaaaatcttaagcgagcccggcccaaccctggcacctatgcctacagtgcctcgcgctgaggccatggtgcaagcaattttggggacacaggcaggtcccgcacttccccgcctggagaaaacccagatccagcaggaccttgtagcggctcgtgaggctctggccgacttaatgctgaggctgcaactggtaaggcgggagaagagaggtctggaactcagagaggctgcactgagggctctgggccccgcacacgtgctcctactagagcagctgcggtgggaaagagctgagctgcaggcaggaggcgccaatagttccggtggtcattcgtcaggaggtggatcttccggtgatgaggaagaatggtaccagggccttcccgcagtgcctggagggacaagcgggatcgatggaggccaggtcggtcgtgcttgggatcccgagaagcttgcccaggagctcgccgcttctctgaccaggactttagacctgcaggagcaactgcaatctctcagacgcgagctggaacaggtcgcccagaaaggcagggcccgtcgttcccaatctgcagaattgaatagagatctctgcaaagcccacagtgcactggttttggccttcaggggcgcccataggaaacaggaagagcaaagacgcaaactggagcagcaaatggcccttatggaggcccagcaggccgaagaggtggcagttttagaagctaccgctcgggccctcgggaaaccacgaccccccctgccaccaccacagttgggggacaccttcttgtag

SEQ ID NO: 211014 - DNA, 1386 bp, synthetic construct
  misc_feature 1..1386: note = Description of Artificial Sequence: Synthetic coding sequence
  source 1..1386: mol_type = other DNA
atgaacgaccagtaccaccgggccgcccgggacggctacctggagcttctgaaggaggcgacccgaaaggagctcaacgctccggacgaggatggtatgactccgactctctgggctgcttaccatggaaatcttgaatctctccggctgatcgtgtccaggggtggcgatcctgacaagtgtgatatctggggaaacaccccactgcaccttgccgcctctaatgggcacctgcactgcctaagttttttagtttcattcggagcaaatatatggtgcctcgacaacgattaccacacgccgctcgatatggccgcgatgaaaggacatatggaatgcgtgcgctaccttgactccattgcggcaaaacaatcctcactgaaccccaagttggtgggtaaactgaaggataaagcatttagggaggccgaacgacgcattcgcgagtgtgcgaaacttcaacgccgacaccacgaacgaatggagcgccgctaccgcagagaactcgccgagcgttccgacactctctcctttagttcattgacctcctcaactctgtcccgaagattacagcacttggccctcggcagtcacctgccatacagtcaagccactcttcatggcactgctaggggaaaaaccaaaatgcagaaaaagctcgaacgtcgtaaacaagggggggaaggcacatttaaggtaagtgaggacggtagaaagtccgccaggtccctgtcggggctgcagcttggttccgatgtcatgttcgtgcggcaggggacctatgccaaccctaaagaatggggaagagctcccctgcgcgacatgttcttaagcgacgaagattcagtctcacgcgctacgctcgcagccgagcccgcccattctgaagtcagtactgattctgggcacgactccctcttcacaaggccgggccttggcacaatggtctttcggaggaattatctgagctctgggctacatggtcttggacgcgaagacggcgggctcgatggggtcggcgctccgcgtggccggctccaaagctctccaagcctggatgacgattccctaggaagcgcaaattctctgcaggatagaagttgcggcgaggaactgccatgggatgaactggacctgggtctcgacgaggatttggaaccggaaacttctccactggagacatttcttgctagcctccacatggaagactttgcagccctcctccggcaagagaagatcgatctggaggcacttatgctgtgctctgatctggatctgcggtctatcagcgtgccactgggaccgagaaagaagattctgggtgctgtgcgccggcgtcgtcaggctatggagcgacctcctgccttagaggatacagagctttag

SEQ ID NO: 211015 - DNA, 15609 bp, synthetic construct
  misc_feature 1..15609: note = Description of Artificial Sequence: Synthetic coding sequence
  source 1..15609: mol_type = other DNA
atgaactgccccgtgctgagcctgggcagcggcttcctgttccaggtgattgaaatgctaattttcgcctatttcgcctccatatcgctgactgaatcacggggcttatttcccaggttggagaatgtcggtgcttttaagaaagtgagcattgtccctacccaggccgtttgcgggctgcctgaccgtagtaccttctgtcatagcagcgccgcagccgagtccatacagttttgcacacagcgattctgcattcaggattgcccatacaggtccagccaccccacctacaccgccttgttctctgcgggcctttcaagttgtattacaccagataaaaatgatctccatcccaacgctcacagtaactcagcctcctttattttcggtaatcataagagctgtttcagttcgcctccatctcctaagctgatggcttcttttacgctggctgtttggctgaagccggagcaacaaggagtgatgtgtgtaatcgagaaaacagtagacggccaaatagtctttaagctcaccatctcagagaaagagactatgttttactacaggacagtgaatggcctgcagcctcccatcaaagtgatgactctgggaagaatactggttaaaaaatggatccatctgtccgtgcaagtccatcagacaaaaatttcattcttcatcaacggggtggaaaaagatcataccccatttaatgcgagaaccctctctggttcgatcactgactttgcttcaggaacggtccaaattggccagtctttgaatggcctagaacagtttgtgggcaggatgcaggatttccgcctttaccaggttgccctcaccaatcgtgagattttggaggtgttctctggcgaccttcttcggctgcatgcccagtctcactgtagatgtcccggctctcatccaagggttcacccgcttgcccagaggtattgtatccccaacgacgccggagatacagccgataacagggtctctaggcttaatcccgaggctcacccgttatcctttgtaaacgacaatgatgtggggacctcatgggtttccaacgtgttcactaacattacgcagctcaatcagggagtcaccatttcagtggatttagaaaatggacagtaccaggtgttttatataatcatccaattctttagcccacagcctactgaaatccggatccaacgcaagaaagaaaatagcctggattgggaggattggcagtatttcgcccggaattgcggggcctttgggatgaaaaataacggcgacctggaaaaacctgattcagtaaactgcctgcagttatcgaacttcactccgtacagccggggcaatgtgacctttagcattttgactcccgggccaaattaccgtcctggctacaataatttttacaacacaccttctctccaagaatttgtgaaggctacacaaattagattccacttccacggccagtactatactacggagacggcagtgaacctacgccacagatactacgcagtcgatgagataacaattagcggacgttgtcagtgtcatggccacgctgataattgcgacactacgagtcagccctataggtgtctatgttctcaggagtctttcactgaaggcctgcattgcgatcggtgcctgcctctgtacaatgataaaccatttaggcagggagaccaggtatacgcatttaattgtaaaccttgccagtgcaattcccacagcaagtcatgccactacaacatcagcgttgacccatttccattcgagcatttcagaggaggagggggtgtttgcgatgattgcgaacacaatactactggcagaaattgtgagctctgtaaggactatttcttcagacaggtgggtgcagatccaagcgctatcgatgtgtgcaagccctgcgactgcgatacagtcgggaccagaaatgggtcgatcctgtgcgatcagatcggtggccagtgtaactgcaaaagacatgtgtcaggtagacaatgcaatcagtgtcagaatgggttctacaacctgcaagagctggatccagacggctgctcaccctgtaattgtaacactagcggaaccgtcgacggagatattacatgtcatcaaaacagcggacaatgtaaatgcaaggccaatgtcattggcctccggtgcgaccattgtaactttggcttcaaattcctgagatcctttaacgacgtaggctgcgaaccctgtcagtgtaaccttcacggcagtgtgaataaattctgcaacccgcactccgggcagtgcgagtgtaagaaagaggcaaaaggcctccagtgtgatacttgccgtgaaaacttctacggcctcgatgtcaccaactgtaaggcatgcgattgtgacacagccggatctctgccaggaaccgtgtgtaatgcaaagaccggccaatgcatatgcaaacctaacgtcgagggccggcagtgcaacaaatgtctcgagggaaacttctatcttagacagaataactcattcctgtgcctcccctgcaactgcgacaagactggaacaatcaatggctccttgctttgtaataaaagtaccggtcaatgcccttgcaaactgggggtcactggcctacggtgtaaccaatgcgagccacacagatataaccttacgatagacaacttccagcactgtcagatgtgtgagtgcgatagcttgggcacgttgcctgggacaatttgtgatcccatctccgggcagtgcttatgtgtcccgaaccgacagggccgtagatgtaatcagtgccagcccggcttttatatctccccaggtaatgcgacggggtgtcttccttgtagctgccacacgacgggcgcagtgaaccacatctgtaactcactgacagggcagtgcgtttgccaggacgctagcatcgccggtcaaagatgcgaccagtgcaaagatcattatttcggcttcgatcctcagacaggccgatgccagccctgtaactgccacctctccggcgctctcaatgaaacctgtcatcttgttactggtcaatgcttttgcaaacagtttgtcactggaagcaagtgcgacgcctgcgttccgagcgcgtctcaccttgacgtcaataatctgctcgggtgcagcaagactccatttcagcagccacctccaagaggccaggtacaatcctcatcagctataaacctgtcgtggagcccccctgactcccccaatgcccactggctcacttactctcttttacgggatggcttcgaaatctacactacagaggatcagtatccgtatagcatacagtacttcctggacactgacctgctcccctacacgaagtacagctactacattgaaacgaccaatgtgcatggaagcacacgaagcgtagccgtaacctacaaaactaaacccggcgtgcccgagggtaacctgaccctctcctacattattccaattggatcagattctgtgacccttacttggactaccctttcaaatcagagcggcccgatcgaaaagtacatcctcagctgcgcaccgctggctgggggccagccctgtgtctcttatgaaggccacgagactagcgccaccatctggaatctggtgcccttcgccaaatatgactttagcgtgcaggcctgcaccagcggagggtgccttcactcccttcccataacggtgaccacggcacaggcacctcctcagaggctgtctccacctaagatgcagaaaatctcctcaacagaacttcatgtggaatggtctccaccagctgaactgaatggcatcatcatccgatatgaactgtatatgaggcggctcagaagcaccaaggaaacaacatctgaggaatctcgagtatttcagtcttccggttggttgtctccgcattcttttgtcgaatccgctaacgaaaatgcccttaagccccctcaaaccatgacgacaatcaccggcttggagccctacacaaagtatgagtttcgagtgctggccgtaaatatggcaggctctgtgtcttccgcctgggttagtgaaagaaccggagaatccgcaccggtcttcatgataccaccctcagtgtttccattgtcttcttatagcttgaatatctcatgggagaaaccggccgataacgtgacccggggaaaggtggttggctacgacataaacatgctaagcgagcagagccctcagcaatctattcccatggcattttcacaacttctgcataccgccaagagtcaggaactgtcatatacagttgagggtctcaaaccttaccgaatctatgaattcaccattactttatgcaactccgtagggtgtgtgacaagtgccagcggcgcaggacagacgctggccgcagctcctgcccaactccgcccacctctagtgaaaggcattaattctactactatccacctcagatggtttccccccgaagagctgaacgggccgtctcctatttaccagctggaacgacgggaatcctcactcccagccttgatgaccacaatgatgaaggggatcaggttcataggaaacggttactgtaaattcccctcttcgacccatccagtcaatactgattttactggaataaaggcgtcttttcgcacaaaagtgcctgagggcctcatcgtctttgctgcttctcccggcaaccaggaggagtactttgcccttcaactgaagaagggccggctatattttctgtttgatccgcagggatcacctgtcgaggttactacgactaatgaccacgggaagcagtactctgacgggaaatggcatgaaattatcgccatacgccatcaggcttttggacagataactcttgacggaatctacaccggcagtagtgcaatcctgaatggcagtacagtgattggcgataacaccggagtgttcctgggtggacttccccgctcatacaccatcttgagaaaggaccctgagatcattcaaaaggggttcgtggggtgtctgaaggacgtgcacttcatgaaaaattataatccctcggccatttgggagcctttggactggcagtcaagcgaggaacagatcaatgtgtacaactcttgggaggggtgccctgcctctttgaatgaaggcgcacaatttttgggggccggctttcttgagctccatccttacatgttccacggcgggatgaatttcgagatctcttttaaatttagaaccgaccagctgaacggtctcctcctcttcgtttacaataaggatggccccgacttcctcgccatggaactaaaatcaggaatattgacctttcggctgaacacctctttggcgtttacccaagtcgatttacttctaggcctatcctactgcaacggtaaatggaacaaggtcattattaagaaggagggcagtttcattagtgcaagtgttaacggattaatgaaacatgcatctgaatcaggagaccagcctctcgtggttaatagtccagtatacgtcggtggtatcccccaggagctgctgaacagttatcagcacctgtgtctggaacagggctttgggggatgcatgaaggacgtgaagttcacgcgtggcgccgtggtgaatctcgcatccgtctcttccggggccgtccgggtcaatttggatgggtgcctctccaccgactcagctgtgaattgcagaggaaatgattcgatcctggtataccagggaaaggaacagagtgtgtatgaggggggtctccagccatttactgagtacctgtacagggtgatcgcctctcatgagggcgggagcgtgtactccgactggagccgggggagaacgaccggtgcagcacctcagtccgtgcctactccgtctcgtgtgagatcacttaacggttacagtattgaggtcacttgggatgagcccgtggtgcggggggtgatcgagaagtacattttgaaagcttattcggaagacagtacacgacctcctcggatgccgagcgcgtcggccgaattcgtgaatacctctaacctgacagggatcctcactggactcctgccttttaaaaactacgcggtcacgctgaccgcttgcaccctggcaggctgcacggaaagtagtcatgccctgaacatcagtacgccccaggaggcaccccaagaggtccagccccctgtcgcaaaatccctcccaagcagcctgctactgtcatggaaccccccgaagaaggcaaatgggatcatcacccagtactgcctttacatggatgggcgactgatttattctgggtcagaggagaattatatcgtgaccgatcttgccgtgtttaccccacatcagttcctgctcagtgcttgtacacatgtgggatgcactaactcctcttgggtccttctgtacaccgcccagttgccccccgaacacgttgattcccccgtgttgacagtacttgactcacgcactatccatatccaatggaagcaacctaggaagatatccggaatactagagcgctacgtcctctatatgtccaatcacacgcatgacttcacaatttggagtgtgatttataattctacagagctttttcaggatcacatgctgcagtatgtcctacctggaaataaatacctgattaaactgggtgcgtgtacaggcggaggctgcactgtgagcgaggcttctgaagccctgaccgatgaggacatacctgaaggggtaccggcccctaaagcccacagctacagtcctgattcgtttaacgtgtcctggacagagcccgagtaccctaatggggtgattacttcttacggcctttacttagatgggattcttatacataactcatccgagctcagctaccgtgcctacggctttgcaccttggtcgttacacagttttcgtgtccaagcatgtactgctaaaggttgcgccctcggcccattagttgagaataggacgctggaagcaccccccgaaggaaccgtgaatgtcttcgtaaaaactcaaggatcccgcaaagctcatgttcgctgggaggcacctttccggcccaacggcctgctcacccactccgttctgttcactgggatcttttacgtagatcctgtcggcaataattacacacttttgaatgtcactaaagtaatgtattcaggcgaggagacaaacttgtgggtgttaatcgatggattggttcccttcacgaactataccgttcaggtgaacattagtaattcacagggctccttgataacggatcccatcacaattgccatgcccccaggggcacctgatggtgtgctaccgcctcggctctccagtgccactcctacctcactgcaggttgtgtggtcgacacccgctcgtaataatgctcctggaagtccaaggtaccagcttcaaatgcgatctggcgattcaacccacggcttcctcgaactcttctccaacccatcagcaagcctgagttacgaagtgtcagatcttcagccctacaccgaatatatgtttcgtcttgtcgcttccaatgggtttgggagcgcccactcatcatggattccatttatgactgccgaggataaacccggacccgtagtgcctcccattctgttagatgttaagtcacgcatgatgctcgtaacctggcagcaccctcggaagtctaatggggtgatcacccactacaatatttatctccatggaaggctgtacctgcgcacaccaggtaatgtgaccaattgtactgttatgcatctgcacccttataccgcctacaaattccaggttgaggcttgcacctctaagggttgcagcctgtcccctgaaagccaaactgtgtggacactgccaggggcacctgagggcataccaagccctgagttgttcagcgacactcccacctcagtgataatctcatggcagccgcccacccatcctaacggtctggtggagaactttaccattgagcgccgggtgaagggaaaagaagaagtcactactttggttacattgccccgctcccacagcatgcggtttatcgataagacctcagctctttctccctggacaaaatacgagtatcgcgtgctgatgtcaactctacatggcggaaccaactcttctgcttgggttgaagtgaccaccaggccttcgagacccgccggggtgcagccccctgtggtaacagttctggaacccgatgctgtccaggtgacatggaaaccccccctgattcagaacggggatattctgtcctatgaaattcacatgcctgatccacatatcacactaaccaacgttacctcagctgtgctttcccaaaaagttactcacttaataccctttaccaactactctgttacgattgtcgcctgcagcgggggcaacggctatctgggaggatgtacggagagtctgcccacctatgtgactactcaccctactgtacctcaaaatgttgggccactgtctgttatccccctcagtgagtcctacgtagtgatcagctggcagccgcctagcaagccgaacgggccaaacctgagatatgagctgctgcggagaaagatccagcagcccttggctagcaaccctccggaggacttgaatcggtggcataatatctactcaggaactcaatggctctatgaagacaaaggactctctagattcaccacctacgagtacatgttgttcgtccataatagtgtgggtttcacaccaagccgggaagtgaccgtaacaactttagcggggctgcccgagcggggagctaacctgactgccagcgtcctgaaccacaccgccatcgacgtgaggtgggccaaacctacagtgcaggacctacagggggaggtggagtactatactctcttctggtcctccgccacaagcaatgacagcctcaaaattttgcccgatgtaaacagccatgttatagggcacctcaagcccaataccgagtactggatttttattagcgtctttaatggagtgcatagtataaatagtgccggcctccacgccaccacctgtgacggagaacctcaggggatgcttccacccgaagtggtaatcatcaactcgaccgcagtgcgggtcatttggacgtccccctccaatccaaacggggtggtcacagaatactccatctacgtaaataataaactgtacaaaactggcatgaacgtcccagggagctttattctgcgagatctctcccccttcaccatctatgatatccaagtggaagtatgtactatttatgcctgcgtgaagtccaatggtacacaaattactactgtggaagatactccatcagacatacctacgccaactatcagaggaatcaccagcaggtctcttcagatcgattgggtgagcccccggaagcccaatggtatcattttaggatacgaccttctatggaaaacatggtacccgtgtgcaaagacccaaaaacttgtacaagaccagagtgacgaactgtgtaaagctgttcggtgtcagaagccagagtcaatctgtggccatatatgctacagctctgaggctaaggtctgctgcaatggtgtcctgtacaacccaaagcctggccaccggtgttgcgaagaaaagtatattccatttgtactgaactccaccggggtttgctgtggtggcaggatccaggaggcacaacctaaccaccagtgctgttcaggctactacgctcggatcctaccgggggaggtctgctgcccagatgagcaacacaatcgtgtctctgttggcatcggggacagctgttgcgggcgaatgccctacagtacgtccggcaatcagatctgctgcgcaggacgtctgcacgacggccacggtcagaagtgctgcggaaggcagattgtgtcaaatgatttagagtgttgcggcggagaagaaggagtggtgtataaccgactccccggcatgttttgttgtggccaggactacgtcaatatgtcagatacgatatgttgttccgccagttcaggggaaagcaaagcccatattaagaaaaacgacccagtgcctgtgaaatgctgcgagacagagcttatcccgaaatctcagaagtgctgcaacggcgtgggatacaatccactcaagtatgtgtgttccgacaaaattagcacagggatgatgatgaaggagacaaaggagtgccggatcctgtgtcccgcctcaatggaggccacggagcattgcggacgctgtgacttcaacttcacaagtcacatctgcacggttatacgcggttcccataattccacaggcaaagcctccattgaagagatgtgttcaagcgcggaagagaccatccacactggcagtgtgaatacgtattcttacacggatgttaacctcaaaccctacatgacgtacgagtataggatctccgcctggaactcttatggccgcggattatctaaggctgtgcgggctaggacaaaggaagacgtgccccagggggtgtcgcctccaacttggaccaagattgacaatctggaggacaccatagttctgaactggcgtaagcctatccaaagcaatgggcccataatttattacattctcttgagaaacggtatagagcggttccggggcacctctttatctttctcggataaggaaggcatccagccttttcaagagtacagctaccagctgaaggcttgcacggtggccggatgcgcaaccagcagcaaggttgtggccgcaaccactcagggtgtgccagagtctattctaccaccttccatcacagccttgtccgcggtggcccttcacctgtcttggagcgtccccgagaaaagtaacggcgtaatcaaggaataccaaattcgccaggtgggtaaagggctgattcatacagatacaaccgaccgtcgccagcataccgtcaccggcctgcagccctacaccaactattcctttaccctgactgcctgcacatcagcaggttgcaccagctcagagccctttctgggacagactctccaggctgcacctgagggcgtgtgggttaccccccgccacattataattaactctacaacagtggagctttattggtcactcccagagaaacccaatgggctggtgagccagtaccagctgtcacgtaacggcaatcttctgttcctcgggggtagcgaagaacagaatttcacagacaagaaccttgagcccaacagccgatacacgtataagctcgaagtgaagaccggggggggttcctccgcaagtgatgattatatcgtacagactcccatgtcaacacctgaagagatctaccccccttacaacattaccgttataggtccttattcaatttttgtagcctggatcccacccgggatcctgatcccagaaatcccagtggagtacaatgtgctattaaatgacggatctgtaactcctctcgcctttagtgttggccaccatcagtccactcttttagagaacctgaccccattcactcagtatgagatcaggattcaggcatgccagaacgggagctgcggggtctcttccagaatgtttgtgaagacacccgaagccgcacccatggacctgaattcaccagtgctcaaggcattaggctccgcttgcatagagattaaatggatgcctcctgagaagcctaacggcatcatcatcaactacttcatctacaggagacctgcaggcatcgaggaggaatcggtgctgttcgtgtggtccgagggggcactggaattcatggacgagggcgatacgctgcgccccttcactctttacgaatacagagtccgcgcatgcaattcgaagggcagcgtcgaatcactgtggagcctgacgcagaccctggaagcacctcctcaagatttcccagctccctgggcccaagccacttcagcccacagcgtcttactcaactggaccaaacccgagtctcctaatggaatcatctcgcattatagggtggtgtaccaggaaaggccagatgaccccactttcaatagccccaccgtgcacgcatttactgtgaaagggacgtctcaccaagcccacctgtacggccttgagcccttcaccacatacaggatcggagtggtggctgccaatcacgcgggcgagatcctgtcaccatggacactaattcaaactttagaatcctctccttccggcctgcggaatttcatagtggagcagaaagaaaatggacgcgccctgctcctgcagtggagtgagcctatgagaacaaacggagttatcaaaacatataatatctttagcgacggcttcctggaatattccggtctgaatcgccagtttcttttcaggcgactggatccgtttaccctatatacactgaccttggaagcctgcaccagggccgggtgtgctcattcggcccctcagccactttggactgacgaagccccgcctgactcccaactggctcctacagtacattctgtgaaatccacctccgtggagttgagctggtccgagccagttaaccctaatgggaagatcattagatatgaagtgatcagaaggtgtttcgagggtaaagcctggggaaaccagactatccaggccgatgaaaaaattgttttcaccgagtataatacggagaggaacacatttatgtacaacgataccggtctacagccttggacgcagtgtgagtataaaatatatacttggaactctgcggggcatacctgttcatcatggaatgtggtgaggacccttcaggccccccccgaggggctttcgccaccagtgatcagttatgtgtccatgaatcctcagaagctgcttatttcttggatcccaccagagcagtccaacggaatcatacaatcttaccgtttgcagcggaatgagatgctgtatccattctcctttgaccctgtcacatttaactacaccgatgaggagcttctccccttctccacctactcttatgccctacaagcgtgtacgagcggaggctgtagcacctccaagcccacatcaattaccaccttagaagctgcgcccagcgaagtctcaccgcccgacctgtgggccgtgtccgccacccagatgaacgtgtgctggtcccctcccactgttcaaaatggaaagatcactaaatatctagttcgctatgacaacaaggaaagcctggctggccagggattgtgcttactcgtgtcccatctgcagccttattcacaatataatttttctttagtggcctgcaccaatgggggctgcacagctagcgtcagtaagtccgcatggacgatggaagctctccccgaaaacatggatagtcctaccctacaggtgacaggatccgaatccatagaaattacatggaaaccaccgagaaaccctaacggacaaatacgctcctacgaacttcggcgcgatggcacgatcgtgtatactggactggaaacccggtatcgggatttcacacttacaccaggggtggaatattcttatacagtaacagcttcgaactcccaagggggaattttgagtccactggtaaaagacagaacctcacctagcgccccatccggcatggaacccccgaaattacaagcccgtggaccacaggagattctagtgaactgggacccaccagtgaggactaatggggacatcattaattacacgctgttcattcgggaactgttcgagagggagactaaaattatccacattaacaccacccataactcattcggtatgcagagttacatcgtgaaccagctgaagccgtttcaccgatacgagattcggatccaggcctgtacaacactgggttgcgcctcttcagactggacgtttattcaaactcctgaaattgctcccttaatgcagcccccaccgcacctggaagttcagatggcccccgggggcttccagcctaccgtgtctctcttatggacaggtcctctgcagcctaatggcaaagtcctctactatgaattatatcgtcgacagattgccacacagcctcggaaatctaaccctgtcttaatttacaatggatcctctacaagcttcatcgacagcgagctattgccgttcacggaatatgaatatcaagtgtgggcggtcaacagcgctggtaaagccccatcatcctggacctggtgtcgcacaggacctgcccccccggaggggctgcgggccccaacattccacgtgattagctcaactcaggcagtggtcaacatatcagcgcctggcaagccaaacggtatcgtgagcctatatcgtctgtttagctcctctgcgcacggtgccgagaccgtcctatcggaaggcatggccactcagcagaccttacacggcctgcaggccttcactaattatagcattggcgtagaagcctgtacttgcttcaactgttgttctaaggggcctactgctgaactgagaacccaccccgcaccaccaagtgggctgtcctccccacaaataggcacgcttgctagcaggaccgcgagcttccgatggtcccccccgatgttccctaatggcgtgatacatagctatgagctgcaattccatgtcgcctgcccccctgattcagcactcccttgcaccccttcacaaattgagacgaagtacacagggctgggtcagaaggcctccctaggtgggcttcaaccttatactacatataaactacgggttgtggcccacaatgaggtgggatccaccgctagcgagtggataagtttcacgacccagaaggaactgccacagtaccgcgctccattctccgtggatagcaatctctccgttgtatgtgtgaactggtccgacacatttttactgaacggccagttaaaggagtacgttcttacagacggcggacgaagggtttattcaggcctggatactaccctctatattccccgaacggctgacaaaaccttcttcttccaggtaatatgtacaacagacgagggcagtgtaaagactcctctcatacagtacgacacatcaactggccttgggttagtgttaactacgcccgggaaaaaaaagggatcacgaagcaagtcaacagaattctatagcgaactatggtttatcgtgttgatggctatgctaggcctcattcttctcgcaatcttcctgtccctgatccttcagcgaaagatccacaaggagccatacatccgggagcgaccaccactggtccctctgcagaagcggatgtcaccacttaacgtctaccctcccggcgaaaatcacatgggacttgctgacaccaaaatccccaggtctggaacccctgtgtctatcaggtctaaccgatccgcttgcgtgctgcgaatcccatcgcaaaatcagacctctctgacatattcacagggcagtctgcatagatccgtcagccagctcatggatattcaagataagaaggtgctaatggacaacagcttatgggaagccataatgggccataattccggtctgtacgtcgacgaagaggatctcatgaacgcaattaaagacttttcgagcgtaaccaaggaacgtaccaccttcacagatacccacctgtag

SEQ ID NO: 211016 - DNA, 4641 bp, synthetic construct
  misc_feature 1..4641: note = Description of Artificial Sequence: Synthetic coding sequence
  source 1..4641: mol_type = other DNA
atgaactgccccgtgctgagcctgggcagcggcttcctgttccaggtgatagaaatgttaatattcgcctatttcgcttctattagccttacagaaagtaggggtttgttccccaggctggagaacgtcggagcctttaagaaagttagcattgtgccaacacaggctgtttgcgggctccctgataggtcgaccttttgccacagcagcgctgccgcagaatccattcaattctgtacccaacggttctgtatccaagattgtccgtaccgaagttctcatccgacatacacagctctgtttagcgcaggacttagctcatgcatcactcccgataaaaatgatctgcaccctaatgcccattcaaactctgcaagttttatctttggcaatcacaagagctgcttctctagcccacctagcccaaaactcatggcatctttcacactcgctgtgtggctgaagcctgagcagcagggtgtgatgtgcgtcatcgagaaaacagtggacggacagatcgtgtttaaactcactatctctgaaaaggagacaatgttctactatcgcaccgtcaacgggctacaaccccctatcaaggtaatgactctggggagaatcctggttaagaagtggatccaccttagcgtgcaggtgcatcagaccaaaatctcattcttcattaatggagttgaaaaggaccacactcctttcaatgcgcggaccttatcagggagcataactgatttcgcgtccggaacggtgcagatcgggcagagcctcaacggactggaacagttcgtagggcgtatgcaagatttccggctgtaccaggtcgcattgaccaaccgggagatcctagaggtctttagcggcgacttactccgacttcacgcccagtcccattgcaggtgcccaggctcacacccccgggtgcatccattggctcagcgctactgcattcctaatgacgcaggggacaccgctgataatagggtgagtcggttgaatcctgaggcccacccgctctcctttgtgaatgataatgacgtgggtaccagttgggtatccaacgtgtttacaaacattacacaattgaaccaaggcgttacaattagcgtggatttagagaacggccaataccaggttttctatatcataattcagttcttcagtcctcaaccgacagaaattaggatccaaagaaaaaaggagaattccctggactgggaagattggcagtattttgccagaaattgtggagcattcggaatgaaaaataatggcgacctggaaaagccagattcagtcaattgtttacagcttagcaatttcacaccctactcccgaggcaatgtgactttctctattctgacgcccggccccaattacaggcccggctacaataacttctataataccccctccctccaagaatttgtaaaagccactcagattcgcttccatttccacggtcagtattatactacagagacagcggtcaatcttagacaccgctactacgcggtcgatgagatcactataagcggaagatgtcagtgtcatgggcatgctgacaattgtgacacaacatcacagccttatagatgtctatgcagccaagagagttttaccgagggactgcactgcgaccgatgcctgccgctctacaacgataaaccatttcggcagggcgatcaggtctacgcatttaattgtaaaccatgtcagtgcaattcccacagtaaatcgtgtcactataatattagtgtcgacccatttcccttcgaacatttcagaggtggtggcggggtgtgcgacgattgtgagcacaacacaacaggcagaaactgtgagctgtgcaaagactatttttttcggcaggttggcgccgacccatcagccattgacgtatgcaaaccatgcgattgtgatactgtgggcaccagaaatggatctattttgtgtgaccagatcgggggccaatgtaactgcaaacggcatgtaagcgggagacagtgcaatcagtgtcagaacggtttctacaatctccaagaactggaccctgatggttgcagtccatgtaactgcaatacctctgggactgttgatggtgacattacatgtcaccaaaattccggacagtgtaaatgcaaagcaaatgtcattggcctgagatgtgaccactgcaatttcggatttaaatttctccgctcattcaacgatgtgggctgtgagccctgtcagtgtaaccttcacggatccgtgaacaaattctgcaacccgcacagcgggcaatgtgagtgtaagaaagaagccaaaggacttcagtgcgatacgtgcagggagaatttttacggattagacgttacgaattgcaaagcctgcgattgtgacacagctggttccctccccggaacagtgtgcaatgcaaaaacgggccagtgcatttgcaagccgaatgtggagggcagacagtgcaataagtgcctcgagggaaacttttacctgaggcagaacaatagttttctatgtttaccttgtaactgtgacaaaactggaaccatcaacggctcgctgctctgtaacaagagcactggtcaatgcccctgcaagctgggagtaaccggactgcgctgcaaccaatgcgaaccacatcggtataacctgaccatagacaactttcagcattgccagatgtgcgaatgtgactccctgggtaccctgcccgggacgatttgcgatcctatcagtgggcagtgcctctgcgtgcctaaccgtcagggtagacgttgcaaccaatgtcaacccggcttctatatcagtcctggcaatgccaccggatgcctgccttgctcctgtcacaccactggcgccgtgaaccatatctgcaacagcctgaccggacagtgtgtctgccaggatgcctctattgcaggccaaaggtgcgaccaatgcaaagaccactatttcgggtttgaccctcagaccggccgttgtcaaccgtgcaactgtcacctatccggtgctttgaatgaaacctgccatctcgttactggacagtgcttctgcaaacagttcgtgacggggtctaagtgcgacgcctgcgtcccaagtgcctctcaccttgacgtcaacaaccttctcggttgttcaaagaccccttttcagcagccaccccccagagggcaggtacagtcgtccagcgctattaacctgtcctggagtcctcccgattcacctaatgcccattggctcacatacagtctgttgcgcgacggtttcgaaatctataccacggaggatcaatatccttattcaatccaatacttcctggacactgatttgcttccttataccaaatatagctactacattgagacaactaatgtgcacgggtctactaggtcagtggcagtcacgtataaaaccaaaccaggtgtgccagaaggaaacttaactctctcctatatcattcctatcggaagtgacagcgtgacacttacctggaccacactcagtaaccagtctgggcccatcgaaaagtacatactctcctgcgctccacttgccggaggacagccttgtgtgagctatgagggacacgagacatctgccacaatttggaatcttgtgccttttgcaaaatatgatttcagcgtgcaggcctgcacttcgggtggttgcctccacagcctgcctatcacagtgacgacagcgcaggcacccccacagaggctgtccccacccaaaatgcaaaagattagcagtacagagctccacgtggagtggtcaccacctgctgagctgaatggtattattatcaggtatgagctttacatgcgaaggcttagatccacaaaggagacgacatccgaggagtctcgtgtctttcagagctccggctggctcagtccacatagctttgtcgagtctgccaatgaaaacgcactgaagccgccacaaacaatgactaccattactggtctagagccttacactaaatacgaattcagggtgctggcagtgaacatggccggaagcgtgagcagcgcttgggtctctgagagaactggagagagcgctccggtgtttatgataccaccctccgtttttccactctcgtcctattccctgaatatatcctgggagaagccagccgataatgttacaaggggaaaggtagtcggttacgacattaacatgctctccgaacagtctcctcagcagagtatccccatggctttctctcaactcctccatactgcaaaatcccaagagctaagctatactgtggagggcttaaagccctatcgtatttatgagtttactatcacgttgtgcaacagcgtgggttgcgttacgtctgcatctggggcggggcaaacgctagcagccgcgcccgcgcagctgcggccccctctcgtaaagggtattaattctactaccatacacctgcggtggtttccccccgaggagctcaatgggccttcaccaatttaccagctggaaagaagggaaagctctctgccagcgttgatgaccacgatgatgaagggcattagatttataggcaacggctattgtaaatttccatcaagtacacaccccgttaataccgacttcaccggcaagtgtgtctag

SEQ ID NO: 211017 - DNA, 15681 bp, synthetic construct
  misc_feature 1..15681: note = Description of Artificial Sequence: Synthetic coding sequence
  source 1..15681: mol_type = other DNA
atgaactgccccgtgctgagcctgggcagcggcttcctgttccaggtgattgagatgcttatttttgcttattttgccagcatctccctgacagaatcacgcgggctgttcccaaggctggagaatgtgggagcctttaagaaggtgagcatcgtgcccacccaagccgtttgcggcctgccagacaggagtactttttgtcattcttccgcagctgctgagtccatacaattctgcactcagcggttctgtattcaggactgcccctacagaagtagtcaccctacctacaccgccctattttccgctggcctcagctcctgtattacccctgataagaacgacctccaccccaatgcccattcgaattctgcatccttcatcttcggaaatcacaagtcctgtttcagttcgcccccctcccctaagctgatggcctcctttacactggctgtctggttaaaacccgaacagcagggagttatgtgcgttattgagaagaccgtcgacggccagattgttttcaagctgactatctccgaaaaagagaccatgttttattaccgaaccgtgaacggacttcagccacccatcaaagtgatgaccctcggtagaatcctcgtaaagaaatggatccacctctcggttcaggtacaccagactaagatcagcttttttatcaatggcgtagaaaaggaccacactccatttaatgctcggaccctgtccgggagcatcacagattttgcctccggaactgtgcagattgggcagagtttaaatgggctcgagcagtttgtcgggagaatgcaagactttcggctgtatcaggtagctttgactaatagagaaatcttggaagtattttcaggggatctgctaaggctgcatgctcagtcacattgcaggtgcccaggttcgcaccctagggtgcaccctttagctcagaggtactgcatacctaacgacgccggcgataccgccgacaacagagtgtctcgcttaaatcctgaggcgcatccactttcgtttgtgaacgacaacgatgttggcacctcttgggtgtcaaacgtgttcacgaacatcacccagctgaaccagggcgtgaccatttctgtggacctggaaaatgggcagtaccaggtgttttatataataatccaattcttcagtccgcaacctactgaaattcgtatccagcggaaaaaagaaaacagtctggattgggaggactggcagtatttcgcacggaattgcggtgcttttggcatgaagaacaacggcgacttagaaaagcctgatagtgtgaattgcctccagctgtccaacttcacaccctacagtcggggtaacgttacatttagcatcctgaccccagggccaaactaccgtcccggatacaacaacttttataacacaccttctcttcaggagttcgtcaaggcaacgcagattaggttccactttcacggccagtattataccacagagactgccgtgaacctccggcacaggtactatgccgtagacgagatcaccatttcaggacggtgccagtgtcacggccacgcagacaattgcgataccacctcccagccctatcgctgtttatgcagtcaggaaagctttactgaggggctgcactgcgaccgctgcctccccttgtataatgataaaccgtttcggcagggggaccaggtatatgctttcaattgtaaaccatgccagtgtaattcacactccaagtcatgccactacaacatctctgtggacccctttcctttcgaacacttcaggggcggtggcggggtttgcgatgattgtgaacataataccacaggacgaaattgtgagttgtgcaaggactacttcttccggcaggtcggagcggatcctagtgcgatagatgtgtgtaagccatgcgattgtgacaccgtggggacccggaatgggtccatcctgtgtgatcagatcggaggccaatgcaactgcaaacgccacgtgagcggacgacagtgcaatcagtgccagaacggcttctataatctccaggagctggaccccgacggctgctccccatgcaattgcaacacctccggaaccgtcgacggagatattacctgccatcagaattccggacaatgcaaatgcaaggcgaatgtgattggactgaggtgtgaccactgcaatttcggcttcaagtttctgcgtagctttaatgacgtgggatgtgagccatgtcaatgcaatctgcatgggtcagtgaacaaattctgtaacccacatagcggccagtgtgaatgtaagaaggaagccaagggtctacagtgcgacacttgccgtgagaatttttacggactggacgtcacaaactgcaaggcatgtgactgcgacactgctggctccctgcccggcacagtttgcaacgccaagacgggtcagtgcatttgcaaacccaacgtggaaggcagacaatgtaataagtgtttagagggaaatttctacctaagacagaacaacagttttctgtgcctgccatgcaattgtgataaaaccggtacgatcaatggcagcctcctgtgcaacaaaagcacaggtcagtgcccttgcaaactcggagtgacgggattgaggtgtaatcaatgcgagcctcacagatataatttaacaattgacaactttcaacattgccaaatgtgtgaatgtgactctctgggaaccctgcccggtaccatttgcgatcccatctcggggcaatgcctctgcgtaccgaaccggcagggccgcagatgtaatcaatgtcaaccagggttttatataagccccggcaatgccacgggatgtctgccgtgctcctgtcacaccaccggagccgtaaaccatatttgcaactctttgacgggacagtgtgtctgccaggatgcctctatcgctggtcaacggtgtgatcaatgcaaagatcactattttgggtttgacccacagacgggtaggtgccagccctgcaactgccatctttctggtgctctgaacgagacctgtcacctggtgaccggacaatgcttttgtaagcagttcgtgaccggttctaaatgcgatgcatgcgtaccctcagcctctcatcttgatgttaataatctgctcgggtgctccaaaactccctttcagcagccacccccccgcggccaggtgcaaagttcaagcgctatcaatctctcttggagtcccccggatagtccgaacgctcactggctgacctattctcttttaagagatggcttcgagatatatactactgaggatcagtacccatactctatccagtactttctggatacggacttgctgccttacacgaagtattcgtactacattgaaaccacaaatgtccatgggagcacaagatctgtggctgtaacttataagaccaaaccgggcgttcccgagggaaacttaaccttgagctacataatccccattggtagcgactccgtgactcttacttggaccactctgtctaaccagagtggacctatcgaaaagtacatactgagttgtgctccattagccggcggccagccatgcgtgtcatacgaagggcatgaaacctcagctaccatctggaatctggtgccttttgctaagtatgatttctcagtgcaggcctgcacatctggcggatgtcttcactccctccccatcactgtgaccaccgcccaggctcctccacagagactctcccctcccaaaatgcagaaaatcagtagtactgagttacacgtggagtggtcgccccccgctgagctgaatggtataattattaggtatgagctgtacatgagaaggctccggtctacaaaagagaccacgtccgaggaatctagggtctttcagtcgtctggatggttgtctccgcattcattcgttgaatctgccaacgagaatgccttgaagcctccccagactatgacaaccatcaccgggctggagccgtacaccaagtatgaattccgtgtgttggctgtcaatatggccggttccgtaagctcagcttgggtttcagaacggacgggagaatccgctcctgtgttcatgatcccgccaagcgtgtttcccctttcatcttatagcctgaacatttcctgggaaaagcccgctgacaacgtgacaagaggcaaggtggtggggtacgacattaacatgctgtccgaacaaagtcctcaacagagcataccaatggcttttagccagctgctgcacactgccaaatcacaagagctctcttacacagtcgagggactgaaaccgtacaggatttacgagtttacaatcaccttgtgtaattccgtcgggtgcgttaccagtgcctccggtgccggccaaaccctagccgctgctcctgcccaactcagaccccctttagtgaaaggcataaattcaacaacaatccacctccgctggttcccacctgaggagctgaatggccctagcccaatttaccagttagagcgaagggaatccagcttgccagccttgatgaccacaatgatgaagggtatcagattcataggcaacggatattgtaaatttccatccagtacgcatcccgtcaacaccgatttcaccggcattaaggcgtcctttagaaccaaggtgccggaaggtctgattgtcttcgcagcctcccctgggaatcaggaggagtattttgcactacaactgaagaagggtcgattgtacttcctcttcgacccacagggatcccccgttgaggtcactactaccaacgatcacggtaaacagtacagtgacggaaagtggcatgaaataatcgcaattaggcaccaggctttcggccaaataactctcgatggtatttacacgggttcatctgccatccttaacggttcgactgtgattggagataacacaggcgtctttttagggggactcccacggtcctacactatcctaagaaaggatcccgaaattattcagaaaggcttcgtgggttgcctcaaagacgttcattttatgaagaattataacccgtctgcaatttgggagccactcgactggcaatcttccgaggaacagatcaacgtatataacagctgggaggggtgtcccgcgtccctcaatgaaggggcccagttcctgggcgctggctttctggagttgcatccatacatgtttcacggcgggatgaatttcgagatcagctttaagtttcgcacagaccagctcaatggcttgctgctgttcgtgtacaacaaagatggaccggatttcctggccatggaactcaaatctggcatcttgaccttccgactgaatacctctctcgcatttactcaggtcgacctgcttctgggcctgtcctactgcaatgggaaatggaataaagtgattattaaaaaagaaggaagcttcattagcgctagtgtgaatggcctgatgaagcatgctagcgaaagcggagaccagcccctggtggtgaattcccccgtctacgtgggcggaatcccccaggaactgctgaacagctaccagcatctttgcctggagcagggctttggtggctgcatgaaagatgtgaaatttacacggggggccgtagttaatttggcgagcgtaagcagcggcgctgtgcgagtgaatctggacgggtgtctgtccactgatagcgccgttaattgcaggggtaatgactccatcctggtctatcaggggaaagaacagtccgtgtacgagggaggcctgcagccattcactgagtatctgtacagggtgatcgcctcccacgaaggaggcagcgtgtattctgattggtctcgcggacggaccactggcgcagcaccccagtccgtccctactcctagtagggtgcggagcctgaatgggtactccatagaagttacatgggatgagcctgtggtgcggggtgttatcgaaaagtatatacttaaagcatactccgaggatagcacacggccacccaggatgcctagtgcctcagctgagttcgtgaacactagcaatttgaccggaatcttgaccggcctgctcccgtttaaaaactacgcagtaactctcactgcttgcaccctcgctggctgcactgagtcttctcacgcactgaacatttctacgcctcaagaggccccccaagaagttcaacctccagttgctaaatccctaccctcctctttactgctgtcctggaaccctcccaagaaggccaatggaattataactcaatactgcctttatatggacggcaggcttatttattccggttcagaggagaattacattgtgaccgatctggccgtgttcactccacatcaattcttgctgtccgcttgcacccacgtcgggtgtacaaactctagctgggtcctcctgtatactgctcaacttccaccggaacatgtcgattcaccggtgctgaccgtgctagattctcggactattcacattcaatggaaacaaccaaggaagatctctggcattcttgaacggtacgtcttgtacatgtccaaccacacccacgacttcacaatctggagtgttatttacaatagtaccgagctatttcaagaccatatgcttcagtacgtgttacctgggaacaaatatctgattaaattaggagcctgcactggggggggctgcacggtgtctgaggcctccgaagccctaaccgatgaagatatccccgaaggcgtccccgccccgaaggctcacagttactccccagacagcttcaatgtgagctggaccgagcccgagtacccaaacggcgtgatcactagctacggattgtatttagatgggattctaatccataactcatccgaactcagctaccgcgcctacggtttcgctccttggagcttacacagctttcgagtgcaggcttgcaccgccaagggctgtgccctgggccccctcgtcgaaaacaggacccttgaagccccgcctgagggcaccgttaacgtgttcgtgaagacacagggaagtcgaaaggcccacgttcgatgggaggccccatttcgaccgaacgggcttcttacacacagcgtgcttttcaccggaatattttatgtggatcccgttggcaacaactataccctactgaacgtgactaaggtcatgtatagcggcgaggaaacaaatttgtgggtcttaattgacgggttagtaccatttacaaattatacagtacaggtcaatatctccaactcacagggctccctgattaccgaccctattaccatcgccatgccccccggggcaccggatggggtgctccccccaagactcagttctgccactcccacatcgctgcaagtggtgtggagtacacctgctagaaataatgctcctgggagccctaggtatcagttgcagatgaggtcaggggactccacccatggttttctggaactcttttcgaacccatctgcttcattgtcgtacgaagtgtccgacttgcaaccttatacagaatacatgtttcggttagtggcttctaacgggtttggtagcgcgcactctagttggatacccttcatgacggcagaggacaaaccagggcctgtcgtgccccccatccttctggatgtgaagagtaggatgatgctagttacgtggcaacacccacggaagagcaacggcgtgataactcactacaatatctacctgcacggacgcctctacctcaggacgccaggcaatgtgacaaattgtaccgtaatgcacttgcacccatatacagcctacaagttccaggttgaagcgtgtacctcaaaaggatgcagtctcagtcccgaaagtcaaactgtgtggacccttcctggcgcacccgaaggtatcccatcccctgagttgttcagtgacactcccaccagtgttatcatcagctggcagcctcctacacaccccaatggtctcgtagagaatttcaccatagaacggcgcgtcaagggcaaagaagaggtgacgacccttgtgaccctgcccaggagtcacagcatgcgcttcatcgataaaaccagtgcattaagtccttggacaaagtacgagtatcgcgtgctgatgtccacactgcacggcggcactaatagtagtgcctgggtagaggtgaccacgcgcccctcacgacctgccggcgtgcaacccccagtggtgaccgtgctggagcctgacgcagttcaggtcacgtggaagccacctttaattcaaaacggggacattctgtcatacgaaatccacatgcctgaccctcacatcacgctgacaaatgtaacgtcagctgttctcagccagaaagtcacccatctcatcccatttaccaactacagcgttactattgtggcctgctccggagggaacggctatctcggcggttgtacagagtctctgccaacatacgtgaccacccacccaacagtgccacaaaatgtgggcccactgtccgtgatccctcttagtgaatcttatgtagtgattagctggcagcccccgtccaaaccaaacggacctaacctgcgttacgaactgcttagaaggaaaatacagcagccgctcgcatccaacccccccgaagacctgaatagatggcataacatatattccggcacccaatggctgtacgaggataaggggctcagtcggtttaccacatacgagtacatgttgttcgttcacaacagcgtcggcttcactccatctcgtgaagtgaccgtgacaaccctggcggggcttccagaacgcggcgcaaatctaaccgcaagtgtgttaaaccatacagctattgacgttagatgggctaaacccacagttcaagatcttcagggcgaagtggagtattataccctgttttggtcctcggctacatcaaatgatagcctgaaaatcctcccagacgtgaacagccatgttatcggtcatttgaagcctaacaccgaatactggatctttatatctgtgtttaatggagttcactcaattaattcggctggcctgcatgcaacaacatgcgacggagagcctcagggcatgctgccccccgaggtcgtcatcataaatagcacagctgtacgcgtgatttggactagcccttctaatcctaatggcgtcgtgacagagtacagcatctacgttaacaataagttatataagaccggcatgaacgtgccgggatcttttattcttagggacctgagccccttcactatctacgacatacaggtcgaggtgtgtacaatttatgcctgcgtcaaaagcaatggcacgcagatcaccaccgtcgaggacactccctctgatattcctacccctacaattcgcggaattacttcgaggtccttgcagatcgactgggtcagccctagaaagcccaatgggattatactgggctatgatctcctgtggaaaacttggtacccctgcgccaagactcagaaactcgttcaagatcagtccgacgagctctgtaaggcggtccgttgccagaagccagagagcatctgtggacatatctgctatagctccgaggcaaaggtgtgttgcaacggcgtcctctacaatccgaagccaggtcacagatgctgtgaagagaaatatattccattcgtgctcaatagcacaggcgtttgctgcggaggacgcattcaagaggctcaacctaaccatcaatgttgctctggatattatgcgcgcatccttccaggagaagtgtgttgcccggatgagcagcacaacagggtatccgtgggcattggcgactcttgttgcgggaggatgccttatagtacatccgggaaccaaatttgttgcgccggcagattgcatgacggtcatggccaaaagtgttgcggtagacagatcgtgagcaatgacctcgagtgttgcggcggcgaagagggcgtagtgtataaccgcctgcccggcatgttttgctgcggacaggactatgtgaatatgtctgataccatttgctgttccgcttcctctggagagtccaaggctcacatcaaaaagaacgacccagtcccagtaaagtgttgcgaaactgaactgatcccaaagtcccagaaatgctgtaatggtgttggctataaccccttgaagtatgtgtgttcagataaaatctctaccgggatgatgatgaaagaaaccaaggagtgcaggatactctgcccagctagtatggaggccactgagcattgcggacgctgcgacttcaattttaccagccatatctgtaccgtgattcgcggcagccacaattccactggcaaggcttctatcgaggaaatgtgcagctccgctgaggaaactatccacaccgggagtgtaaacacctatagctacaccgacgtgaacctgaaaccctacatgacctatgaataccgtattagcgcgtggaacagttacggtcggggcttgagcaaagcagtgcgcgcccgcacaaaggaggacgtccctcaaggagtgtcaccgccgacatggacaaaaatagacaacctcgaggataccatcgtcctgaactggagaaagccgatccagagcaacggacctattatctattatattttgctgcgcaatggtattgagcggttccgagggacatcactctcgtttagcgacaaggaaggcatacagccttttcaggaatactcctaccaactgaaggcatgcaccgtggcagggtgtgccacgtctagcaaagtggttgctgccaccacccagggcgtacctgagtctatcttgccaccatccattacggcgttgtcagccgttgcgctacatttatcttggtcggtgccagaaaaatccaacggcgttattaaggaatatcagatccgccaggtcgggaagggcctcattcacaccgacaccaccgaccgccggcaacacacagtgacagggctgcagccatacaccaactactcctttaccttgacagcctgtacgtcagcaggatgcacttccagcgaaccgtttctcggtcaaaccttacaggccgcacccgagggcgtgtgggttactccaagacacatcatcattaatagcacaacggtcgaactgtactggtcattacctgagaagccaaacggcctggtctctcagtatcagctgtccaggaatggtaacctgctattcctcggaggatctgaagaacagaacttcacggacaaaaatctggaacctaattctaggtacacttataaactggaggtgaaaaccgggggcggctctagtgcttccgacgactacatcgttcagaccccaatgtcaaccccagaggaaatttatcccccatataacatcacagttatcggcccctattcaatcttcgtggcgtggataccccctggtattctgatcccggagatacccgtggagtacaatgtcctgctaaatgacgggtcagttactcccttggccttcagtgtggggcatcaccagagtactctcctggagaatcttaccccatttactcagtacgaaatcagaatacaggcatgccaaaacgggagctgcggagtgagctctcgcatgttcgtcaaaactcccgaagctgcccccatggatctgaacagccccgtgctgaaagccctggggagcgcttgcatcgaaatcaaatggatgccacctgagaagcctaatggtatcattataaactacttcatttaccgcagaccagcgggaatagaggaagagtcagtcctttttgtctggtccgagggtgccctggagttcatggacgagggggatacactccggccctttaccctgtacgaatatcgggttcgggcgtgcaactctaaggggagtgtcgaaagtttgtggagtctcacccagacacttgaggcacccccacaggacttccccgcgccatgggcgcaggccaccagcgcccacagtgtcttactgaactggaccaaaccagagtcaccaaacggcatcataagtcactacagagttgtttaccaggaacgcccggatgaccctacctttaactcacccaccgtccacgccttcactgtaaaaggaacttctcaccaagcccacttatacggtctcgaaccattcacaacataccggatcggagttgtggctgcaaaccacgcaggcgagatcctttccccatggaccctgatacagacactcgagtcctcaccttccggccttcgtaattttatcgttgaacagaaggagaacggcagagccttactgctgcagtggagcgaacccatgcgcactaacggcgtgatcaagacatacaatattttttcagacggctttcttgagtactctggacttaataggcaattcttgtttcggcgcctcgaccctttcacgctgtacactcttactctggaggcttgtacacgggcggggtgcgcacattcagcccctcagcctctctggacagacgaggcccctccagactctcagctagcccctacagtgcattccgtgaagtcaacgtcagttgaattaagttggtctgagcctgtgaaccctaacgggaagatcatcaggtatgaggttatcagaaggtgttttgagggtaaagcctggggcaaccagactattcaggccgacgaaaagattgtttttactgagtacaacaccgagcggaatacctttatgtacaacgataccggactacagccatggacccaatgcgaatacaaaatttatacatggaacagtgctggccatacttgtagttcctggaacgtcgtgagaaccttacaggcgcccccagaaggactctcacctcctgtgattagctacgtgtctatgaatcctcaaaagctgctgattagctggataccaccagagcagagcaatggtatcatccagtcatacagattgcaaagaaacgagatgctgtatcctttttcttttgatcccgttacctttaactacactgacgaagaactgctgcccttttctacttatagttatgcactgcaagcctgcaccagcgggggctgctcaactagcaagccaactagcataacgaccctggaggccgccccttcagaggtgtctcccccggacctgtgggccgtgtcggctacacagatgaacgtgtgttggtccccgccaacggtccagaatggcaaaatcacaaaatatctcgtaaggtacgataacaaagaatcccttgcgggacaagggttatgtctactagtctcccacttgcaaccatacagccaatacaatttttcgttggttgcttgcacaaatggcggttgcaccgcttctgtgtccaagtcagcctggaccatggaggcgctccccgaaaatatggacagcccgactctacaggtgactgggtccgagagcatcgaaattacctggaagcctcctaggaaccccaacggccagatccgcagctacgagctgaggcgggatggcacgattgtctacacgggactagagacacgatacagagacttcaccctcacaccaggggtggaatactcgtacacggttactgcatctaactcacagggtgggattctgtcacctctggtaaaggaccgtacttcgccaagcgctccctctgggatggaaccaccaaaacttcaggctcgtggacctcaagaaatcctggtcaattgggatccgccagttaggacaaatggggatattattaattacaccctgtttatccgtgagctgttcgagcgagaaactaaaatcattcacattaataccacccataacagctttgggatgcagtcatacatcgttaatcagctgaagccctttcatcgctatgaaattcgaattcaagcctgtactacattgggatgcgccagctccgactggacctttatccagacacctgaaatcgcacctctcatgcagccccctccccaccttgaggtgcaaatggcccccggcggattccaaccaacagtgagtcttttgtggaccggcccacttcaacccaacggtaaggtgctctactacgaactctacaggagacagatcgcaacgcagcccagaaagtctaatccagtactaatatacaatggatcttcgacttcgttcatcgattcagaattactaccattcaccgaatacgaatatcaggtctgggccgttaactccgcgggcaaagctcccagtagctggacatggtgtcgcactggacccgcacctcctgaagggctgcgggctccaacgtttcacgtgattagttctacacaagctgtggtgaatatatcagccccaggcaagcctaatggcattgtgtctctatacagactgttctcatcatccgctcatggagcggaaactgtgctctctgaaggaatggccacccaacagactctccatggactgcaggccttcacaaattattccatcggtgtcgaagcatgtacatgctttaattgctgctcaaagggccccacagctgagcttcgaacccatcctgccccgccgtctggcctcagcagcccgcagattggaaccctggctagccggacagcctccttccggtggagcccgcccatgttccctaacggcgtgatccacagctatgagcttcaatttcacgtcgcctgtcctcctgattctgcgttaccctgcacaccaagccagatcgaaacaaagtacaccgggctagggcagaaagctagtcttggcggattacagccgtacaccacgtacaagctacgcgtggtcgctcataatgaggtgggttccactgcatctgaatggatctcttttactacgcaaaaagagctcccccaatatcgagctcctttctcagtcgactctaatctctcagttgtttgtgtgaattggtcagacacctttcttctgaacggccaacttaaagaatacgttctcaccgacgggggtcgaagggtgtatagtggactcgacacaacattatatattcccaggactgcagataagacctttttcttccaagtgatttgtaccacagatgagggatctgttaagactccacttattcagtacgataccagcaccggactgggcctggtactcactacacccggcaagaaaaagggatcccgcagcaaatctacggagttttacagtgagctgtggttcatcgtcttgatggcaatgctcggactgatcctgctggcgatatttctgtcgctaattttgcagcgtaaaattcacaaagagccatatatccgggagcggccaccacttgtccctctgcaaaaaaggatgagcccactcaacgtataccctccgggggagaatcacatgttcgactcagtggctgatattagcgacgtcagctccaacgtcacattgaagtcatacacgatgcatttcgaaggactggcagataccaagatcccaaggtccggcacaccagtgagcatccggagcaatcgttcagcatgcgtgttaagaattcccagtcagaatcagacatccctgacttattctcagggctctcttcaccggagtgtcagccaactgatggatatccaggataaaaaggtgctgatggataattccctctgggaagccataatggggcataactcaggcctttacgtggacgaagaggatctgatgaacgctattaaagatttctcgagcgttaccaaagaaagaactaccttcactgatacgcacttatag

SEQ ID NO: 211018 - DNA, 2538 bp, synthetic construct
  misc_feature 1..2538: note = Description of Artificial Sequence: Synthetic coding sequence
  source 1..2538: mol_type = other DNA
atgcggaccgaggccgtggtgaacagccagggccagaccgactacctgacaaaggactcagaccaggacgtggcacttaagctcgcacaggagagagctgaaatagtggccaagtacgacaggggtagggagggcgctgaaatagaaccctgggaagacgcagattatctggtttacaaagtcacggaccgcttcgggttcctccatgaggaagagctgccggaccacaacgtggcggtcgaacgccagaagcacctggagattgagagaacaaccaagtggctcaagatgctgaaggggtgggagaaatataagaacaccgaaaagtttcatcgtaggatctacaaaggcattccacttcagcttaggggcgaggtctgggcgctgctattagaaatcccgaagatgaaggaagagactagagatctgtatagcaagctgaagcatagagcaagggggtgttcccctgacatcagacaaatcgaccttgacgtgaacaggacttttcgcgaccacatcatgttcagagacaggtacggagtaaagcagcaatcactgttccacgtcctggcagcctattctatatataatacagaggtgggctactgccaggggatgtcacagatcaccgctctgctacttatgtatatgaacgaagaagatgctttctgggcgctcgtgaagctgttctccgggccaaagcacgccatgcacgggttcttcgtgcagggctttccaaagctgcttcggttccaagagcatcatgaaaagattttaaacaagtttctaagtaaactgaagcaacatctcgatagtcaagaaatctatacctcgttctatacaatgaaatggttcttccagtgctttctggaccgaaccccttttacattgaatcttagaatttgggacatatacatctttgagggcgagcgggttctcaccgctatgtcttataccattctcaagttgcacaaaaagcacttaatgaagctgagcatggaggaacttgtggaattttttcaggaaaccctggcgaaggattttttctttgaagatgattttgtgatcgaacagcttcagatctctatgactgagctgaaacgcgccaaactggacctgcccgaacccgggaaggaggatgagtatcccaagaagccactaggacagctcccacccgagttgcaaagctggggcgttcaccacctgagcaacgggcaaaggtcagttggcagacctagcccacttgcttctggcaggcgggaatcaggggctccgcatcgccggcacgaacacagcccccacccccaatcacggaccgggacacccgagcgtgcccagccaccgcggcgtaaaagcgtggaggaggagtctaaaaaactgaaagatgaagctgactttcaaagaaaactgccctcaggacctcaggattcatctagacagtacaaccatgcggccgcaaatcaaaacagtaatgctacatccaatataaggaaggagtttgtccctaaatggaataaaccttccgatgtttcagctacggaaaggacagctaagtatactatggagggcaaaggacgcgccgcccaccctgctttagcagtgactgtgcccggcccggccgaagttcgggtcagcaacgtcagaccaaaaatgaaggctctcgacgctgaagatggcaagcgtggctctacagcctcgcagtatgataacgtccccggcccagaactcgactctggtgcgagtgtggaagaagcgctcgaacgcgcttacagccaaagccctagacacgcgctttaccccccctcccccagaaagcatgctgagccttccagctccccgagcaaggtttcaaataagttcacattcaaggtccagccacctagccacgcccgctacccctcccaactggatggggaggctcggggactcgcccaccctccaagttattccaacccaccagtgtatcacgggaactcccccaaacactttcctaccgccaatagttcctttgcctcaccacagttttccccaggaacccagttaaatccgagcaggcgaccccacggatccactctcagcgtctcagcgtccccggagaagagttattctcggccaagtccactagtgctcccatccagtcgcattgaggtattgcctgtagatactggggccgggggctattctgggaatagtggcagtcctaagaatggtaagctgattatcccacctgttgactacctgccggataatcgcacttggtccgaagtatcctacacataccggcctgaaacacagggtcagtcatggactcgggatgcaagccggggcaacctgcctaagtactcagccttccagctggcgcccttccaggaccacgggctgcctgccgtatctgttgactctccggtgcgctacaaggcctcacccgccgccgaagatgcctctccgagcggctatccttattccggaccccctccccccgcctatcactaccgcaatcgagatgggttgagcatccaagagagcgtgctgctctag

SEQ ID NO: 211019 - DNA, 2487 bp, synthetic construct
  misc_feature 1..2487: note = Description of Artificial Sequence: Synthetic coding sequence
  source 1..2487: mol_type = other DNA
atgaacagcgaccaggacgtggccctgaagctggcccaggagcgggccgagatcgtcgcaaagtatgatagagggagggagggcgcggaaatcgaaccctgggaagatgcagattacctcgtttacaaagttacagaccgttttggcttcctgcatgaggaagagctgcctgatcataacgtcgccgtcgaacggcagaagcatctagaaatcgaaagaaccactaagtggctgaagatgctcaagggatgggaaaagtataagaacacagagaaattccataggaggatctacaagggaattccccttcagctgcggggtgaggtgtgggccctcttgttggagatccccaaaatgaaggaggagacccgggatctgtactcaaagctcaagcacagggcgaggggctgcagtcctgacatcagacagatcgacctagacgtgaacagaacgtttcgcgatcacataatgttcagggatcggtatggggtcaagcagcaatctctgttccatgtcctggccgcatactctatctacaatacagaagtaggctattgccagggcatgagtcagatcactgccctgttgctcatgtatatgaatgaggaggacgctttttgggcactggtcaagctgttcagcgggcccaagcacgcgatgcatgggttcttcgtccaagggttccctaaactcctccgcttccaggagcatcatgaaaagatcttgaacaagttcctctctaagctaaaacagcaccttgattcacaggaaatctataccagtttctatactatgaaatggttcttccagtgtttcctggacaggacacccttcacccttaacttgcgtatttgggatatttacattttcgagggcgagcgcgtcctgaccgccatgtcttatactatcctgaaactgcacaagaagcacctcatgaagctatccatggaggagctcgttgagttcttccaagagacattagctaaggacttcttttttgaggatgacttcgtcattgagcagctgcaaatatccatgacggaactgaagcgggcaaagctggaccttcccgagccaggaaaggaggacgaatatcctaaaaagccactggggcagcttccccctgaactccagtcgtggggcgttcatcacctgtccaatgggcagaggtctgtgggccgcccttcacctttggcttctggaaggcgagaatccggagcaccacaccggcgccacgagcactcacctcacccccagagccggacaggcactcctgagcgtgcacaaccccctaggagaaaatctgtggaagaggagtccaagaagttgaaggacgaagctgactttcaaaggaaactccctagcgggccacaggactcatctcgccagtataatcacgccgccgccaatcagaacagcaatgctactagcaacattcgtaaagagtttgttccaaagtggaacaagccctctgacgtgtccgctacagagcggaccgcaaagtacacaatggaaggcaaaggacgggccgcccaccctgctctggctgtgaccgttcctggacctgccgaggtgagagtcagtaacgttaggcctaagatgaaggctctggacgccgaggacgggaagcggggcagtacagcaagtcagtacgacaatgtgcctggccccgaactcgactcaggcgcctctgttgaagaggccctcgagagggcatactcgcagagcccgagacatgcactgtacccaccatccccaagaaaacatgccgaaccttcctctagtcctagtaaggtgagtaataaatttacattcaaggtccagccaccgagccacgcaaggtaccccagccagctggatggagaggctcggggactggcccacccaccatcctatagcaacccccccgtttaccacgggaattctcctaagcatttccctaccgctaacagctctttcgcaagcccacagttcagccccggtacacaactcaaccccagcaggaggcctcatgggagcaccctctctgtatctgccagtcctgagaagagctattctcgtcccagcccactggtgttaccgagctctaggattgaagtgctacctgtcgataccggcgccggcgggtactctggcaattccggctcccccaagaatggtaaactcatcattcccccggtcgattacttacccgataatcgaacctggagtgaggtgtcatatacatacagacctgagactcagggccaaagctggactcgtgatgcatccagaggtaatcttcccaaatactccgccttccagctagctccattccaggaccacggcctccccgcggtttccgtcgatagtccagtgcggtacaaggcttccccagctgccgaggacgcctcaccatccgggtacccttactccgggcctccaccacctgcttaccactaccggaatcgagacggactctcaatccaagagagcgttttgctgtag

SEQ ID NO: 211020 - DNA, 2487 bp, synthetic construct
  misc_feature 1..2487: note = Description of Artificial Sequence: Synthetic coding sequence
  source 1..2487: mol_type = other DNA
atgaacagcgaccaggacgtggccctgaagctggcccaggagcgggccgagatcgtggctaagtacgaccggggacgggagggtgccgagattgaaccatgggaagacgctgactatctggtctataaggtgaccgatcggtttgggtttcttcacgaagaggagttgccagatcacaacgtggcggttgaaaggcagaaacatctcgagattgaacgcacgaccaaatggttgaagatgctaaaggggtgggaaaaatacaagaacacggagaagttccacaggaggatctacaaggggatccctttgcaattacggggagaggtgtgggcattactcttggaaatacctaagatgaaggaagagacgcgcgacctttactcaaaacttaaacaccgagctcgcggctgttcccctgacatccgccagatcgacttagacgtaaacaggacctttcgagatcacattatgtttcgggatagatacggcgtcaagcagcagtccctgttccacgtgctggccgcctattctatctataacactgaggttgggtattgccaggggatgagccagatcaccgctctcttgctgatgtatatgaacgaagaggatgcgttctgggcattggttaagctattctctggtcctaagcacgcgatgcacggcttctttgtgcaggggttcccaaagttgctcagatttcaggaacaccacgaaaagatcttaaataagttcctctccaagttgaagcagcatctcgattcacaggagatctataccagcttttatacaatgaagtggttcttccagtgcttcctcgaccgaacaccattcacccttaatttgcggatatgggatatctacatcttcgaaggagaaagggtgttaactgcaatgtcttacacaatacttaaattgcataaaaagcacctcatgaagctgagtatggaggagttggttgagttttttcaggagactctggcaaaagacttcttcttcgaggatgattttgtgatcgagcagctgcagatatccatgaccgagttgaaaagggcgaaacttgatttaccagaaccaggaaaggaggacgaatatcctaagaagccactcggtcagctccctcctgagttgcaatcttggggggtccatcatctgtccaatggacaaagatctgtaggcagacccagtccccttgcaagcgggcgtcgagagtccggggccccacatcggcgccacgagcatagcccccatcctcagtccaggaccggaacccctgagcgcgctcagcccccaagacggaagagcgtggaggaggagagtaagaaactgaaagacgaggcagactttcagagaaagctgccctctgggccccaggatagctctagacagtataaccacgcggctgccaatcaaaacagcaacgcgaccagcaatatccgcaaagaatttgtgccaaaatggaacaaacccagtgatgtctctgccaccgagaggaccgccaaatacaccatggaaggcaagggacgtgcggctcacccggccctcgctgttactgtgcccggaccggccgaggtccgtgtgtcaaacgtaaggcccaagatgaaagcacttgatgctgaggatggcaagagaggctctaccgctagccagtatgataacgtgcccggacctgagttggatagcggcgcaagcgtagaggaggctctcgagcgggcttactctcaaagtcctcggcatgccctgtacccacctagccctcgcaagcatgctgaaccttcctcttctccctccaaagtgagcaacaagttcacatttaaggtacagcccccgtctcacgctaggtatccttcacagttggatggagaagcccgcggactggctcacccacctagttatagcaacccaccggtgtaccacggcaatagccccaaacactttcctacggctaactcttcctttgcttctcctcagttctcacctgggacacagctcaaccctagccgtcgtccacacggatccaccctgtctgtatccgcatcacctgagaagtcctacagtcgacccagccctctggtgcttccgagtagtcgaatcgaggtactccctgtcgatactggagccggagggtatagcgggaacagcgggtcccctaagaatggcaagctgattattccacccgtggattatctccctgacaacaggacctggagcgaggtttcctacacatacaggccggaaactcaagggcagtcatggactagggatgcttccagaggaaaccttcccaaatacagtgcgttccagctggccccttttcaggatcacggccttcccgccgtaagtgtcgactcacctgtcaggtacaaggcctcaccggccgctgaggatgcctctccaagcgggtatccatactccggccccccgcctccagcttaccactaccggaacagagacggtctttctatacaggagtcagtcctactttag

SEQ ID NO: 211021 - DNA, 762 bp, synthetic construct
  misc_feature 1..762: note = Description of Artificial Sequence: Synthetic coding sequence
  source 1..762: mol_type = other DNA
atggccgccgccttccggaaggccgccaagagccggcagcgggagcacagggaaagatctcagcctggcttccggaagcacctcggtctcctggaaaaaaagaaggactataaacttcgcgccgacgactacagaaagaaacaggagtacttaaaagccctgagaaaaaaagcactggagaagaatcccgacgaattttactacaaaatgacgcgtgttaagctccaggacggggtgcatatcatcaaggagacgaaggaggaagtgactcccgagcagctgaaacttatgaggactcaggacgtgaagtacatcgaaatgaaacgtgtggccgaagcaaagaaaatcgagcggctgaaatccgaactccacctccttgacttccagggcaaacagcagaataagcatgtgtttttctttgacactaaaaaggaggtggagcaattcgacgtcgcaacacacttacagactgcaccagaactcgtcgatcgggtgtttaacagaccccggatcgaaaccttgcagaaagagaaagtaaagggagtgaccaaccagacagggctgaaaagaattgctaaagagcgtcaaaagcagtacaattgtctgacccagagaattgagagagaaaagaaactgtttgtgatcgctcagaagatccagactcggaaagacctaatggacaagacccaaaaggtgaaagtgaaaaaggagaccgttaacagtcctgcaatatacaagttccagtccaggagaaagcgctag

SEQ ID NO: 211022 - DNA, 447 bp, synthetic construct
  misc_feature 1..447: note = Description of Artificial Sequence: Synthetic coding sequence
  source 1..447: mol_type = other DNA
atggccgccgccttccggaaggccgccaagagccggcagcgggagcaccgtgagagaagccagcctgggtttcggaagcaccttggacttttagagaagaagaaagattacaaattgagagccgatgactataggaagaaacaggagtatctgaaggctctgagaaaaaaagctctggaaaagaatccagacgaattttattacaaaatgactcgagtgaagctgcaggatggggtgcacatcattaaggagacaaaagaagaggtgacccctgagcagctcaagctgatgcgtacacaggacgttaagtacatcgaaatgaagagagtcgccgaggcaaagaaaattgaacgcctgaaaagtgagcttcacttgctcgacttccaaggaaaacaacaaaataaacatgtgttctttttcgacaccaagaaagaggcaaattcttag

SEQ ID NO: 211023 - DNA, 2124 bp, synthetic construct
  misc_feature 1..2124: note = Description of Artificial Sequence: Synthetic coding sequence
  source 1..2124: mol_type = other DNA
atgcccgaggaggccggcttcccccccgccaagcggttccggcccggcagcggccctccctctagagcaggatcattcccccctggacgccaggtggtgatgcttctgacagccggctctggcggcaggggtgggggcggcggacgcagacagcagccaccactagcacagccttcagcatcaccctacccggaagcagtcgagcttcagcgcaggagtttgcccattttccaggccagggggcaactgctcgcacagctccggaatttggacaatgcagttctgatcggtgagacgggatcagggaagacaacccagatcccccaatatctatacgaggggggcattagccggcaaggaatcatcgcagtaactcagcccagaagagttgccgccatcagcctggccacaagagtgtccgatgaaaagaggaccgagcttggcaaactagtggggtacacagtgcgcttcgacgacgtgacatctgaggatacacgtatcaagttcttgacagacggtatgcttctccgcgaagccatcagtgactccctgctgaggaaatattcctgcgtgattctagacgaagctcacgagagaactatccacaccgatgtcctcttcggcgtggtaaaggccgcccagaagagaagaaaagagttgggcaagctccccctcaaagtgatcgtaatgtccgctacaatggacgtcgacctgttttcccagtactttaatggagcccccgtgctttacctcgagggtcgacagcaccccatccaagtgttctacacgaagcagccgcaaaacgactatctacatgccgccctggtgtcggttttccagatccatcaggaggctcccagctctcaggacatcctcgtgttcctgacaggccaggaggagattgaagcgatgtctaaaacgtgccgggacatcgccaaacacttaccagatggctgtcctgctatgctggtgctaccattgtatgcctcactgccttacgcgcagcagcttagagtctttcagggggcacctaaaggttaccggaaggtgataataagcacaaacattgccgagactagtatcaccatcaccggaatcaagtatgtagtagataccggaatggttaaggcgaagaagtataatccagacagtggtcttgaggtactcgccgtgcagcgggtaagcaaaacgcaagcatggcaacgcacagggagggccggacgagaagactccggtatctgttatagactttacacagaagatgagttcgagaagttcgacaagatgactgtgcccgagatccagcgttgtaaccttgcaagcgtcatgcttcaattgttagctatgaaagtgcctaacgtgctgacctttgatttcatgtcgaaaccaagcccagatcatatccaagcggccattgcccaactagatttactcggtgctctggaacacaaggacgatcaactgaccctcacacctatgggccgcaagatggctgctttcccactcgaacctaaattcgccaagacaatcctcatgtctcctaagttccactgtacggaggaaatccttactatcgtgtctctgctttctgtggatagcgtgctccataatccacccagccgccgggaggaggtccagggggtccggaaaaaatttatctctagtgagggggatcatatgacattgctcaatatataccgcaccttcaaaaatctagggggaaataaggattggtgtaaagagaacttcgtcaattctaagaacatgacgctggttgccgaggtgcgcgcacaactccgcgacatttgcctgaaaatgtccatgccgatcgcttccagccggggagacgtggagtccgtccgaagatgtctcgctcatagtttgttcatgtccacggccgagctccagcccgacggcacatacgccactaccgacacccaccagcccgtggctattcatccgtcttctgtcttatttcactgcaagcccgcttgtgtggtgtatactgaattgctttacacaaacaaatgttatatgcgagacctatgtgtgatagacgcccaatggctatacgaggccgcacccgagtactttcgtcggaaactccgcaccgcacgcaactag

SEQ ID NO: 211024 - DNA, 1566 bp, synthetic construct
  misc_feature 1..1566: note = Description of Artificial Sequence: Synthetic coding sequence
  source 1..1566: mol_type = other DNA
atgcggcccgactggaaggccggcgccggccccggcggccccccccagaaacccgccccaagcagtcaacggaaacctcccgcacgaccctccgccgcggccgctgctattgcagtggccgctgccgaagaggagagaaggttgcggcagcggaatcgtttgcggttggaggaggacaagcccgccgttgagagatgtctggaggaactggtgtttggggacgtggaaaatgatgaggatgcactcctcagacgattgcgcggaccacgtgtccaggagcacgaagactccggcgactcagaagttgagaacgaggccaaggggaattttccaccacaaaagaagcccgtttgggttgatgaggaggacgaggacgaagagatggtcgacatgatgaacaaccgatttaggaaggacatgatgaagaacgcatctgaatctaaattgagtaaagacaacttgaagaagcgcctgaaggaggaattccagcatgcgatgggaggggtccctgcgtgggccgaaacaactaagagaaaaacatcttccgatgacgaatcagaggaagatgaagacgacttgctccagcggacgggcaactttatatcaacgagcaccagcctgccacgcggaattcttaaaatgaaaaactgtcagcacgctaatgcggaacgcccaacggtcgccagaatctcttccgttcaattccaccctggtgcccaaatcgttatggtagctggattagacaatgctgtttccctgttccaagttgacggcaaaaccaaccccaaaatccagagtatttatctcgagcgatttcctattttcaaagcttgtttctcagcgaacggggaggaagtcctggctacctcgacccacagcaaagttttgtacgtgtatgatatgctcgccggcaaattaatacccgtccaccaggtcaggggccttaaggaaaaaatagtgcgcagctttgaggtaagtcctgacgggagtttccttctaattaacggcattgccggctacctgcatctgctggccatgaagactaaagagctgataggaagtatgaagattaacggccgcgttgctgcttctactttctcatctgactctaagaaagtgtacgcaagctccggagacggcgaagtctatgtttgggatgttaacagtaggaagtgcttaaatagatttgtcgacgaagggtctttgtacggcctgtcaatcgctacaagtaggaatgggcaatacgtcgcgtgtgggtccaattgcggggttgtgaatatctataatcaggactcttgcctacaagagaccaatcccaaaccaataaaagctataatgaacctagtaactggcgtgacgtctcttaccttcaacccaactaccgaaatcctagcaatcgcttctgaaaaaatgaaagaagccgtaagacttgttcacctcccttcctgtaccgtgtttagcaatttcccagtgataaagaataaaaatatctcccatgttcataccatggacttttctccaaggagtggttattttgcactcgggaatgaaaaagcgaggccttag

SEQ ID NO: 211025 - DNA, 8358 bp, synthetic construct
  misc_feature 1..8358: note = Description of Artificial Sequence: Synthetic coding sequence
  source 1..8358: mol_type = other DNA
atgaagaccaagcccgtgagccacaagaccgagaacacctaccggttcctcaccttcgctgaacgactcggaaatgttaatatcgacatcattcacagaatcgaccgaacagcctcatacgaagaggaagttgagacttatttcttcgaaggcctgctcaaatggcgggagctcaatttgacagagcatttcgggaagttttacaaagaggtcatcgacaagtgccagagcttcaaccagctcgtgtaccatcagaacgaaatcgttcagtccctcaagacacaccttcaagtcaagaattcattcgcatatcagcctctccttgacctcgtggtacagctcgccagggatctgcagatggacttctaccctcactttccagaattcttccttaccattacctcgattctcgaaacgcaggatactgagcttctagagtgggcctttaccagcctttcctacttgtataagtatctgtggcggcttatggtcaaggacatgtcctccatctacagtatgtatagtacattgcttgcacacaaaaaactgcatatccgcaactttgctgccgagtcatttacgttcctgatgcggaaggtatcagacaaaaatgcactgtttaacctgatgtttcttgacctggacaaacacccagagaaggttgagggagtgggtcagctgctgtttgagatgtgtaagggagttagaaacatgtttcactcttgcacagggcaggctgtgaagctgatcttaagaaagctaggccccgtgactgagacggagacacaactgccttggatgttgatcggcgagaccttgaaaaacatggtcaaaagcaccgtgagctacatcagtaaagaacactttgggacattctttgagtgcctgcaggaatcccttttggacttgcacacgaaagtaactaaaaccaattgttgcgaatcctccgagcaaattaaacgactgctggagacttacctgatccttgtgaaacatggcagcggcacaaagattcctacccctgcagacgtgtgcaaggttctgtctcagacactccaagtcgcttcactctcgacatcttgctgggagacacttctggatgtaattagcgctcttatcctgggtgagaatgtgagcctcccagaaacactcataaaagaaactattgaaaagattttcgaatcccgcttcgagaagcggctgatcttcagcttcagcgaggtgatgtttgccatgaaacagtttgagcagctgttcctgccttctttcctgtcttatatcgtcaactgcttccttatcgacgacgcagtcgttaaagacgaggcattagcaatccttgcgaaactgatccttaataaggcagcacccccgacagcaggctctatggctatcgagaaatatcccttggtgtttagccctcagatggtgggcttctatatcaaacaaaaaaagacccgctctaaaggcaggaacgagcagtttccagtgctggaccacctgctgtcaatcatcaagcttcctccaaataaggacacaacatacttgtcacaatcttgggccgccctcgtggtgctgccccacatacgaccactagagaaagagaaggttattccgctggtgaccggcttcatagaagccctgtttatgaccgtggataaagggagtttcggaaaaggtaatctgtttgttctctgtcaagccgtaaacaccttgctgagtctggaggagtcttccgaacttctgcatctcgtgcccgtggagcgcgtaaagaatctggtgctgacattccccctggagccctccgtgctgctgttgaccgacctgtactatcaacgcttagccctgtgtggctgtaagggacctttgtcgcaggaagccctgatggagctgtttccgaagctgcaggccaacatctctactggagtgtctaagatcagactgttgactattagaatcttgaatcattttgatgtgcagctccccgagtccatggaggatgacgggctgtccgaaaggcagagtgtgtttgcgatcttgaggcaagctgaactcgttcccgcaactgttaatgattaccgcgagaagttgctccatctccgcaaactgagacacgacgttgtgcagaccgcagtgcccgatggccctcttcaagaggttccccttcgatatttacttggaatgctctacattaatttcagcgctctgtgggatcctgtgattgagctgatctctagccatgctcacgaaatggagaacaaacagttttggaaggtgtactatgagcacctggagaaagctgctacacacgctgaaaaggaactccaaaatgacatgacagacgagaagtcggtgggggatgagagctgggagcagactcaggagggggacgtgggggccctttatcacgaacagctggccctaaagaccgattgccaagagagattagatcacaccaacttccggtttttattgtggagggccctcaccaaatttcctgagcgggtcgagccaagatcaagggaactatctcctctcttcctgagatttattaacaatgagtattatccggctgatctgcaagtcgcccctactcaggatttgagacggaaaggaaaaggcatggtagccgaagaaattgaagaggagcccgcggccggagacgatgaggagctggaagaagaagctgttccacaggacgagtcctcccagaagaaaaagacaaggcgagctgcggctaagcagctaattgcccatcttcaagtctttagcaaattcagcaaccctagggccctctacctggaatccaagctttacgaattgtacctccagctgttattgcatcaggatcagatggtgcagaagattactctggactgcattatgacgtataagcatccccacgtattgccctaccgcgaaaacctgcagcgcctcctggaggatcggagcttcaaagaggagattgtgcacttttctatcagtgaggataacgctgtagtcaagacagcacatcgggctgatctgtttccaattctgatgcgaatactgtatggacggatgaagaacaagaccggtagcaagacgcagggaaagtctgcatctggaacccggatggcaatcgtgctccggttcttggctggcactcagccagaagagattcaaatcttcctggatctcctcttcgagcctgtgcggcactttaaaaacggggagtgccatagcgcagtgattcaggcagtcgaggacctcgatctctcaaaggttcttccactggggagacagcacggtattctgaacagcctcgaaattgttctgaagaacattagccacctcataagtgcttatctgcccaagatattgcagatactgctttgcatgacagcgacggtatcacacatcctagaccagagggaaaaaattcagctcaggtttattaatccactcaaaaacctgaggcgactcggcatcaaaatggtgacggacatttttctggactgggaatcttaccagttccgtaccgaagagatagatgctgtgtttcacggcgcggtctggccccaaattagccgactcggctcagagtcccagtattctcccactcccctgttaaagctcatcagcatttggtccaggaatgcccggtatttccctctgctggccaaacagaagcccggccaccctgagtgcgatatcctcacgaacgtcttcgccatactgtcggccaaaaacctgtcagacgcaactgcttccattgttatggatattgtcgacgacctgctaaaccttcccgattttgaaccaactgagaccgttttgaatcttctggtgactgggtgtgtgtatccaggtatagctgagaatattggggagtccattacgatcggcggacggctcattctgcctcatgtccccgccatactccaatatttgagcaaaacaaccatcagcgccgaaaaggtcaagaaaaaaaagaaccgggctcaagtgagtaaggaactgggtattctgtccaagatctccaagttcatgaaagacaaggagcagagttctgtgctgattaccctcttactgccttttctacataggggcaatattgccgaggataccgaggtagatattctcgtcacagtgcagaacttactaaagcactgcgtggacccaacttcctttttgaaaccaatcgcaaagctcttttctgtgatcaaaaataagctcagcaggaagttgttgtgtacggtatttgaaacgttatcggatttcgaatcaggactcaaatatataacggacgtggtgaagttaaatgcctttgaccagaggcacctggatgacatcaacttcgacgtgcgcttcgaaaccttccagaccattacatcctacattaaagagatgcaaattgtggacgtcaattatctgattccagtgatgcacaattgcttctacaacctggagctcggagatatgtccctctcagataacgcttctatgtgtctcatgtccataatcaaaaaactagcggcattgaatgtcacagagaaggactacagagaaatcattcaccggtcactgttagaaaaactgaggaaagggctcaaatcccagaccgaaagcattcaacaagactatacaacaattctgagctgtctgatccagaccttcccgaaccagctggagtttaaggacctagtccaacttacgcattaccatgaccctgaaatggacttctttgagaacatgaagcatatacagatccaccggagagctcgtgctctaaagaagttggccaagcagttgatggaggggaaggtggtgctatcgtctaaatccctgcagaattatattatgccttatgctatgactcccattttcgacgagaaaatgctaaaacacgagaatataactactgcagcaacagagataataggcgcaatctgcaaacatttgtcttggtctgcctatatgtattatctcaaacattttatacatgtgctgcagacgggccagataaaccagaaattgggagtttccctgttagtcattgtcctggaagcctttcatttcgaccacaaaactctcgaagaacagatgggaaagattgagaatgaggagaacgccatcgaagccatcgaattgcccgagcccgaggcaatggagctggagcgcgtggatgaagaggagaaagagtatacatgcaagtctctgtccgacaacgggcaacccggcacaccggatcctgctgattctggagggaccagcgcaaaggaaagtgagtgtataaccaagccggtttcatttcttcctcagaataaagaagaaattgagcgcaccataaaaaacattcaaggtactatcaccggtgatatcttacccaggctccacaagtgcctggcctccactacaaagagggaggaggagcacaaacttgtgaaatccaaagtcgtgaatgacgaggaggtggtccgggttcccctagcttttgcaatggttaagttgatgcaatccctcccccaggaggttatggaagcgaacctccctagtatccttcttaaggtgtgcgctctgttaaaaaatagggcccaagaaatccgggacattgctagatctacactggccaaaatcatcgaagatctgggtgttcacttcctcctgtacgttctgaaggagttgcagacaacactcgtgagaggttaccaggtgcacgtgttaacctttaccgttcacatgttactgcaaggcctgactaataaacttcaagtgggggacctcgacagctgtctcgatataatgattgaaatctttaaccacgaactcttcggcgccgtcgccgaagaaaaagaggtgaaacagatcctctccaaggtgatggaggcccgacggtctaaatcctatgattcgtacgagatcttgggcaagttcgttggcaaagatcaggtgacaaagctgatccttccacttaaagagattctgcagaatacgaccagtctgaaactcgcacggaaggtgcatgagaccctacgccgaattactgtgggcctgattgtcaaccaggagatgacagccgagagcatcttgcttctgagttacgggctaatcagtgagaacctccctttgctgactgaaaaagaaaagaaccccgtggctcctgcccccgatccccgtctacccccacagtcctgcctactgcttcctcccaccccagttcgggggggccagaaagcagtagttagccgcaaaaccaacatgcatattttcatcgagtctggtctccggctcctgcatctgagtctcaaaacatctaagattaagagtagcggggagtgcgtgctcgagatgctggatccttttgtgtctctgcttatcgactgcctgggcagcatggatgtgaaggtcatcactggtgccttacagtgtcttatctgggtcctccggttccccctcccttctatagaaacaaaggcagagcagctcacgaaacatctctttttattgctgaaggattacgcgaagcttggggcagctagaggacaaaattttcacctcgtggtgaactgcttcaagtgcgtgacaatcctcgtgaagaaagttaaatcgtaccagattaccgaaaaacaactacaagtgctattggcttacgccgaagaggatatttacgacacctcccggcaagcaacggcctttgggctgctgaaagctattctcagtcgaaagctcctcgtgcctgaaatcgatgaggttatgaggaaggtgagcaaactggcagtgtctgctcaatctgagccagctcgagtacagtgtaggcaggtctttctgaagtacatcctggattatcctctgggggacaaattacggcccaaccttgagtttatgctggcacaactgaactacgaacacgaaaccggaagggagtccacactggagatgatcgcatatctgtttgatacctttcctcagggattacttcacgaaaactgcggcatgtttttcatcccactctgcctcatgacgattaacgatgactcagccacctgtaagaagatggcttccatgactataaagtctttgctggggaaaattagtctcgaaaagaaagactggctcttcgacatggtgacaacatggttcggtgccaagaagcggctgaatcgacagctggcagccttgatttgcggtttattcgtcgaaagcgagggcgtggacttcgagaagcgattggggactgtgctccccgtcatagagaaggagattgatccagagaattttaaggatatcatggaagagacggaggaaaaggccgcagacaggcttttattttccttcctgacgttgatcacgaaattaatcaaggagtgcaatattattcagtttactaaacctgcagagacactgtctaagatctggtcacacgtacatagccatctccggcacccccataattgggtgtggctgacagctgcccagatcttcgggctgctctttgccagctgtcagccagaggagctcatacaaaagtggaataccaagaagacaaaaaagcatctgcccgagcccgttgccataaaatttttggcctcagacctcgatcagaagatgaaaagcatctccttggcatcctgtcatcagttgcattccaagtttctggaccaatctttgggggaacaggtggttaagaatcttctgttcgccgcaaaagttctgtatcttctcgagctgtattgcgaggacaaacaaagcaaaattaaggaggatttagaggagcaagaggctctggaggatggtgttgcctgcgcggatgagaaagctgaatccgacggggaggaaaaggaggaagtcaaagaggaactagggagaccagcgactttgctgtggcttatccaaaaactaagccgtattgccaagttggaggctgcatatagcccacgaaacccacttaaaaggacctgcatcttcaagtttctgggggcagtagcaatggatctaggtattgataaggtcaaaccctacctgcctatgatcattgcgcccctgttcagagaactgaacagcacctactccgagcaagaccctttgctcaaaaatttatctcaggagattattgaactgctcaagaaactggtgggcctggagtctttttcattagctttcgcttctgtgcagaaacaggctaatgaaaaaagggctctcagaaaaaaacgcaaggctctggagttcgtgacaaaccccgacattgcagctaaaaaaaagatgaaaaaacataaaaataaatctgaggctaaaaaaagaaagatagagtttctcagacctggctacaaagctaaaagacaaaagtcccatagtcttaaagacctggccatggtggagtag

SEQ ID NO: 211026 - DNA, 1440 bp, synthetic construct
  misc_feature 1..1440: note = Description of Artificial Sequence: Synthetic coding sequence
  source 1..1440: mol_type = other DNA
atggtgggccggagccggcggcggggcgccgccaagtgggccgccgttcgggcaaaagctgggcctaccctgacagatgagaacggcgatgatctgggactccccccatctcccggtgatacttcttattaccaggaccaagtagacgatttccacgaagcgagatcccgggcagcactggccaaaggctggaatgaagtgcagtccggggatgaggaggacggagaggaggaagaagaggaggtgcttgcgcttgatatggatgacgaggacgatgaagacgggggtaacgccggcgaagaagaagaggaggaaaacgcagacgatgatggggggtcaagtgtccaaagcgaggctgaagcttcggtagatcctagtctgtcttgggggcagcgcaaaaaattatactatgatactgattatgggtccaagagccgggggcggcaaagccagcaggaggcagaggaggaagaacgggaagaagaggaagaagcccagattatccagagacggctggcgcaggcactccaggaggacgacttcggagtcgcttgggtagaagccttcgccaagcccgtgccccaagtggatgaggccgagacccgggtggtgaaggatcttgctaaggtgtctgtgaaggaaaaattgaagatgttacgtaaggagagccccgagctgctcgagttaattgaggatctgaaagttaagctgaccgaagttaaagacgaattagagccactgctggaactagtagagcagggaattatccctccaggcaaggggtcccagtacttaaggacaaagtataacctttacctgaactattgttcaaatatcagcttctacctcattctgaaggcccgcagggtccctgctcatgggcaccccgtgattgagcgactggtgacgtacagaaacctaattaataaactgtctgtagtggatcagaagctctcatctgagatacggcacttactcaccttgaaagatgacgccgtgaaaaaggagctgatcccaaaagccaaatctacaaaacccaagcctaaatctgtgtccaaaactagcgcagcagcttgtgcggtgaccgatctgtccgacgacagcgattttgacgagaaggccaagctcaaatactacaaagagatcgaggataggcagaaattaaaaagaaagaaggaggaaaatagtactgaagaacaggccctcgaagatcaaaacgctaaacgcgccatcacctatcagatagcaaagaaccgcggccttactccacgtcggaagaaaatagaccgaaaccctcgcgttaagcatcgggaaaaatttaggcgggccaagataagacgtcgaggtcaggtgagggaagtacgaaaggaagaacagaggtactcaggagagctgtccggcattcgggccggagtcaaaaagtcaataaaactcaagtag

SEQ ID NO: 211027 - DNA, 756 bp, synthetic construct
  misc_feature 1..756: note = Description of Artificial Sequence: Synthetic coding sequence
  source 1..756: mol_type = other DNA
tgaatcggcctgatgagcctgagcaagggcctgctggaggagaagtacaggtacctgttcaaagaggtggctggtcccacagaaatgtgcgaccagaggcagcttgggctactgctccacgacgctattcagattccccggcagcttggagaagtggcggctttcggaggctccaacatcgaaccgagcgtaagatcatgtttccagcagaataataacaaacccgaaatatctgtaaaagagttcatcgactggatgcacctagagccacaaagcatggtatggctgcccgtactgcaccgggtggctgccgctgagaccgctaagcatcaggcaaagtgcaatatatgtaaagaatgccccattgtagggttccggtaccggtcactaaaacacttcaactacgacgtgtgccagtcttgctttttcagcggtcggaccgcaaaggggcacaagctgcactatcctatggtggagtactgcattccaaccacttcaggggaggatgtacgtgacttcactaaagtcctcaaaaacaaatttcggtccaagaagtattttgccaagcatcctcggctgggttatcttccagtgcagaccgttctcgagggtgataacctggagacaccatcccagagcccccagctctttcacgatgatactcattcacgcatcgagcagtacgccactaggcttgcacagatggagcgaacaaacggatccttcctgactgatagctccagtaccaccggatag

SEQ ID NO: 211028 - DNA, 201 bp, synthetic construct
  misc_feature 1..201: note = Description of Artificial Sequence: Synthetic coding sequence
  source 1..201: mol_type = other DNA
atgatcggcctgaacttcaacctgcgggagctgctgaccaagttcgagaaggacattcaggcggaaatcgacgcccataatgacatatttaagagtatcgacggaaaccggcagaaaatggtcaaggctcttggcaacagtgaagaggctaccatgctgcaacatcgcctggacgacatgaaccagcggtggaatgactag

SEQ ID NO: 211029 - DNA, 2967 bp, synthetic construct
  misc_feature 1..2967: note = Description of Artificial Sequence: Synthetic coding sequence
  source 1..2967: mol_type = other DNA
atgcagatcctgcggtgcctgcagaagtgcggcaagctgaagatgatggctgttgtccgcacaagcctgcagaaggtggtggttctgctgcaccggctccaacggatggccgtgtccagcccgcgatatcagaagctctgcaaagatattcaggctgaaatcgatgcacacaatgatatctttaaatccatcgacggaaacagacagaaaatggtgaaagccttaggcaattcagaggaggcaactatgttgcagcaccgccttgacgacatgaatcagcgatggaatgacctcaaggccaagtccgcatctattcgggctcatctggaggcgtcagccgaaaaatggaaccggctcttgatgtcccttgaagagctaatcaagtggctgaatatgaaggatgaggaactgaaaaaacagatgcccattggaggagacgtgcctgctcttcagctgcaatacgatcactgcaaagcactgcgccgcgaactcaaggagaaggaatactcagtcttgaacgctgtcgatcaggccagggtgtttcttgccgaccagcccatcgaagcacccgaagagcctaggaggaacttacagtccaaaacggagctaactcccgaagagagggcccagaagatcgcaaaggccatgcggaaacagagttccgaagtgaaagaaaaatgggagtccctgaacgccgtgacttctaattggcagaagcaggtggataaagccctggaaaaactgcgcgatctccagggagctatggatgacctggacgctgacatgaaagaagccgaaagcgtaagaaacggctggaagcctgtaggcgatctgctgattgactccctgcaggatcacattgaaaaaatcatggcttttcgcgaggagatagcccccattaattttaaagtcaagacagtgaatgacctcagctctcagttgagcccactggatttgcacccctcgctaaaaatgtctcggcagctggacgacctcaacatgaggtggaagctgctgcaggtctctgtggacgaccgtcttaaacagctccaggaggctcacagggacttcgggccgagctcccagcattttctgagcaccagcgtccagctgccctggcaacgctcaatctctcataacaaggttccctactatatcaatcatcagactcagacgacgtgctgggatcaccccaaaatgactgagttgtttcaatctctcgccgatctgaacaatgtgcggttcagcgcctacaggactgctatcaaaatccgccgtctacagaaagcactctgtttggacctgctggagctgagcactaccaatgagatctttaagcagcacaaactcaatcagaacgatcaactactgagcgtaccagacgtgattaattgtctaaccactacttatgacggtcttgagcagatgcacaaggacctggtgaacgtacccttgtgcgttgacatgtgtcttaattggctgctaaatgtatacgataccgggcgaaccggcaaaatccgggtccagtctctgaaaatcggcctgatgtctctatctaagggcctgctagaggaaaagtatagatacctgttcaaagaggttgccggcccaaccgaaatgtgcgaccagaggcagctcgggctgttgctacacgatgctattcagatcccgagacaacttggggaggtggccgcttttggggggtccaatatcgagccatctgtgagaagttgttttcaacagaacaataacaagccagagatctccgttaaggaattcattgactggatgcatctagagccccagtcaatggtttggttgcccgtgctgcaccgggttgcagccgcagagacagccaaacaccaagccaagtgcaacatctgcaaagagtgtcccattgtggggtttcggtataggtccctgaaacactttaattatgatgtgtgtcagagctgtttctttagcggcaggaccgccaagggccacaaactgcactaccccatggtcgagtattgcatccccactactagcggggaagacgttagagattttaccaaggtcctgaagaacaaattccgatcaaagaaatactttgctaagcatccgcgcctcggatacctaccagtccaaactgtgctggagggtgataatctcgagacaccaattaccctaatttctatgtggccagaacactacgatcccagccagtcccctcagctgtttcacgacgacacacatagcagaatcgagcagtatgccacccggttggcccaaatggaaaggacaaatggatcattccttacagattcctcgtccaccacaggctcagtcgaggacgaacatgccctgatacagcagtactgtcagactctcggaggcgaatccccggtgtcccagccacagtcgcctgcccaaatcctgaagtctgtggagcgggaggagagaggagaactcgaacggattatcgcagacctggaggaggaacagagaaacttacaagtagaatatgaacaactgaaggatcagcatctccgccggggccttcctgttggatcaccccccgagtcaatcattagcccccaccacacctctgaggactctgaactgattgcagaagccaagctcttacgtcagcataagggaaggctggaggccaggatgcagatcctggaagaccataataaacagttggaatctcaacttcaccgtctgaggcagctccttgaacagccagagagcgattcacggattaatggggtgtcgccctgggcctccccccaacatagcgcactcagttactcacttgatcccgacgcctctggcccccagttccatcaggccgccggagaagatttgctcgctccacctcatgatacctccactgacctcactgaagtgatggagcagatccattctacgtttccaagctgctgccctaatgttccatctcggccccaggcgatgtag

SEQ ID NO: 211030 - DNA, 3069 bp, synthetic construct
  misc_feature 1..3069: note = Description of Artificial Sequence: Synthetic coding sequence
  source 1..3069: mol_type = other DNA
atggccaagtacggcgagcacgaggccagccccgacaacggccagaatgaattctccgacataatcaagagcaggtccgatgaacataacgacgtgcagaaaaagacattcacaaagtggatcaacgcccgtttctcgaagtcgggcaaacccccgatcaacgacatgttcactgacctcaaggacgggcgtaagctactggacttgctggagggtctgacaggcacgagcttacccaaagaaaggggaagtacccgggtccacgctctaaacaatgtgaatcgggtgttacaggtattgcatcagaataacgtcgagttggtgaatataggtggaactgacatcgtggacggaaatcacaaattgacactgggcctgctatggtctatcattctgcattggcaggtgaaagacgtgatgaaagatgttatgtcggacctacagcagactaattcagagaagatattactgtcctgggtcaggcagacaaccagaccatattcacaggtgaacgtcctaaacttcactacctcttggacagacggattggctttcaacgccgtgttgcaccggcacaagccagatctttttagctgggataaagtggtgaagatgtccccaatagaacgactggagcacgcgttctcaaaggcgcagacgtatctcggaatcgagaagctcctcgatcctgaggacgtagctgtgcaacttccagacaagaaaagtatcataatgtatctcacaagcctgttcgaggtcctcccccagcaggtgaccattgacgccataagggaggtagagaccctgccccgtaagtataagaaggagtgtgaggaggaggctatcaacatccagtccactgcaccggaggaggagcacgagagcccccgcgctgaaacgccatctactgtgactgaagtggacatggacctggattcctaccagatcgccttggaggaggtgctgacctggctgctgagcgcagaagacacatttcaggagcaggatgacatcagcgatgacgtggaagaggtaaaggatcagttcgcaacccacgaggcgttcatgatggaacttacagcccaccagagcagcgtcggatcagtcctgcaggccggcaaccagttaattacgcagggtacactgagtgatgaggaagagtttgagatccaggagcagatgactttgctgaacgcccggtgggaagctctgagggtggagtcaatggataggcagtcccggctgcatgacgtgctaatggagcttcaaaagaaacagctgcaacagctgtcagcttggctcaccctcacggaggagagaatccagaagatggagacctgcccgttagacgacgacgttaaaagcttacagaaattgctggaggagcacaaatctctgcaatccgatctcgaggccgaacaagtgaaggtgaactcgctaacccacatggtcgtgattgtggacgaaaacagcggagagagcgcaactgccatcttagaggaccagctgcagaaactaggggaacgctggacggcagtgtgcaggtggactgaggaaagatggaacaggctgcaggagattaacatactgtggcaagaactactggaagagcagtgtctcctcaaggcctggctgacggagaaggaggaagctctgaacaaagtacagacatctaacttcaaggaccagaaagaactctccgtcagcgtgcgcaggctagccatattaaaagaagatatggagatgaaaagacagacactcgatcagctcagtgagatcggccaggatgtcggacagttacttgataactctaaggcttccaagaagatcaatagtgacagcgaggagctgacccagcgctgggacagtctagtgcagcgccttgaagactcctctaatcaagtgacacaggcagtcgcaaagctaggcatgagccagataccacaaaaggacctcctcgaaacggttcgtgttagggaacaggctatcaccaagaaatcaaagcaggaactgcctcctccacctcctccaaaaaaaaggcagatccatgtggacattgaggctaagaaaaagttcgatgccatcagcgccgagttgctaaattggatcttgaaatggaagaccgcaattcagaccactgaaatcaaagagtacatgaaaatgcaggataccagcgagatgaagaaaaagctcaaggcactggagaaagaacaacgcgaacgcatccctagggccgacgagttaaatcaaaccgggcagattctcgttgaacagatgggtaaggaaggcctgcccaccgaggagattaaaaacgtccttgaaaaggtgtccagtgagtggaagaacgtctctcagcacctcgaagacctcgaaaggaagattcagctgcaagaggacattaatgcatacttcaaacagctcgacgagctggagaaggtgatcaaaactaaagaagagtgggtcaagcacacttccatcagcgagagctcaaggcaaagcctgccgtcacttaaagattcatgccagcgcgagctaactaatctgctgggactccatccaaagattgaaatggcccgggcttcttgttcagctctcatgtctcagcctagcgccccagacttcgtccagcgtggctttgactctttccttgggcgatatcaggcggttcaggaagcagttgaggacagacagcaacaccttgagaatgagctcaagggacagcctggccacgcctatttggagactctgaaaacacttaaggacgtgcttaacgattccgagaataaggcacaagtaagtctcaacgtcctgaatgacctggccaaggtggaaaaagcccttcaggaaaagaagactttagatgagatcctggagaatcagaagcccgccctgcataaactagcagaagaaactaaggctttggagaaaaacgtgcatccggacgtggaaaagctctataagcaggaatttgatgatgttcaaggaaagtggaacaagctgaaagtgctagtctcaaaggacttacatctgctagaggaaatcgctctaacactgagagcattcgagtag

SEQ ID NO: 211031 - DNA, 10302 bp, synthetic construct
  misc_feature 1..10302: note = Description of Artificial Sequence: Synthetic coding sequence
  source 1..10302: mol_type = other DNA
atggccaagtacggcgagcacgaggccagccccgacaacggccagaatgaatttagcgacatcatcaaatccagaagtgatgaacacaatgacgttcagaaaaagacgttcactaagtggattaatgctaggttttctaagtcaggcaagccgcccattaatgacatgttcaccgacctgaaagacgggagaaagttactggacttgcttgaaggactgacaggtacatccctgcctaaggagcgtggcagcaccagagttcatgccctaaacaatgtcaatagagtactgcaggtcctacaccagaacaatgtggaactagtcaatatcggagggactgatatagtggatggcaatcataaactgacactgggccttctctggagtatcattctccactggcaggtaaaagatgtgatgaaagatgtgatgagcgacctacaacagaccaactcagagaaaattcttctgtcttgggtgagacagactactaggccttactcccaggtgaatgttctcaatttcaccacttcttggaccgacggcttggcctttaacgctgtgcttcacaggcataagccagatttgttctcgtgggacaaggtcgtgaagatgagtccaattgagcgcctcgagcatgcattttctaaagcacagacttatttgggtattgaaaaacttttagaccctgaggatgtcgcagtgcagctcccggataagaaatctatcatcatgtacctcactagcttatttgaggtgctcccccagcaagtgacaatcgacgccattcgggaggtggaaactcttccaagaaaatataagaaggaatgcgaggaagaggccattaacatccaatccacagcgccggaggaagagcacgagagccctcgcgcagaaactccttcgacagtgacagaagtcgatatggatcttgattcgtaccagatagcccttgaggaggtactgacctggctgctgtctgcagaagacacctttcaggagcaagacgatatcagcgatgacgttgaagaagtgaaggaccagttcgccacacatgaagcatttatgatggaactaaccgcacatcagagctcagtaggcagcgtcctccaggcaggaaaccagcttatcacccagggtaccctcagcgatgaggaggagttcgaaatacaagaacagatgactctcctgaacgctagatgggaagcactgcgtgtagagtccatggaccggcagtcccgattacatgacgtgcttatggaacttcagaagaaacagcttcagcagttgagcgcatggctcacacttacagaagaacgcatccagaagatggaaacttgcccgcttgatgacgatgtaaagtccttgcagaagttgttagaagagcacaagtcactgcagtctgatctggaagcagagcaggttaaagtgaacagcctgacccatatggtcgtgatcgtagacgagaattccggtgaatctgccactgccatactggaggaccagctacagaagctgggcgaacgatggacagccgtgtgtcgctggaccgaggaaaggtggaataggttgcaggaaataaatattctgtggcaggagctgctggaggagcagtgtttgctcaaggcatggctgaccgaaaaggaggaagctctaaataaggtacaaactagcaatttcaaggatcagaaagagctctccgtgtcagtgcgcagactggcaatattgaaagaggatatggaaatgaaacggcaaactcttgatcagctgtccgaaattgggcaggacgtcgggcagctcctggacaactcaaaggcatctaaaaagattaattccgactcagaggagctgacccaacggtgggacagcctcgttcagaggttggaggacagctccaatcaagtcacccaggccgttgcaaagcttggcatgagccaaatcccccaaaaggatttgttggagaccgtgcgggttcgtgaacaggcaataactaaaaagtcaaagcaagaacttccgccaccccctcccccaaaaaagcggcagatccatgtggacatcgaagccaagaaaaaatttgatgccatcagcgcggaactgctgaattggatattgaaatggaagactgcgatccagaccaccgaaataaaagaatatatgaagatgcaggatacctcagagatgaaaaaaaagctaaaagcactggagaaagaacagagggagaggattccacgcgctgacgagctcaatcagacaggacagattctcgtcgaacagatggggaaggaaggtctgccaaccgaggagatcaaaaatgttttagaaaaagtgtcttcagagtggaaaaacgtctctcagcacctcgaagacctggaacggaaaatccagctgcaggaggatatcaatgcctattttaagcagctggacgaactggaaaaggtcataaagaccaaggaggagtgggtgaaacacacctccataagcgagtcctctcgacaatcactgccctcactcaaggactcctgccagcgcgaactcaccaatctactagggttacatcctaagattgagatggcacgcgcttcttgttcagcccttatgtcgcaaccctctgccccggactttgtccagcgtggttttgacagtttcttgggccgttatcaggccgtccaagaagcagtcgaagaccgacagcagcacctggagaacgagctgaaggggcagccgggtcatgcttatcttgagacactcaagaccttaaaggacgtgctgaatgactccgaaaataaggcgcaggtttctctcaacgtgttaaacgacttggccaaggtggaaaaggcactccaagagaaaaagaccttagatgagattcttgaaaatcagaagccggctctgcacaagctggcagaagagaccaaggcactggaaaagaatgtgcatcctgacgtggaaaaattgtataaacaggaattcgatgacgtgcaggggaaatggaacaaattgaaagtgctagtcagtaaggacctgcacttgctggaagaaatcgcgctgaccctgcgcgcctttgaggctgattctaccgtgattgagaaatggatggatggtgtgaaagatttcctcatgaaacagcaagccgcccagggggatgatgccgggcttcagcggcagctcgaccaatgcagcgccttcgtgaacgaaattgagacaattgagtcgtctcttaaaaacatgaaagaaattgaaacaaacctccgatcaggccccgtggctggtattaagacctgggtccagacaaggctgggggactatcaaacacagctggagaaactgtccaaagagattgcgacccagaagtctcgcttgtccgagtctcaggagaaagccgccaatctgaaaaaagaccttgccgagatgcaggaatggatgacccaggcagaggaagagtacctagagcgcgacttcgaatataagtcccccgaggagctggaatccgccgtggaagagatgaagcgcgcaaaagaggacgtgctgcaaaaagaggtccgcgtgaagatccttaaagataacatcaagctgctggcagccaaggtcccctctggaggccaggaacttacatcggagttgaacgtggttctggagaactatcaattactctgtaatagaattcgcgggaagtgccacactctagaggaggtgtggtcctgttggatcgagcttctacactacctggatctggaaacaacatggctgaacactctggaggagaggatgaagagtaccgaagtcctgcccgagaaaacagacgccgttaacgaggccctcgaaagtttggagtcagtgttgcgccaccccgcagacaacaggactcagatccgagagctcggccaaacactcatcgacggcggcatcctagatgatatcatcagcgaaaagttggaagctttcaacagccggtatgaggacctgtcacacctggcagaatctaagcagatctcactggagaaacagctgcaagtcctgcgggagaccgatcaaatgttgcaagtgcttcaagagagtttgggcgagttagacaagcagctgaccacgtacctgaccgatagaatcgacgccttccaggtaccccaggaagcccagaaaattcaagctgagatttccgcccatgaactgaccctggaggagttgcgacgaaatatgagatcacagcccttgaccagcccagagtctaggacagccagaggcggatcacagatggacgttctgcagcgaaaactgagggaggtgagtaccaagttccagctgttccagaaaccagcaaacttcgaacagcgaatgctggactgcaagagggtgctcgatggcgtcaaagcagagttgcatgtcctggatgtaaaagacgtggatcctgacgtgatccagactcatctggacaaatgcatgaaactctacaagactctgagtgaggtgaaactagaggtggaaaccgtcattaagaccggacggcacattgtgcagaagcagcagaccgacaatcccaaggggatggatgagcaattaacttccctgaaagtgctctacaacgacctaggcgcgcaggtgaccgaaggcaaacaggatctggaaagggcctcacagctggcaaggaagatgaaaaaagaggccgctagtcttagcgagtggctgtccgcaacagagaccgaactggtgcagaaatcaacatccgaaggtctgctgggcgacttggatacagagatatcatgggcaaaaaacgtcctcaaggatctggaaaaaagaaaagctgacttgaacacaatcacagaatcttctgctgctttacagaatctgatagaaggttctgaaccaattcttgaagagagactgtgcgtcctcaacgctggctggtcccgagtcagaacatggactgaagattggtgcaatacactgatgaatcaccaaaatcagctcgagatttttgacggcaatgttgctcacattagtacttggctataccaagctgaggcgctgttagatgagatcgaaaaaaagcccaccagtaagcaagaggaaatagtgaagaggttggtgtctgagctcgatgacgccaatttgcaggtggagaacgtccgtgaccaggcccttattctgatgaacgccaggggcagctctagccgcgagctggtcgagcccaagctggcagagctgaaccgaaacttcgagaaggttagccagcacattaagtcagcaaagctgttaattgcacaagaacctctctaccagtgccttgtcaccaccgagaccttcgagaccggcgtaccattcagcgatctagagaagcttgagaatgatatcgagaacatgctgaaatttgtggagaagcacctggagtctagtgacgaggatgagaaaatggacgaggagagcgcacagatcgaagaggtgcttcagcggggagaagagatgctgcaccaaccaatggaagacaacaaaaaagagaaaatcaggctgcagttacttttgcttcatacgcggtacaacaagattaaggcgatccctattcaacaacgcaagatggggcaactggcgtcaggaatccgctcctccctgctgcccacagattacctagtggaaataaacaaaatcctactgtgtatggatgacgtggaactgtctctcaatgtgcccgaactcaacacggccatttatgaagatttttcttttcaggaagattctctgaagaacatcaaggaccagttagacaaactaggagaacagattgctgtcattcacgagaaacaacccgacgttatcctggaagcctctgggccggaggctatacagatacgcgataccctgactcaattgaatgccaagtgggaccggataaatcgcatgtactcagatcgcaagggatgcttcgaccgagccatggaggagtggcgccagtttcactgcgaccttaacgatctcacccagtggattacggaggcagaagaactcttggtcgacacctgtgcaccgggtggttcgctcgacttggaaaaggctaggattcaccagcaggaactagaagtgggcatctccagtcaccaaccaagtttcgcagccttgaacagaacaggagacgggattgtgcagaagctttcccaggccgatggatcttttctaaaagagaaactagccggactgaaccagaggtgggatgctatagtggcagaggtgaaggaccgtcagccgagactcaagggggaaagcaagcaagtaatgaaatatcgccaccagctcgacgagattatttgctggctcactaaagcagagcatgcgatgcagaaacgcagtacgaccgaattaggtgagaatttgcaagagctgcgcgatctgacacaggagatggaagtgcatgcagaaaaactgaagtggctgaatcggacagaattagaaatgctgtcagacaagtcactgagtcttccagagagggataaaatctctgaatctttgaggacagtgaacatgacctggaacaaaatatgccgcgaggtgccaactaccctgaaggagtgtattcaggaaccatcatctgtgagtcagacaagaattgcagctcaccccaacgtccagaaggtcgtactggtgagctctgcctcagacatccccgtgcagtcccacaggacctcggaaataagtatacctgcagacctggacaaaaccatcaccgagctggcagattggctggtgctgattgaccaaatgttgaaaagcaatatcgtgaccgtgggcgatgtggaagagattaacaagaccgtctcccgtatgaagataaccaaggctgacctggagcagaggcatccgcagctagattatgtctttaccctagcccagaatctgaagaacaaggccagttccagcgatatgcggaccgcaataacagaaaaactggagcgggtcaagaatcagtgggacggtacacagcacggtgtggaactccgccagcagcagctcgaagatatgataatcgactcattacagtgggacgatcaccgggaagagactgaggagttgatgaggaaatacgaagccagactctatattctgcagcaggcaaggcgcgaccctctgacgaagcaaatttcggataatcagattcttttgcaggaactgggccctggtgacgggatcgtgatggccttcgataatgtgttacagaagctgcttgaggaatacggatctgatgatacacgtaatgtaaaggaaacgaccgaatatcttaaaaccagttggattaacctcaaacaatctatcgccgacagacagaatgctttagaagcggagtggagaactgtgcaggccagtagacgcgacctggagaattttctcaagtggatccaggaggccgaaactactgtcaacgtcctcgtagacgccagtcatagggagaacgctctgcaggattccatactggcccgggagcttaaacagcaaatgcaggatattcaggccgagatcgatgcccacaatgacatattcaaatctatcgacggcaaccggcaaaaaatggtcaaggccctcggaaactctgaggaagccacaatgcttcagcacaggcttgacgacatgaaccagcgctggaacgaccttaaggccaagagtgcttcaataagagcacacttggaagcctccgctgagaagtggaaccgacttctcatgagtttggaagagctgatcaagtggttgaacatgaaggacgaggaattgaagaagcagatgcccatcggaggtgacgtccctgctctgcaactccagtacgatcattgtaaggccctgcggcgggagcttaaagagaaggagtactcagttctgaatgctgtggaccaggctcgcgtttttctcgccgatcaaccaattgaagcacccgaagagcccaggagaaacctccaaagcaaaaccgaactgacccctgaggagagagcccagaagatcgcgaaggctatgcgcaaacagagttccgaggtaaaagagaagtgggaatctctcaacgccgtcacctctaattggcagaaacaggtggataaggccttagagaagctgcgcgatcttcagggcgctatggatgacctggatgctgatatgaaggaggctgaatcagttcggaatggctggaaacccgtcggcgacctccttattgatagtttacaagatcatattgagaaaatcatggcttttcgagaagagatcgccccaatcaacttcaaggtgaaaacagttaatgacctgtcctctcagctatctcccctggatctgcacccgtctttaaaaatgagtaggcagctggacgatttgaatatgagatggaaacttttacaggtatcagtggacgacagattgaagcagctgcaggaggcacatcgagattttggtcctagtagccagcacttcttaagtacttctgtgcagttgccatggcagcgatccatttcccacaacaaagtgccctattatataaaccaccagacccagacaacctgttgggatcatcccaaaatgaccgagctatttcagagtctcgccgacctgaataacgtgagatttagcgcatacagaaccgcaattaaaattcgtcggcttcaaaaggcactctgcttggatctgttagaactctccaccactaacgaaatcttcaaacagcataagctgaaccaaaacgaccaattgctctctgtgcccgacgtgatcaactgtctcactaccacttacgacggactcgagcagatgcataaagatctcgtgaacgtgcccctttgtgtcgatatgtgtctgaactggcttcttaatgtctatgacactggccgcactggaaaaatcagagtccagtccttgaaaatcggcctcatgtccctgagtaaaggcttattagaggaaaagtatcgctatcttttcaaagaggtcgcagggcccaccgagatgtgcgaccagcgccagcttgggctactgttgcacgacgccattcagattccacgccagctaggagaagtagccgcatttggaggctctaatatcgaaccatcagtccgctcttgcttccagcaaaataacaataagcctgaaatctccgtaaaagagtttattgactggatgcatttagagccgcagtccatggtatggttacctgtcctccatcgagttgcagcagctgaaaccgccaagcaccaggccaaatgcaatatttgtaaagaatgtcctatcgttggattcaggtacaggagcttgaaacatttcaattacgatgtgtgtcagtcttgttttttctctggaagaaccgccaagggccacaaactgcactatcctatggttgagtattgcatacctacaaccagcggcgaagacgtgcgagacttcacaaaagtcctgaagaacaagttcaggagtaagaagtattttgccaagcacccccgcctgggctacctgcccgttcagacagtcttagagggcgataacttggagactcctattaccctcatctctatgtggcccgagcactatgacccatcacagagcccacaactgttccatgatgacacgcattcacggatcgagcaatatgcaaccaggctcgcccaaatggaacgtactaatggctccttcctcacggattcctcaagcaccaccggctcagttgaggacgagcacgctctgatacaacaatattgtcagacgctcggaggtgagtctcccgtgagccagccccagtcgcccgctcagatcctgaagtctgttgagagggaggagcggggggagttggagaggatcatcgccgacctagaggaagagcaacgaaacttgcaggtcgagtatgagcagcttaaggatcaacacctgcgccggggactacctgttggaagtcccccagagtcgattatctcccctcaccatacttctgaagatagtgagctcattgctgaagcaaagctcctgcgccagcataagggccgtcttgaggcaaggatgcaaatcctggaagaccacaacaagcagctggaaagccagttgcataggctgcggcagctgctcgaacaaccagagagcgactcgcgcataaacggagtcagcccctgggcatccccacagcatagcgctctctcttactcattagaccctgatgctagcggcccccagtttcatcaagccgcaggtgaggacctgctggccccgccccacgatacttcaaccgatctgaccgaggtgatggagcagatccattccacttttccctcatgctgtccaaacgtgccctcacgcccccaggccatgtag

SEQ ID NO: 211032 - DNA, 555 bp, synthetic construct
  misc_feature 1..555: note = Description of Artificial Sequence: Synthetic coding sequence
  source 1..555: mol_type = other DNA
atgcacctggagccccagagcatggtgtggctgcccgtgctgcaccgagtggctgcagctgagactgccaagcaccaggctaagtgcaacatttgcaaggaatgccccattgtgggattccggtaccgctctctaaaacatttcaattacgacgtgtgccagtcctgttttttctctggtaggactgccaagggccataagctgcattatccaatggttgaatactgtatccctacaacctcgggtgaggacgttcgagactttaccaaagtgttaaagaacaaattcagatccaagaaatactttgctaagcaccctcgacttggatacttgcccgtacagacagtcctggagggcgacaaccttgaaacaccaagccagagcccccaacttttccatgatgatacgcactctcggatcgaacaatatgccacccgactggcgcaaatggaaagaaccaatggctctttcctgaccgattcttcttccaccacaggctccgttgaagatgagcatgctctcattcagcagtattgtcaaacactaggcgggtag

SEQ ID NO: 211033 - DNA, 462 bp, synthetic construct
  misc_feature 1..462: note = Description of Artificial Sequence: Synthetic coding sequence
  source 1..462: mol_type = other DNA
atgagcggcctggccgccaccaccttccactggaagaagtgccggctggatctgccagggcacgtggctctccaggcatgcaaacgtctaccagacgagcataacgatgtgcaaaaaaagacatttaccaaatggataaacgcaagattctctaaatcaggcaaaccgccgattaacgacatgttcacagatctgaaagatggaagaaagctgctagatttgcttgaagggctgacagggacatctctgcctaaggaaagaggatccaccagggtccacgcactgaataacgtgaatcgagtgctgcaggtactccatcagaataacgtggaacttgtgaatatcggaggaacggatatcgtggatggaaaccacaaactcaccctcgggctcctgtggagtatcatactccattggcaggttgacgttatgaaggatgttatgtccgatcttcagcagtag

SEQ ID NO: 211034 - DNA, 546 bp, synthetic construct
  misc_feature 1..546: note = Description of Artificial Sequence: Synthetic coding sequence
  source 1..546: mol_type = other DNA
atgcacctggagccccagagcatggtgtggctgcccgtgctgcaccgcgttgcagcagccgagacagccaaacaccaggccaaatgtaacatctgtaaggaatgtcccattgtgggttttagatacaggtcacttaaacatttcaactatgatgtgtgccagtcctgcttctttagcggaaggaccgctaagggacacaagttgcattaccctatggtcgagtattgcattcctactacaagtggcgaggacgtgagagatttcacaaaggtcctaaaaaacaaattcagaagcaagaagtattttgctaaacaccctaggctcggatatctccctgtacagaccgtgctagagggagataacctcgagactcccattacactgatcagtatgtggcctgagcattacgacccctcccagtccccccagttgttccatgatgacacgcattcaaggatcgagcagtacgccaccaggctcgcacagatggagcggacgaatggttcctttctgacagacagctctagcactaccggatctgtctag

SEQ ID NO: 211035 - DNA, 144 bp, synthetic construct
  misc_feature 1..144: note = Description of Artificial Sequence: Synthetic coding sequence
  source 1..144: mol_type = other DNA
atggccaagtacggcgagcacgaggccagccccgacaacggccagaacgaatttagtgatattattaagtcaaggtccgatgaacacaacgacgtgcagaaaaagaccttcactaagtggattaatgctcgcttcagcaaatag

SEQ ID NO: 211036 - DNA, 561 bp, synthetic construct
  misc_feature 1..561: note = Description of Artificial Sequence: Synthetic coding sequence
  source 1..561: mol_type = other DNA
atgctggaggaggaggagtggtaccggagcctgaagcacttcaactatgacgtttgccagagctgtttcttttcagggcggactgctaagggccacaaactccactatcctatggttgagtattgtatccctaccacctcaggagaggacgttagggactttaccaaggtgctgaagaacaagttccggagtaaaaaatatttcgcaaagcacccaaggctaggttacctgccggtgcagacagtgctggagggagataatttggagactcccagtcagtctccccagctattccacgatgatacacacagccgcattgagcagtatgccactcggttggctcaaatggaaagaaccaatggatcctttctaaccgactcaagctccaccacgggctcagtggaagacgagcacgccctaatccagcagtattgccagacgttgggcggtgagtctccagtctcacagcctcagtctccagctcagatcctcaagagtgtggaacgagaagaaaggggtgaactagagaggatcatcgcagatctcgaagaggaacaatag

SEQ ID NO: 211037 - DNA, 201 bp, synthetic construct
  misc_feature 1..201: note = Description of Artificial Sequence: Synthetic coding sequence
  source 1..201: mol_type = other DNA
atgatcggcctgaacttcaacctgcgggagctgctgaccaagttcgaaaaggatatacaggcggaaatcgatgcacacaatgatatctttaaatcaatcgatgggaaccgccagaagatggtcaaggccctcggcaattcagaggaggcaacaatgttacagcacaggctcgatgacatgaaccagaggtggaatgattag

SEQ ID NO: 211038 - DNA, 555 bp, synthetic construct
  misc_feature 1..555: note = Description of Artificial Sequence: Synthetic coding sequence
  source 1..555: mol_type = other DNA
atgcacctggagccccagagcatggtgtggctgcccgtgctgcaccgcgttgctgctgccgagacagctaagcatcaagccaagtgtaatatttgtaaggagtgcccaatcgtgggcttcaggtaccgatccctgaagcacttcaattacgacgtctgccagagttgtttttttagcggtcgaaccgccaagggccacaagctgcactaccctatggtcgagtattgcattcctactacttccggggaggacgtccgggattttactaaagtcctgaagaataagttccgaagcaagaagtacttcgccaaacatcccagacttgggtacctccctgtccagactgtgcttgaaggtgacaatctggaaactcccagccagagcccacagttgttccacgatgatacccattcaagaattgagcaatatgctacccgattagcacagatggaacgaaccaacggttcattcttgacagactcttcttccacaacaggttccgtagaggatgaacacgcactgattcagcagtactgccaaacactgggggggtag

SEQ ID NO: 211039 - DNA, 2100 bp, synthetic construct
  misc_feature 1..2100: note = Description of Artificial Sequence: Synthetic coding sequence
  source 1..2100: mol_type = other DNA
atgagcgccagcgccagcgtgggcggccccgtgccccagcccccccccggccccgccgcagccctaccgcctggatctgcagctagagccctccacgtagagttgcctagccagcagagacggttgaggcatctccgcaatatcgcagcccggaacatagtgaaccggaacggccaccagttgcttgatacctacttcacgctccacttgtgttccacagagaaaatatacaaggagttctataggtctgaagtgatcaaaaattccctgaacccaacctggcggtcacttgactttggcatcatgccggacagacttgatacgagcgtgagctgctttgtggtgaaaatctggggtgggaaagaaaacatttatcaattgctgattgagtggaaggtgtgtctagacgggctgaagtatctggggcagcaaattcacgccaggaatcagaacgagatcatttttggactgaacgacgggtactacggagcccccttcgagcacaaagggtatagcaatgctcaaaagaccattctgcttcaggtagatcagaactgcgtaagaaattcttacgatgttttctcactgcttcgtctccaccgggcccagtgcgccattaagcaaactcaggtgaccgtgcagaagattggtaaggagattgaggaaaagctccgtttaacttcaacatctaatgagctaaaaaagaagagtgaatgtctgcagcttaaaattctggtgctccagaacgagctcgaaaggcagaaaaaagctttgggccgcgaggttgcattactgcacaaacagcagatcgccctgcaggataagggcagcgccttcagtgctgaacatttgaagctgcagcttcagaaagagtcgctgaatgaacttagaaaagagtgtacagctaagagagaactcttcctgaagaccaacgctcaactcacgatcaggtgccgccagctgttgtcggagctgagttatatttatcccatcgacctgaacgagcacaaggactatttcgtgtgcggcgtgaagctgccaaattctgaagacttccaggctaaagatgatgggagcatcgccgtcgctctcggttatactgcacacttagtgagtatgatttcttttttcctgcaggttcccttgcgatatcctatcatccacaagggatcgcgctccacgatcaaggacaatatcaacgacaagctcacagaaaaagagcgtgagttcccactgtatcctaagggaggcgagaagctacagttcgactatggtgtgtacttacttaacaagaacatagcacagctgcgatatcagcacggacttggaacacctgacttgcggcagaccttgcccaacctgaagaacttcatggaacatggcctcatggtccggtgcgacaggcaccacacgtcatcggccatcccggtgccaaagagacagtcctccatttttggtggggccgatgttggattttcgggcgggatcccttctcctgataaggggcataggaaaagagccagttctgaaaatgagcgcctgcagtacaagacacctccaccctcctacaattcggccttggcacagccggtcacaacagtgccaagcatgggagagaccgaacgaaaaatcacctccctcagttcatcactagatacctcacttgatttcagcaaagagaacaagaaaaagggggaggacctcgttgggtccttgaacggaggccatgccaatgtgcatccatcccaggagcagggggaggcattgtccggacatcgggccaccgtgaatgggactctgctcccctcagaacaggccggctcggccagcgtccagctgcccggcgaatttcatcccgtgtctgaggctgaactgtgctgcaccgtggaacaggctgaagagatcatcggcctggaggccacgggcttcgcctcaggcgatcaacttgaagcttttaactgcatccccgttgattctgctgtggctgtggagtgcgacgagcaggtcctgggagagttcgaggagttcagccgccgtatttacgcacttaacgaaaacgtcagtagctttcgccgaccccggaggtcttccgacaagtag

SEQ ID NO: 211040 - DNA, 768 bp, synthetic construct
  misc_feature 1..768: note = Description of Artificial Sequence: Synthetic coding sequence
  source 1..768: mol_type = other DNA
atgttcatcagcgtggcccagcggcagcgggagaacgccttcagctgctcgacctttttgaggtgcgaccgccaccacacgtcatctgcaattcccgttcccaaacggcagtcttctatttttggtggcgccgacgtgggattttctggtgggattccttccccagacaaagggcaccgcaaacgagcgtcctcagaaaatgagagactgcagtacaaaacacctcccccttcctataatagcgctttagcacagccggtcaccactgttccatcgatgggcgagactgagagaaagatcacttcactttcttcaagcctggacacaagcctagacttctcaaaggagaacaaaaagaagggcgaagacttggtggggtctttgaatgggggccatgctaatgtgcacccatctcaagagcagggagaagccctgagcggtcatcgggccaccgtcaacggcactctgcttcctagtgagcaggctggatctgcaagcgttcagctcccaggggagttccacccagtttccgaagccgagttgtgctgtaccgtagaacaagcggaagaaattatcgggctggaggcgacaggctttgcttctggtgaccagctggaagcgttcaactgcattccagttgatagtgctgttgcagtcgagtgtgacgagcaggtgttgggggagtttgaagaattctccagacgaatctacgcgttgaacgaaaatgtgtcttcatttcgccggccgcgaaggtctagcgataaatag

SEQ ID NO: 211041 - DNA, 984 bp, synthetic construct
  misc_feature 1..984: note = Description of Artificial Sequence: Synthetic coding sequence
  source 1..984: mol_type = other DNA
atgatcagcttcttcctgcaggtgcccctgcggtaccccatcatccataaaggcagccggtctacaattaaggacaatattaacgataaacttactgagaaagaaagagaattccccctgtaccctaaaggcggtgagaagctgcagttcgattacggcgtttaccttctcaacaagaacattgcccagctgcgataccaacatggtctggggacccccgatcttaggcagactctgcccaacttgaaaaactttatggaacacggtctgatggtgcggtgcgacagacaccacacgagttcagccatacctgtccctaaacgccaatcaagcatatttgggggcgctgatgtcgggttcagcggagggatccctagtcctgataaagggcaccgcaagagggcgagcagcgagaacgaacgcctccagtataagaccccaccaccctcatacaacagcgctttggcacagcccgtgacaaccgtgccttctatgggagagaccgaacgcaaaatcacatcccttagctcctctctggacacaagtctcgattttagtaaagaaaacaaaaaaaagggggaggatctagtaggctcactcaacggtggtcacgcaaacgtgcaccccagccaggagcaaggtgaagctctcagtggacacagagccacagttaacggcacacttctgcctagtgaacaggctggttctgccagcgttcaacttccaggtgagttccaccccgtctccgaggcagagctctgttgcacagtcgagcaagctgaggaaattattgggttggaagcgactggattcgcctcaggtgaccagcttgaagctttcaattgcattcccgtcgattctgcggtggccgtcgaatgcgacgaacaggtactcggtgaatttgaggagttctcgagacgtatctacgctctcaacgagaacgtcagcagtttccggaggccgcgtaggagctcagacaaatag

SEQ ID NO: 211042 - DNA, 4251 bp, synthetic construct
  misc_feature 1..4251: note = Description of Artificial Sequence: Synthetic coding sequence
  source 1..4251: mol_type = other DNA
atgaagagcctgaagagccggctgcggcggcaggacgtgcccggccctgccagtagtggagcagcggcagccagcgcgcatgccgctgattggaacaaatatgatgacaggctgatgaaggcagcagaacgcggcgacgtggaaaaagtgacgagtatcctggctaaaaagggcgtgaatccaggtaagctggatgtggaggggagaagtgttttccacgttgtcactagtaaaggcaacctcgaatgtctgaacgccattctgatacacggcgtggatattacaacatctgatactgcaggccgtaatgccctccatctcgccgctaaatacggacatgcactttgtctgcaaaagttgctccagtataattgtcccacagagcatgcggatctgcaaggaaggaccgctctgcatgatgctgctatggcagactgtccatccagtatccagctgctgtgcgaccacggcgcaagcgtcaatgctaaagacgtggacggacggaccccactggtactcgccactcagatgtctagacctacaatttgtcagctcctgatcgatcgcggtgcagacgtgaacagccgcgacaagcaaaacaggactgcgcttatgctaggctgtgagtacggctgtagggatgccgtggaagttctaattaagaatggcgcggatatttccctgcttgacgctttgggacatgattctagctactatgcgcggatcggggataatctggacatattgacgttgctgaagactgccagtgaaaacacaaacaagggcagagaactttggaaaaaagggccaagcctccaacagagaaacctcacacacatgcaggacgaagtcaacgtcaaatctcatcaaagggaacatcaaaatatacaggacctggaaattgaaaacgaagatcttaaagagagacttcgtaagattcaacaggagcagaggattcttctggacaaagtcaacgggctccagctccagctgaatgaggaggttatggtggcagatgacctcgagagcgaacgcgagaagcttaaaagcctgctggcagccaaggagaagcaacatgaggagagcctgagaacaattgaagccctaaagaatagatttaaatacttcgagtccgaccaccttggtagcgggtcccatttttctaacaggaaagaggacatgttactgaagcaagggcagatgtacatggcggatagtcagtgtacatcgccaggaataccagcgcacatgcagagccgttcaatgttgagaccattagaactttctttgcctagtcaaacctcttacagcgagaatgagattttgaagaaggaattggaggcgatgcgaaccttctgcgagtccgccaagcaggatagactgaaactgcagaatgagctggctcacaaagtagctgaatgcaaagctctggctctggaatgcgaacgcgtcaaggaagattccgatgaacagatcaaacagctcgaagatgccttgaaagacgttcagaagaggatgtacgaatcggaagggaaggtcaagcagatgcagactcactttcttgcgcttaaagaacacctcacttccgaggctgcatctggaaatcatcgtctgacggaggaactgaaggaccagctgaaggaccttaaagtgaagtacgaaggcgcaagcgcggaggtaggaaaactgcgcaatcagataaagcagaacgaaatgattgtggaggaatttaaacgggacgagggcaagctcattgaggaaaataaaagactgcaaaaagagctgagtatgtgtgagatggagcgagagaaaaaagggcggaaggtaaccgagatggaggggcaggccaaagagctgagtgccaagctcgctttgtctattccagcggagaagtttgagaacatgaaatcctccctttcaaacgaagttaatgaaaaggccaaaaaactggttgaaatggaacgggagcacgaaaagagcctctccgaaattcggcaactgaagcgcgagctggaaaacgttaaagcgaaattggcacaacatgtaaaaccagaagagcacgaacaagtgaaaagtcgcttggaacagaagtcaggtgaactgggaaagaagatcacggaactgactctcaaaaatcagaccttacagaaggagattgagaaagtgtatttggataacaagctactcaaggaacaggcccacaatttaactatagagatgaaaaatcattatgtgcctctgaaagttagcgaggacatgaagaagagtcatgacgcgatcatagacgatttaaaccggaaactgctcgatgtgacccaaaagtatacagagaaaaagctggaaatggagaagctgcttctggaaaatgattctctgtcaaaggacgtgtcccggctggagacagtgttcgttcctccagaaaaacacgagaaggaaatcatcgccctcaagagcaatatcgtcgagctaaaaaagcagctctccgagctcaaaaaaaaatgcggtgaagatcaggagaagattcatgcgttaacaagcgaaaacaccaatctcaaaaagatgatgagcaaccaatatgttcccgtcaaaacacatgaagaagtgaagatgacactaaatgatacattggccaaaacgaaccgcgaattacttgacgtgaaaaagaaattcgaagatattaaccaagaattcgtcaaaatcaaggataagaacgagatcctgaagaggaacctcgagaacacacagaaccagattaaggctgagtacatcagcctggccgagcatgaggcaaagatgagctcactgtcacagtccatgcggaaagtccaggactccaacgctgaaatcctcgcaaactatcgcaagggccaagaggagatagttaccctccacgccgagatcaaggctcagaaaaaggagctagatacaatacaggagtgtatcaaggtcaagtacgcaccaatagtgagctttgaagagtgtgaacggaaatttaaagccactgagaaggagctcaaagaccagctcagtgagcagacacaaaagtactctgtgtctgaggaagaggtcaaaaagaataagcaggaaaacgataaactcaaaaaggagatttttacgttacagaaagacctgcgagataagactgtactaattgagaagtcccatgaaatggaaagagctctctccagaaaaacggatgagctgaacaaacagttgaaagatttgagtcagaaatatacagaggttaagaatgttaaagaaaaactggtagaggagaacgctaagcagacctccgaaattctggccgtgcaaaaccttcttcagaaacagcacgttcctctggagcaagttgaggccttgaagaagagtctcaacggtactattgaaaatttgaaggaagagctcaagtcgatgcaacggtgttatgagaaagaacagcagaccgtaaccaagctgcatcagctcctggagaatcagaagaatagctccgtgcctctcgctgagcacctgcaaattaaggaggcattcgagaaagaagtaggtattattaaggctagcttgcgtgaaaaggaggaggagtcacagaataagatggaggaggtcagtaagctgcagtcggaggtgcaaaacaccaagcaggccttaaagaaactggagacacgggaagtcgtggacttgagcaaatataaagctaccaaatctgacttggaaacgcagatctcttcactcaatgaaaagctggcgaatttaaatagaaagtacgaggaggtgtgtgaagaggtgttacacgctaaaaaaaaggagatctccgccaaagatgagaaagaactgctccacttctccatcgagcaggaaatcaaggaccaaaaggagcgctgcgacaagagcctgacaactataacagagctccagagaaggatacaggagagcgctaagcagatcgaggcgaaggataacaagatcacagagctcctcaacgacgtggaacggctgaagcaggccctgaacggactgtcccagctcacctatacaagcggcaaccctaccaagcgacagagtcagctgatagacaccctccagcaccaggtcaagagtctggaacagcagttggcagacgccgaccgacagcaccaggaggtgatcgcgatttacagaacacatctcctgtccgcagcacaggggcatatggatgaggacgtgcaggaggccttactgcagataatacagatgagacagggcttggtatgctag

SEQ ID NO: 211043 - DNA, 4212 bp, synthetic construct
  misc_feature 1..4212: note = Description of Artificial Sequence: Synthetic coding sequence
  source 1..4212: mol_type = other DNA
atgatgaactgctggttcagctgcacccccaagaaccggcacgccgcggattggaacaagtatgacgataggctaatgaaggccgccgaacgaggcgatgtggaaaaggtaacttctatactggctaagaagggcgtgaatccaggcaagcttgacgtggaggggcgatcggtgttccacgttgtgaccagcaagggaaacctcgaatgcctcaacgcaatactgatccacggggtcgatatcaccacatccgataccgccgggaggaacgcactgcacctggctgccaagtacggccacgcgctgtgcctgcagaagctcctgcagtacaactgccctaccgaacacgctgatctccaaggacgcaccgctcttcatgatgccgccatggcagactgccccagttcaatccaattgctgtgtgaccatggcgcttctgtaaatgccaaggatgtagacgggcggacaccattagtccttgccacacagatgagtcgccctaccatttgtcagctgctgatcgatcggggggcagacgtgaatagcagggacaaacaaaatcggacggcgctcatgttgggctgtgaatatgggtgcagagatgcagttgaggtgttgattaagaatggagccgacatcagcctccttgacgctctgggacacgattcttcctactatgcccgtatcggggacaacctggacattctgacactgcttaagaccgcttccgagaatacgaacaaggggcgcgagctttggaagaagggcccttctttgcagcagcggaacctgacccatatgcaggacgaagttaacgttaaaagccaccaaagagaacaccagaatatccaagacctggaaatcgagaatgaagacctgaaggagcgactgaggaaaattcaacaggagcagcggatccttctcgataaggtcaatggtctccagctgcagttgaacgaagaggtgatggtggctgatgacctggaatcagaaagagagaagctcaaatctttacttgccgccaaggaaaaacagcacgaagagtcactaagaaccatcgaggctctaaagaatcggtttaagtactttgagagcgatcatctgggcagtggaagccatttttccaaccggaaagaagatatgctgctcaaacaaggacaaatgtacatggccgattctcagtgcaccagccctggcattccggcgcatatgcaaagcaggtcaatgctgcgtccgctggagctgagcttaccctcccagacctcatactccgaaaacgagatcctgaaaaaagagctggaggcaatgaggaccttctgcgagtccgcgaaacaagatagactgaaactgcagaatgagctcgcacataaggtggctgagtgtaaggctctggccttggaatgcgagagagttaaggaagactctgacgagcagataaaacagttagaggatgccctgaaggacgttcaaaagagaatgtacgagtcagaggggaaggtcaaacaaatgcagacacacttcctcgcactcaaggagcacctgactagtgaggctgctagcggcaatcatcggctgacagaggaattgaaggaccaattgaaggatctgaaggttaaatacgagggtgcctctgcagaagtggggaaactccgcaatcagattaagcagaatgaaatgattgtggaagagttcaagcgcgatgaagggaagctcatcgaagaaaacaagagattacaaaaggagctctcaatgtgtgagatggaacgagagaagaagggccggaaagtgactgagatggaaggtcaggctaaagaactgtccgccaaattggctctttcgattcccgccgagaagtttgagaacatgaagtcctctctctcaaatgaagttaatgagaaagccaaaaagctggtggaaatggaacgcgagcacgagaagagtctgagcgaaataaggcagctgaagcgggaattagaaaatgtcaaggctaagctggcccagcatgtaaaacctgaggaacacgaacaggtcaagagcagattagagcaaaagtcaggagagcttggcaagaaaatcacggagctgacgctcaagaatcagacattgcaaaaggagatcgagaaagtgtacctagacaataagctgttaaaggaacaggcacacaatctgacgattgaaatgaagaaccactacgttccgcttaaagtctcagaggatatgaagaaatcccacgatgccattattgatgacctaaatcgcaagctgctggacgtgactcagaagtacacggaaaaaaaactagagatggaaaagctcctgctggagaacgattcgctgtccaaggacgtctcacgcttggagactgttttcgtgcccccagaaaaacacgagaaggagatcatcgccctgaagtcaaacattgtagaactgaagaaacagctatccgaattaaagaaaaagtgtggtgaagaccaagaaaaaattcacgccctgacaagtgaaaataccaatttgaagaaaatgatgagcaatcagtatgtgccagtcaagacccatgaggaagttaaaatgacattaaacgatacattagctaaaacaaatcgggagcttcttgacgtgaagaagaagttcgaagatattaatcaggagttcgtgaaaatcaaagacaagaacgagattctgaaacggaacctggagaacacccagaatcagatcaaggccgagtacatctcactcgctgaacatgaggctaagatgtcttcgttgagtcagtctatgaggaaggtccaggacagcaacgccgaaattctggcaaattataggaaaggacaggaggaaattgtgacactgcatgcagaaataaaagcacagaagaaggaacttgacaccatccaggagtgcattaaggttaagtacgcccctatagtgagttttgaggagtgcgaaagaaaatttaaagctaccgagaaggaactgaaagaccagctcagtgagcagacccagaagtatagcgtttccgaagaggaagtgaagaagaataagcaggagaatgacaagttaaaaaaggaaatttttaccttgcagaaggatctgagagacaagactgtgctcatcgaaaaatcacacgagatggaaagagcgttatctcggaagacagacgagctgaataaacagctcaaggacctcagccagaaatacacagaagttaaaaatgtgaaagaaaaattggtggaagagaatgccaagcaaacaagtgagatactggcagtgcagaatctattgcagaaacagcatgttcccctggagcaggtcgaggcattaaagaagtccctaaatggcacgatagaaaatttgaaagaggagctaaaatctatgcagagatgctacgagaaagagcagcagaccgtcaccaaactgcatcagctcctggagaaccagaagaatagttcggtgcccctggcagaacaccttcaaatcaaggaggcttttgaaaaagaagtggggattattaaggcctcacttcgcgaaaaagaagaggagtcccagaataagatggaggaggtgtccaaactacagtctgaggtgcagaatacaaagcaggctttgaagaagttagaaaccagggaagtggtcgatctgagcaagtataaggcgacaaagagcgacctagaaacacaaattagctcgttgaacgagaagctggccaacctcaatcgaaaatatgaggaggtgtgcgaagaagttctgcacgctaagaaaaaggaaatcagcgccaaggatgaaaaagagctcttgcacttctccattgaacaggaaatcaaggatcaaaaggagagatgcgataaatctctgacaactatcaccgagctgcagcggcgcatccaagagagcgcaaaacagatcgaagccaaagacaataaaatcaccgagctcctgaacgatgtcgagcggctcaaacaagcactgaatggcctgagccagttgacgtatacttcagggaatcctacgaagcggcagagccaactcattgacaccctccagcaccaggtgaaatctctggagcagcagctggccgacgctgatcgccagcatcaggaagtgattgcaatctatagaactcaccttctgtccgccgctcaaggacacatggatgaagacgttcaagaggctttgctccagatcatccaaatgcggcagggtttagtgtgctag

SEQ ID NO: 211044 - DNA, 1686 bp, synthetic construct
  misc_feature 1..1686: note = Description of Artificial Sequence: Synthetic coding sequence
  source 1..1686: mol_type = other DNA
atgatgaactgctggttcagctgcacccccaagaaccggcacgccgccgactggaacaaatatgacgataggctaatgaaagccgctgagaggggcgacgtggagaaagtgacaagtatcttggcaaagaagggcgtgaaccctggtaaattagatgtcgaaggacgatcggtctttcacgtggtaacttccaaaggcaatttggaatgcctaaacgcaatcctgatccacggtgttgacattacgacctccgacacagccggcaggaacgcccttcatctcgcagccaagtatggacatgccctgtgcctgcaaaaactactgcagtacaactgccccaccgagcatgcagacctgcagggacgcactgccctgcacgatgcggccatggcagactgtccgagcagcattcaacttctgtgtgaccatggcgctagtgtgaacgccaaggatgtggatggacggacacctctggtactggccacccagatgagtcgtcctaccatatgtcagcttctcattgaccgcggagcggacgtcaatagtagggacaagcagaatcggaccgccctcatgcttggatgcgagtatggttgcagggacgccgtagaggtcctgatcaagaatggcgctgatattagtctgctggacgccctcgggcatgactcatcatactacgcgcggatcggggataatctcgatatcctaaccctcctgaagacagcctctgagaatacaaataaaggccgcgaactgtggaagaaaggcccgagcctgcaacaacgtaacctgactcacatgcaggatgaagtgaatgttaaaagtcaccagcgcgagcaccagaacattcaagacctggagatcgagaatgaggatttgaaggagaggctgcggaaaattcagcaggaacagaggatcctgctagataaggtcaacgggttgcaacttcagctaaatgagagagagaagctgaaaagtttgctggccgcgaaagagaaacaacacgaagaatctctgagaaccatcgaggctctgaaaaacaggttcaagtacttcgagtcagaccatcttggaagcggatcccattttagcaatagaaaggaagatatgctcctaaaacagggccaaatgtatatggccgatagccaatgtacgtctccaggaattcccgcacatatgcagagcaggtctatgctgaggcccctcgagctgagcctgccctcacagacttcctatagcgaaaacgagatcctcaagaaggagctggaagccatgcggacgttctgcgaatccgcaaagcaggatagactgaaactccaaaacgaattagctcacaaagtggcggagtgcaaagcactggccctggagtgcgaacgagtgaaggaggactccgacgagcagatcaagcaattggaagatgcactcaaggatgtgcagaaacgcatgtacgaaagcgaaggcaaagttaaacagatgcagacccattttttggcgctgaaagagcatctaaccagcgaagccgcctccggcaatcatagactgacagaggaactgaaagaccagttgaaagacctcaaggtgaagtacgagggtgcctcagctgaggtaggaaaattgcgcaatcagatcaaacaaaatgagatgattgttgaggagttcaagagggatgagggtaaactaatctag

SEQ ID NO: 211045 - DNA, 4206 bp, synthetic construct
  misc_feature 1..4206: note = Description of Artificial Sequence: Synthetic coding sequence
  source 1..4206: mol_type = other DNA
atgatgaactgctggttcagctgcacccccaagaaccggcacgccgcagactggaacaagtatgatgacagactgatgaaagccgccgaacgaggcgacgtagagaaagtcacctccatcctggccaaaaagggcgttaatcctggcaaacttgatgtggagggacgtagtgtgttccacgttgtgacaagcaaggggaatctagagtgtctgaatgctatcctgattcatggcgtcgacattactactagtgataccgcaggcaggaatgctctgcaccttgcagccaaatacggccacgccctgtgccttcaaaaattattacagtacaattgtcctacagagcatgcagacctgcaggggcgtacagctctgcatgatgccgcaatggcggattgtccctcctccatacaactgctgtgcgatcacggagcgtcggtgaacgcaaaagacgtcgacggacggacacctctggtattggcaacccaaatgtcgcgccccacaatatgccagctgctgatcgaccggggagccgatgttaactcacgtgataagcaaaaccggacagccctcatgctgggatgtgagtacggctgtcgagacgcagtggaagtgctgatcaagaatggcgccgatatttcactgctggacgcattaggccacgacagctcatattatgcacgcatcggagacaatctcgacatactgaccctgctgaagactgcaagcgagaatacaaacaagggtagagaactgtggaaaaaagggccatccctgcagcaacggaacctgacccacatgcaggacgaggtgaatgtcaaatctcaccagcgtgaacaccaaaatatccaggatctggaaatcgaaaatgaggacctcaaagaacggcttcgtaaaatacaacaagagcagaggatcctgctggacaaggtcaacgggttgcagttacagctgaatgaggaagtgatggtcgcagatgatctcgagtcagagcgggaaaaattgaaatccttgctggccgcaaaagagaaacagcatgaagagtctttgagaacgatagaggcgcttaagaatcgcttcaaatattttgaaagcgaccacctggggtccggttcccattttaggaaggaagatatgctcctgaaacagggacagatgtatatggcagactcccagtgcacatccccaggaatacccgcacacatgcagtccagatccatgctgcggccgctggagctgtctctgccttcccagacctcgtacagcgaaaacgaaatattgaaaaaagaactggaggcgatgagaaccttttgcgagtcagcgaagcaggatcgcctaaagctgcagaatgagctggcgcacaaggtggcagagtgtaaagccctggccttggagtgcgagagagtgaaggaggatagtgacgaacagataaaacagctggaggatgctctgaaagacgtccaaaaacgtatgtacgaaagtgagggcaaggtgaagcagatgcaaactcatttcctggcactgaaggaacatttaacatccgaagccgcctctggtaatcacagactgactgaagagttgaaggatcagctcaaggatctgaaggtgaagtatgagggcgctagtgctgaggtgggcaagctgcgaaaccagattaagcagaacgagatgattgtggaggagttcaaacgtgatgaaggaaaactgatagaagagaataagcgtttgcagaaagaactgtcaatgtgcgaaatggaaagggaaaaaaagggtcgaaaagtgaccgaaatggagggacaggccaaggaactatcagccaaactagccctgtccattcccgctgaaaagtttgaaaacatgaagagctctttatccaacgaagtgaatgagaaagcaaagaaactcgttgagatggagagagagcatgagaagtccttaagcgagattagacagctcaaacgcgaacttgagaacgtgaaagctaagctcgcacagcacgtcaagcccgaggaacacgagcaggtgaaatcccgtctggagcagaaaagcggcgaactgggaaaaaaaatcactgagcttaccctgaagaaccaaaccctgcagaaggagattgaaaaagtctatctggataataagttgttgaaggaacaggcacataatctcacaattgagatgaagaatcactacgtgccactcaaagtgtccgaggacatgaaaaaatcccatgatgccattatcgatgacctcaaccgcaaattactcgacgtgactcagaaatacacagagaagaagctggagatggagaaactgctgctggaaaacgattcactgagcaaggatgtgtctcgactcgagaccgtgtttgtgccgccagaaaagcacgagaaggagataattgccctgaagagcaacatcgtggagctgaagaaacagctgtccgaactcaagaaaaaatgcggcgaggaccaggaaaagattcacgctctaacgagcgaaaataccaacctgaagaaaatgatgtctaaccagtacgtgccagtgaaaactcacgaggaggtcaagatgacactgaacgatactcttgcaaagaccaacagagaactgctggacgtgaaaaaaaaattcgaagacatcaaccaggaattcgtaaaaattaaagataaaaatgagatcctgaaacggaatctggaaaatacacaaaatcagatcaaagctgagtacatttcccttgcggagcacgaagctaagatgagctctctctcacagtcaatgcggaaggttcaagactctaatgccgagatcctggccaactacaggaaggggcaggaagagatcgtgacactgcatgccgagattaaagcgcagaaaaaagaattggatacaatccaggaatgcatcaaggtgaaatatgccccaatcgtgtccttcgaggaatgtgaacgcaaatttaaggcgacggagaaggagctgaaggaccaactgagtgagcaaacccaaaagtacagcgtgtcagaagaagaggtcaaaaagaacaagcaggaaaatgacaagctgaaaaaggaaattttcactcttcaaaaggacctacgcgacaagactgtgttgattgagaagagccacgagatggagagggcgctgtctcgaaaaactgacgaattaaataagcagcttaaggacctcagccaaaagtacaccgaggtgaagaatgttaaggaaaagcttgtggaggagaacgcaaaacagacctcagagatcctagccgtccagaatctactgcaaaagcagcacgtccctctggaacaggtggaagctcttaagaagagcctaaacggcacaatcgagaacttgaaggaggagctgaagagtatgcaacgttgctacgaaaaggaacagcagacggtcacaaaacttcatcagttgctggaaaaccaaaaaaactccagtgtacctcttgcagagcatctccagatcaaagaagcatttgaaaaggaggtcggcattattaaggcttccctacgtgaaaaagaggaggagagccaaaacaagatggaagaggtctctaaattacagtccgaagttcagaacaccaagcaggccctgaaaaagctggaaacgcgagaggtcgtcgatctgtctaaatacaaggccacaaaatctgacctggagacacagatttcttcgctgaatgaaaagctcgcaaaccttaaccgcaaatacgaagaggtgtgtgaggaagtgctgcacgctaaaaagaaggaaatctctgccaaagatgaaaaagagctgctgcacttttcaattgagcaggagattaaggaccaaaaagaacggtgtgacaagagccttacgactatcactgaactgcagcgaagaatccaggaatctgccaagcagatcgaagccaaggacaacaaaatcacggagctgttgaacgacgtggagcgtctgaaacaggccctcaacggactcagccagcttacatatacctccggtaatccgaccaagcggcagagccagttgattgataccctgcaacaccaggtgaagtcactggaacagcagctggcggacgcagatagacaacaccaggaagtgatcgccatatatagaacacatcttctgtctgccgctcagggccatatggacgaggacgtacaagaggcattgcttcagattatacagatgagacaggggcttgtgtgttag

SEQ ID NO: 211046 - DNA, 3195 bp, synthetic construct
  misc_feature 1..3195: note = Description of Artificial Sequence: Synthetic coding sequence
  source 1..3195: mol_type = other DNA
atggtgctgggcaccgtgctgctgccccccaacagctacggccgggaccaagatactagtctgtgttgcctgtgcactgaagcctccgagtctgcactccctgatctcaccgatcacttcgcctcctgtgtggaagatggctttgaaggagacaaaacaggggggagctcccccgaagccttgcataggccatacggatgtgatgtggaaccacaggcccttaacgaagccatcagatggtcctccaaagagaatctcctgggcgccaccgaatcagatccgaacctgttcgtggctttatatgattttgtagcaagcggcgataacacattaagtataacaaaaggagagaagctgcgggtgctaggttacaaccagaatggggagtggagcgaggtccggagcaagaacgggcaggggtgggtacccagtaactacatcacaccagtaaactccttggaaaaacattcctggtatcatggtcccgtctccagaagtgccgcagaatatttgttgagctctcttattaatgggagtttcctggtcagagagtcagagagctcaccaggacaattgtcgatctcactgcggtacgaggggcgcgtgtaccattacagaatcaacaccacagccgacgggaaggtgtatgtaacagctgagagtaggttttccacacttgcagagttagtgcaccaccattcaactgtcgctgacgggcttgttactactctgcattatccagcccccaaatgtaacaaaccaaccgtctatggtgtgagccctatacacgataagtgggaaatggaacggacagacatcacaatgaagcataagctgggcggagggcagtacggggaggtatacgtgggtgtctggaagaagtactccctgactgtggccgtgaagacactcaaggaagataccatggaggtcgaggagttcctgaaggaagctgccgttatgaaagagattaagcaccccaacctggtgcagctcctgggtgtgtgcacgctagaaccaccattttacatcgttacagagtatatgccttacggcaatctcttggattatctccgcgagtgcaaccgcgaagaggtaaccgcagtagtgttattatatatggccacccagatctctagcgcaatggagtatttagaaaaaaaaaattttattcatcgagacctggccgctcggaactgtctggtgggtgaaaatcatgtggtgaaagtggcagattttggacttagtagactgatgaccggtgacacttataccgcccatgcaggagccaaattcccaattaagtggaccgctccagaatccctggcctacaacactttctccatcaagtccgacgtgtgggccttcggggtgcttctgtgggaaattgcaacttatggaatgtcaccgtatccaggaatcgacctaagccaggtttacgatctgttagaaaagggatatcgtatggaacagccagaaggttgcccacccaaggtttacgagttgatgcgcgcctgctggaaatggagccccgccgatagaccttccttcgctgagacgcatcaggcctttgagacaatgtttcacgacagcagcataagtgaggaagttgcggaggagctggggagagcggcttctagctcttccgtggtcccctaccttcctcgcttacccatcctgccatctaagacaaggacgctcaaaaaacaggtggaaaacaaggagaacatagagggcgctcaggacgcaactgagaattccgccagttccctggctcctggtttcattcgtggcgcgcaggcaagctctgggagtcccgcattacctcgaaagcagcgcgacaaatcacctagttcccttctggaagacgctaaggaaacttgttttacccgcgatcgtaaggggggttttttttcctcttttatgaagaagcgcaacgcgccaactcccccgaaacggtcgagtagtttccgggagatggaaaaccagccccataagaaatacgaactgaccggcctcccggagcaggaccgaatggctatgacactgcctcgcaattgtcagagaagcaagcttcagttggaaagaacagtgtcgacatcatcccaacccgaagagaatgtggacagggctaatgacatgctgcccaagaaaagtgaagagtcagccgccccatcaagagagcggcctaaggccaaactgttacctcggggcgcaacggccttgcccctccggacccctagcggggacctcgccatcacggaaaaagatccccccggcgttggcgtggcaggggtggccgcagcccccaaaggtaaggaaaagaacggcggagccagacttggtatggcgggcgtgcccgaggacggagagcagccaggttggcccagccccgctaaagcggcacctgtgctccccactactcacaatcataaggtccctgtgctcatctccccgacactgaagcacaccccagccgacgttcagctgattggcaccgacagtcagggaaataaattcaagctcctctctgaacaccaggttacttcctctggtgacaaagatcggccaaggagggtgaagccgaagtgcgctcccccaccaccacccgtcatgcggcttttgcagcatccatctatttgctccgaccctaccgaagagcccactgccctcaccgcaggacagagtacaagcgagacccaagaaggtggaaagaaagctgccctgggtgccgtgcccattagcgggaaagcaggtcgaccagtgatgccacctccccaggtcccacttccgacatcttctattagtcccgcaaagatggcgaacgggaccgcaggaacaaaggtcgctctgaggaagactaagcaggctgcagagaagattagcgcagacaagatttcaaaagaagctctgctggaatgcgccgatctgctgtctagcgcgttaacagaacctgtacccaattctcaactggtagacaccggtcaccagcttctagattactgttccggctatgtcgattgcatccctcaaacgcggaataagttcgcatttagagaagccgtttctaaactcgagctgtctctacaagaactgcaagtctcctctgccgcagctggagtccccgggactaatcccgtgctgaacaacctgctttcttgcgtccaggaaatctctgacgtagtgcaacggtag

SEQ ID NO: 211047 - DNA, 1629 bp, synthetic construct
  misc_feature 1..1629: note = Description of Artificial Sequence: Synthetic coding sequence
  source 1..1629: mol_type = other DNA
atgggccagcaggtgggccgggtgggcgaggcccccggcctgcagcaaccacagccgcggggtattaggggatcctccgcagcacgtcccagcggcaggaggagggatcctgccgggaggacaactgagaccggattcaacatcttcacacagcacgaagctctgcaccgaccctatggatgcgatgttgagccacaggcgctgaacgaggccatcaggtggtccagtaaggaaaatctcctgggggccaccgagagtgatccgaacctgtttgttgcattatatgattttgtcgcctcgggcgataatactttatccatcactaagggggagaagctgagggtgcttgggtataaccaaaacggcgaatggtcagaggtccgatctaaaaatggccagggatgggtgccctctaattacattaccccagtaaatagcctcgaaaaacactcttggtatcacggtccagtgtcacgatcggctgccgagtacctgttatcctccttgattaacggatcttttctcgtgcgggagtcggagtctagccccggccagctgagcatttctcttcggtacgaagggagagtgtatcactaccgaatcaacaccaccgccgacggtaaagtgtacgtgaccgccgaaagtagatttagcaccttagctgaacttgttcaccaccacagtactgtggctgatggactggttaccacactacattatccagcacccaaatgcaataagcccaccgtgtatggagtgagccccattcatgataagtgggaaatggaaaggaccgacatcaccatgaaacataaactgggcggggggcagtacggtgaagtgtacgtaggcgtctggaaaaagtactctttgacagtggctgtgaaaacccttaaggaggacactatggaggttgaggagtttcttaaagaagccgctgttatgaaagagatcaagcatcctaatctagtgcagcttctgggcgtctgtacactggaacccccattctatattgtaactgagtacatgccctacggcaatctactggattaccttcgtgagtgtaatcgcgaagaggtgacagcagtagtactactctacatggctacgcagatttccagcgcgatggaatatctggaaaaaaaaaactttatccatcgggacctggctgcccgtaactgtttggtgggtgagaaccatgtcgttaaagtggctgacttcggcttgagcaggctgatgactggtgatacctacactgcccatgcaggcgcaaagtttcctataaagtggaccgccccggaatccctggcatataatacattttccattaagtccgacgtgtgggcctttggagtgcttttatgggaaattgccacatacggaatgagcccgtaccccggtatagatcttagccaggtttacgacttgctggagaagggatataggatggaacagcccgaagggtgccctcctaaggtgtacgagctgatgcgagcctgctggaaatggtcccccgctgaccgcccctctttcgccgaaactcatcaagcctttgagaccatgttccacgattcctccatttccgaagtgctcctccactgcgccaaccagacctgtatcactctgtag

SEQ ID NO: 211048 - DNA, 3441 bp, synthetic construct
  misc_feature 1..3441: note = Description of Artificial Sequence: Synthetic coding sequence
  source 1..3441: mol_type = other DNA
atggtgctgggcaccgtgctgctgccccccaacagctacggccgggaccaggacacaagcctgtgctgtctctgcactgaagcatccgagtccgctctgccggatttaactgaagccttgcacaggccctatggctgtgacgtagagcctcaggccctgaacgaggccattagatggtcgtcaaaggagaacttactgggggccacggagagcgatcccaacctgtttgtcgccctttatgactttgtagcaagtggcgataacacgttgtcaattacgaagggggagaaactcagagtcctgggatacaaccagaacggggagtggtccgaggttagaagcaagaacggtcaggggtgggtgccctccaactacatcacacccgtgaactctctagagaaacacagctggtatcacggccctgtgagcagatccgccgctgagtacctgctttctagcctgattaatggaagcttcctagttcgagaatccgaaagctcccctggacagctttcaatcagcctccgctatgagggtcgggtctaccactacagaatcaataccacagccgacggtaaggtgtacgtcaccgccgagagtaggttcagcacattagctgagctcgtgcatcatcactcaaccgtggctgacggcctggtgaccacactgcactacccagcacctaagtgtaataagcccacagtatacggtgtctccccgatccacgacaaatgggaaatggagaggaccgacattactatgaagcataaattgggcggaggacaatacggggaggtgtacgtgggggtgtggaaaaaatattcccttacagtggcagttaaaactctaaaagaagacacaatggaggtcgaagaatttctcaaagaagccgctgtcatgaaggagattaagcatccaaaccttgtccaacttttaggggtctgcaccctcgagcctcctttttacattgtaacagagtacatgccctatgggaacttattagattatctgcgtgagtgcaaccgcgaggaagtgactgctgtcgtgttactgtatatggcgacccaaatctcaagcgcaatggagtacctcgaaaagaagaattttatccatcgggatctggcagccagaaactgtctagtgggcgaaaatcacgtagtgaaggtggccgatttcggcttatcacgcctcatgactggagatacgtacaccgcccacgcgggagcaaagtttcctatcaaatggacagcccctgaaagtctggcctacaacaccttctccatcaaatctgacgtctgggccttcggggtgctgctgtgggagatagcaacctacggaatgtccccctatcctgggattgatttgtcccaggtgtacgatctgttagagaaggggtaccggatggaacagccagaggggtgtccgccaaaagtctacgagcttatgagagcgtgttggaagtggtcccccgcagatcggccatcgttcgctgaaactcatcaagcatttgagactatgtttcacgactcaagtatctcggaggaagtggctgaagaactggggcgcgctgcttcctcaagcagcgtcgttccttatctgcctagactgccaattctgccctctaagactcgcaccctaaagaaacaggttgagaataaagaaaacatagaaggcgcgcaggatgccaccgagaactcagcgagttccctggcccccggattcattagaggggctcaggcctcctcaggttctcccgccttacctcgcaaacagagagataaaagccccagtagcctgctcgaggacgccaaggaaacctgctttacccgggatcgtaaaggtgggttttttagcagcttcatgaaaaagcgcaacgccccaactccaccgaagcgttcaagctcttttcgtgaaatggagaaccagccacacaagaagtatgagttgactggtaacttcagctctgtcgcctccctccagcacgctgacggcttctcattcactcccgcacagcaggaggccaacctggtccccccgaaatgttatggaggcagtttcgcccagaggaacctgtgtaacgatgacgggggcgggggagggggatcaggcaccgccggcggcggatggtcagggatcacgggattctttaccccacgtttgatcaaaaaaaccctggggctgagggcaggcaagcctacagcatctgacgatacctccaagccctttcctcgaagcaactccacctctagcatgagctctggtctgcctgaacaagataggatggccatgactcttcctaggaattgtcagcggagcaaacttcaactggagcgcacagtcagcacgtcctcacagcctgaggaaaatgttgaccgagccaatgatatgctcccaaaaaaatccgaagaaagcgccgcaccctcccgggagcgccctaaagccaaattgttgccacgcggggctaccgctctgcccctgaggacccccagcggggatctggcgattactgaaaaggacccacccggtgtcggagtggcaggagtggccgccgcacccaaggggaaggagaagaacggaggggcccggttaggaatggccggtgtcccagaagatggtgagcagcctggttggccaagcccggcaaaggctgcccccgtgctccctacaacccacaaccacaaggtgccagttttaatttctcccacattaaagcatactcccgcagatgtgcaactgatcggtactgactctcagggcaacaaattcaagttactttccgagcatcaggtgacgtccagcggcgacaaagatcgccccagaagagtgaagccgaaatgcgcacctcctccacctcccgtaatgcgtctgctccaacaccccagcatctgttcggatccaacagaagagcccaccgcactcactgccggacagtccacgtcagaaacacaggagggcggcaaaaaagcagcacttggagccgtacccatctccgggaaagccggccgacctgtcatgcctcctccccaggtgccactgcctacatcctctatcagcccggcaaaaatggctaacggaacagcgggcactaaagttgctctgaggaaaactaagcaggccgccgagaagattagtgcagataaaatcagtaaagaggcattgctggaatgcgcagacttgctaagtagtgctctcactgagccagttcctaattcccaactggttgacacaggtcatcagctcttggactattgtagtggttacgtggactgcattccgcaaactcggaacaagtttgctttcagagaggcagtaagcaaactggaactaagtttgcaggaattgcaggtgtcatcagctgctgccggggttcccggaactaatcctgtgctgaataacctgctgagctgtgtccaagaaatctccgacgtggtgcagcgctag

SEQ ID NO: 211049 - DNA, 3549 bp, synthetic construct
  misc_feature 1..3549: note = Description of Artificial Sequence: Synthetic coding sequence
  source 1..3549: mol_type = other DNA
atgggccagcaggtgggccgggtgggcgaggcccccggcctgcagcagccccaaccacgggggatcaggggcagcagcgccgctcgcccctccggacgcagaagggatcccgccggacgcaccaccgagacggggtttaatatctttactcagcacgatcactttgcaagctgtgtcgaagatggcttcgagggggataaaacaggagggagttcccccgaggcccttcataggccctatgggtgtgatgtagagcctcaggcactgaatgaggccatccgctggtcctctaaagaaaaccttctgggagcgacggagtctgaccctaacctcttcgttgctctgtacgacttcgtggcctccggtgataacacactgtcaattaccaaaggcgagaaactgagggtgctgggatataatcaaaacggtgagtggtctgaagtccggagcaaaaacgggcaggggtgggttccttccaattatattacacccgttaattccctggagaagcattcttggtaccatggaccagtgtccagaagtgccgccgagtatctgttgtccagtctgatcaacggtagcttcttggttagagaatcggagtcttctcccggccagctgtcgatctccctgcgctacgaaggtagagtgtatcactacagaataaataccaccgcagatggtaaggtatatgtcacagctgagtcgagattctctacactcgctgagctggtacaccatcactcaaccgtggcagacggcctggtgacgaccctgcactacccagccccaaaatgtaacaaacctaccgtgtatggcgtctcacctattcacgacaagtgggagatggagagaactgatatcaccatgaaacacaaactgggaggaggccagtatggagaagtctacgtcggtgtctggaagaagtactccttaaccgtggctgttaaaaccctcaaagaggacaccatggaggtggaggagtttctgaaagaggccgccgtgatgaaggaaatcaagcatcccaatctggtgcagctcctgggagtgtgtaccctcgagcctccattctacattgtgacagaatacatgccatacggcaatctgctcgactatctcagggagtgcaaccgggaggaggtgacagccgtggtgctgctttatatggccacccagatttccagtgctatggaatacctggaaaagaaaaactttattcacagggatttggccgccaggaattgtctggttggggaaaaccatgttgtgaaagttgctgatttcggcctgagcagattaatgacaggcgatacatacacagcccatgccggcgccaaatttccaattaagtggactgcacccgaatctctagcttacaacacgttcagtatcaagtccgatgtatgggcctttggcgtccttttgtgggagatcgcgacatacggcatgagtccctacccaggaattgacctgtcacaggtgtacgaccttctagagaaagggtaccgcatggaacagcccgagggttgccctccaaaagtgtacgaacttatgcgtgcctgttggaagtggagccctgcagacagacctagtttcgccgagacccatcaagcctttgaaacaatgtttcacgactcaagcatttccgaggaggtggccgaagagttggggagagccgccagctcgagtagcgtggtgccgtaccttccccgacttcccattctcccatccaagacacgaactcttaaaaaacaggttgagaataaggagaatatcgaaggtgctcaagacgctacggaaaattcagcctcctcccttgcacccggatttattcgaggagcacaagcgtccagcggttctccagcgctgccacgcaaacagagagacaaatctccaagctctctgctcgaagacgccaaagagacctgcttcactcgcgaccgcaaagggggatttttcagctcctttatgaaaaagcgtaatgcaccaacgcctcccaagcgttccagctctttcagggagatggagaaccagcctcataaaaagtacgaactgactggaaacttttcctccgtagcctcgttacaacacgccgacggctttagtttcacacctgcccaacaagaggctaacctcgtgcccccaaagtgttacggcgggtcgttcgcacagcggaacctgtgtaacgatgacgggggcggcggcggaggatctggcacagcaggcggggggtggagtgggataacaggattctttacaccccgtcttattaagaaaacattagggctgagagcaggaaaaccgaccgcaagcgatgatacatccaagccattcccccgatcaaattctacttcgtccatgtcatctggcctaccagaacaggatcggatggcgatgacactaccccggaattgtcagcggagtaagttacaactggagcggacggtctctacaagttcgcaaccagaggagaacgtggaccgcgccaatgatatgctgcctaagaagagcgaggaatcagcagccccgtcaagagagcgtccaaaggccaaattgctcccacgcggggcgactgcgttacccttgagaaccccatcaggtgatctcgccattacggagaaggatccaccaggtgtaggtgtagccggagttgctgctgccccaaaagggaaagaaaaaaacggcggggctcggcttggaatggcaggcgtccccgaagatggagaacagcccggctggcctagtcccgcaaaggccgcccctgtgctgcccaccacccacaatcacaaagtccccgttctgatctcccctacactgaaacatacgccagccgatgttcagctgattgggactgactctcaggggaataagtttaaactgctgagcgagcaccaggtgacttcgagtggagataaagaccgccctcggagggtcaagccaaagtgtgcacccccacctccacccgtgatgagactgctgcaacatccaagtatctgcagcgaccctactgaagaaccgacagctctaaccgctgggcaatctacctcagagacccaggaggggggcaaaaaggccgccctcggcgccgtccctattagcgggaaggcaggcaggcccgtcatgccgccaccccaggtgcccctgcccacctcttcaatatctcctgctaaaatggctaacggtacggccggcacgaaggtggccctccgcaagactaagcaagccgccgagaagatttcggctgataagatttcaaaagaggccctgctggagtgcgcggacctcctgtcatccgcgctcaccgagccagttcctaacagccaactggtcgacacaggccaccagttgcttgattactgctccggctatgtagattgtatccctcagacccgaaataagttcgcattccgcgaagctgtctcaaagctcgagctgtcgctacaagagctccaggtgagtagtgcggcagccggcgtcccaggaactaatcctgtcttaaataatctgctatcatgtgtgcaggaaataagtgacgtggtccagaggtag

SEQ ID NO: 211050 - DNA, 3132 bp, synthetic construct
  misc_feature 1..3132: note = Description of Artificial Sequence: Synthetic coding sequence
  source 1..3132: mol_type = other DNA
atggtgctgggcaccgtgctgctgccccccaacagctacggccgggaccaggacacttctctctgttgtctatgtactgaggcgagtgagagcgcattgccagatctgacagaggctcttcatcgcccttacgggtgcgatgtggaaccccaggcgctgaatgaggctattaggtggagttctaaagaaaatttgctcggagccacagagagcgatccaaaccttttcgtggccttgtatgattttgttgcttctggtgacaatactctgtcaatcactaagggggaaaagttgagggtcctgggctataatcagaacggcgagtggagcgaggttcggtccaaaaatggccaaggttgggtcccaagcaactatatcacaccggtgaattctctggaaaagcactcctggtaccatggccccgtgtcgcggtccgctgcagagtatctgctgagttccctcatcaatggttccttcttggtgcgtgagtccgaaagcagccctggacagttaagcatctccctacgttatgaaggcagggtttatcactaccgtatcaacaccactgcagatggaaaagtatatgtaactgccgaaagtcgcttttcaacgttggccgagctggtgcaccaccatagcaccgtcgccgatggtttggtcaccacactgcactatcctgcccctaagtgtaacaaacccacggtgtacggggtttcccccattcacgataaatgggaaatggagagaacagatattaccatgaaacataagttggggggtggtcagtatggagaggtatacgttggcgtgtggaagaaatactctcttacagtggccgttaaaacactgaaagaagacactatggaggtggaggaattcctgaaagaggctgctgtgatgaaagaaatcaagcatcctaatctggtacagctacttggagtgtgtactcttgagcctcccttttacattgtgacagagtacatgccttatgggaacctgctggattacctaagggaatgcaaccgtgaagaagtgactgctgtggtgctactgtacatggcgacgcaaataagtagtgccatggagtacttagaaaaaaagaattttatccatagagacctggccgcacgtaattgcctggtgggggagaatcatgtggtcaaggttgctgactttggactttctagacttatgacgggtgacacctataccgcccatgctggggctaagttccctatcaaatggactgcaccagagtccttggcatacaacactttttccatcaagtccgacgtctgggccttcggcgtgctgctctgggagatcgcaacatatgggatgtccccctatcctgggatagatctgtcccaggtgtatgatttgctcgagaaagggtacaggatggagcagccagagggatgccctcctaaggtgtacgagcttatgcgggcttgctggaagtggtcaccagccgacaggccgtcattcgccgaaacacatcaagcttttgaaacaatgttccacgattcttccatcagcgaagaggttgccgaggagttaggcagagctgcatcatccagctcagtggtaccctatttgcctcggctgcccattctgccttctaagacccgaacactgaagaagcaggtcgaaaataaggagaatatcgagggcgcacaggacgcaactgagaacagtgcatctagcttggcccctggatttatacggggggcacaggcctcgtctggatcacccgctctgccccggaagcagagagacaaatcacctagtagtcttctcgaggacgccaaagagacttgctttacacgagatcggaaaggtggcttcttttcatcattcatgaagaaaaggaatgcacccacccccccgaaaagatcgtcctcttttcgggagatggagaatcagccccacaagaagtatgaactgacaggattgcccgaacaggatagaatggccatgacgcttccgcgtaattgtcaaagatccaaattgcagctggagagaacggtctccacttcctctcaacctgaggaaaacgtcgatcgggcaaacgatatgctgcctaagaagtccgaggaaagcgctgcacctagcagggagagacccaaagccaaactgctgccaaggggagctactgctctgccactgcgcacaccctctggagacctggctattaccgagaaggacccaccgggggtgggggtggccggtgtagccgccgcgccaaaagggaaggaaaagaacgggggtgcgagacttggcatggctggggtgcccgaggatggggaacagccaggatggccctccccagccaaggccgccccagtactgcctaccactcataaccacaaggtgccagtgctcatcagcccaactcttaagcacacacccgcggatgttcaacttattggaactgactcccagggaaataagttcaagctcctttctgagcaccaggtgacatcaagcggagataaagacaggccgcgccgggtgaaaccgaaatgcgctccccctccacccccggtaatgcgactgttgcaacatccttccatatgctccgatccaacagaggaaccaaccgccctgacagcaggccagagcacctcagaaacgcaggaaggcggaaaaaaggctgcattaggtgccgtacccatttccggcaaagccggccggcccgtgatgccgccccctcaggtgcctcttcccacaagtagcatatcccccgctaaaatggccaacggaacggcgggaaccaaggtggccctccggaagaccaaacaagccgctgaaaaaatttccgcggataaaatctcaaaagaggccctcctggagtgtgcggacctgctatcatctgccttaactgagccagttcctaactcacagctggtcgacacaggacatcaactgcttgactactgttcaggatacgtagactgcattccccaaaccagaaataagttcgcatttcgggaagccgttagtaaactggagttaagcttgcaggaattacaggtgagttcagctgccgctggtgtcccggggacaaatcccgttctcaataatctcctgagttgcgtgcaagaaatatccgacgttgtgcaacggtag

SEQ ID NO: 211051 - DNA, 3504 bp, synthetic construct
  misc_feature 1..3504: note = Description of Artificial Sequence: Synthetic coding sequence
  source 1..3504: mol_type = other DNA
atggtgctgggcaccgtgctgctgccccccaacagctacggccgggaccaggacactagcctgtgttgcctgtgcaccgaagcctccgagagcgctctccctgacctaacagaccattttgccagttgcgttgaagatgggttcgaaggggataaaacgggaggttctagcccagaggccctccaccggccctacggctgtgacgtggagcctcaggccctcaatgaagcaattcggtggtcttccaaggagaacctccttggggcaaccgagagcgaccctaacctcttcgtggccctctacgattttgtcgcatcaggggacaacaccttatccataaccaaaggggaaaagctacgcgtcctcggctacaatcagaatggagaatggagtgaggtgaggtcgaaaaatgggcaaggatgggtaccaagcaactacatcactcccgtgaacagcttagaaaaacattcctggtatcacggtcccgtgtcgaggtctgccgcagaatacctcctctccagcctaatcaatggaagcttcttggtgcgcgagtcggaaagctcacccggccagctgtccattagcttgaggtatgagggccgagtctaccactaccgcatcaacaccaccgcagatggaaaggtctacgtgaccgccgaatcccggttttctaccttggccgaactggtccaccaccactccactgtggctgatggcctggtgactacattgcattatccagcccccaagtgcaacaaacctacggtatacggcgtctcccccattcatgacaagtgggaaatggaacgcaccgatataacaatgaagcacaaattgggcggcggtcagtacggagaggtatatgtgggcgtctggaagaaatacagcttaaccgttgctgtaaagacactcaaagaggatacaatggaggtggaagaatttctaaaagaggccgcggtcatgaaagagattaagcatccaaacctggtccaactattaggggtctgtacattagaacccccattctatatagtcaccgaatatatgccttacggaaatttattagactacctgagagaatgtaaccgagaagaggtcaccgcagtggtgctcctctacatggcgactcagattagtagcgccatggaatacctggaaaagaaaaattttatacatcgagacctggccgccagaaactgtctggtaggggagaatcacgttgtcaaagttgccgactttggactgtcaagactgatgacaggcgatacatacacggcccatgcgggtgccaagttccctatcaaatggactgcaccagaaagcctggcgtacaacacgttttcaataaaaagcgacgtatgggcttttggcgtcctcctatgggagatcgctacatatggaatgtccccataccctggtatcgatctgtcccaggtttatgatctcttggaaaagggatataggatggagcagcccgaaggttgtccaccgaaagtctatgagttaatgcgcgcttgttggaaatggtcgccagcagataggcccagctttgccgagacccaccaagcttttgagaccatgtttcacgacagttctatatctgaggaagtggccgaggagctggggcgggcagcttcctcttcaagtgttgtcccatacctaccccgcctcccaatcctcccctctaaaacccgcacactgaaaaagcaggtcgaaaacaaggagaatatagagggcgctcaggacgccaccgaaaactccgcttccagcctggctcctggctttatcaggggggcccaagcctcatccggatcccccgccctccctcgcaagcagcgggataagtccccttccagcctgctggaggatgccaaggaaacgtgcttcactagggaccggaaaggtgggttcttctcctcttttatgaagaagagaaatgccccaacaccccccaagaggtcaagctcatttcgtgagatggagaatcagcctcacaagaagtacgaactcacggggaacttctccagtgtggcatcacttcagcacgccgatggtttttcttttactcctgcgcagcaagaagctaatcttgtgccccccaaatgttatggggggtcgtttgcccaacgcaacctgtgcaacgatgatggcggcggcggcggcggcagcggaaccgccggcggtgggtggtcaggtatcaccggcttctttactccgcgtctaatcaagaaaacactaggcttgcgagccggaaaaccgactgcgtccgacgacacttcaaagccctttcccagatctaacagtacatctagtatgtcgagcggtttaccagagcaagacaggatggccatgactttaccgcgcaactgccaaagaagtaagctgcagctggagaggacagttagtacttcctcccagcccgaagagaacgtcgaccgcgcaaacgacatgcttcccaagaaaagtgaagaatctgctgcgccctcccgtgaacggcccaaagcaaagcttttgccacggggcgctaccgctctacccctgcgcactccttcaggggatctcgccatcaccgagaaagatcctcccggggttggggtagctggggttgccgcagccccaaagggtaaggagaagaacggcggagcaagactcgggatggcaggggtccccgaggatggcgagcagccaggttggccttcccccgccaaagccgcccccgttctccctaccacccacaaccacaaggtgcctgttctcatcagccccacccttaaacatactccggcggacgtacagttaatcggaacagactctcagggtaacaaatttaaactcctgtctgagcaccaggttacctcatccggtgacaaagacagaccccgacgggtaaaacccaaatgtgccccacctcctcctcctgtcatgcgcctgctccaacatccaagcatctgttccgatcctaccgaagaaccaactgctctgacggcaggtcagtctacatcagaaacacaggagggcgggaagaaggccgcccttggcgccgtgcccatcagcgggaaagccggcaggccagtgatgcctcccccacaggtgccccttccgacctcctcaatctcgcctgcgaaaatggctaatgggacagctggcaccaaggtggcactgcgcaagacgaaacaggccgcagagaaaatcagcgccgataagattagtaaggaggccctcttagagtgtgcggacctcctgtcgtcagcattgactgaacctgtccctaattctcaactggtcgacacaggtcaccagctgcttgactactgttccggatatgtcgactgtataccacaaactcggaacaaattcgccttccgagaggcggtgagtaagctggaactcagtttgcaagagctgcaggttagcagcgctgccgcgggcgtcccaggtacaaaccctgttttgaataacttactctcatgcgtacaggaaatcagtgacgttgttcaacggtag

SEQ ID NO: 211052 - DNA, 3486 bp, synthetic construct
  misc_feature 1..3486: note = Description of Artificial Sequence: Synthetic coding sequence
  source 1..3486: mol_type = other DNA
atgggccagcaggtgggccgggtgggcgaggcccccggcctgcagcagccccaaccccgtggcattaggggctcttctgccgcccgcccaagtggacggaggcgcgaccccgcgggtcggacgaccgagactggcttcaatatctttactcagcatgaagcgttgcacaggccttacggctgcgatgtggagcctcaggccctgaatgaggcaatacgctggtcaagcaaagagaatcttttaggggctacagaaagcgatccgaatctttttgtggctctgtacgatttcgtggcgagcggcgataacacgttgtcaatcacaaaaggcgagaaactgagggttctgggatacaatcagaatggcgagtggagcgaggttcgttccaagaatggccaggggtgggtgccttcaaattatatcacgcctgtgaatagcctggaaaagcacagctggtatcatgggcctgtgtcaagaagcgcagctgagtatcttctctcatcgctgatcaatgggagcttcctggtccgcgagagcgagtcctcacccgggcagttatcgatctctctgcggtacgagggccgtgtttaccactatagaattaataccacagctgatggcaaggtgtacgtcactgccgagtcacggttttcaaccctagccgaacttgtccatcatcactccaccgtggccgatggcctggtgacgacactccattacccagctccaaagtgcaacaaacccacagtgtatggtgtgagtccgatccacgataaatgggagatggaaagaaccgatatcactatgaagcacaagttaggaggcggacagtacggcgaagtgtatgtcggcgtgtggaaaaagtattctcttacggtggcagtaaagacgctcaaagaggacactatggaggtcgaggagttcctaaaggaagctgccgtaatgaaggagattaaacacccaaatctcgtgcagctgcttggcgtttgtaccctcgagcctccattttacatcgtgaccgagtacatgccctatggcaatctgttggactacctgcgcgagtgtaaccgcgaagaggtgacagctgtcgtactgctgtatatggcaactcagatatcaagcgctatggaatacctggaaaagaagaactttatccacagagatctagctgcgcgtaattgcttggtcggggaaaaccacgtggtaaaagttgccgactttggcctgtctcggctgatgacgggcgatacctataccgcccacgccggggccaagttcccaattaagtggacagccccagagagccttgcgtataatactttttccatcaagtccgatgtgtgggcctttggcgtcctgctttgggaaatcgcgacatatggaatgtcaccataccccggcatagatctctcccaagtgtacgacttgctggagaagggctacagaatggaacaaccagaaggctgccccccgaaagtgtatgaactgatgcgggcctgttggaagtggagccctgccgatcgtccctcttttgccgaaactcaccaggctttcgaaacaatgttccatgacagctcaatctctgaggaggttgcagaggaattaggaagggctgcttcatcatcgtccgtggtcccctacctccctcgtcttcccatcctcccatccaagacacggacccttaaaaaacaggtcgagaataaagagaatattgagggtgctcaggacgccaccgagaattctgcttcaagtctcgcccctggtttcattcgtggagctcaagccagttctggctccccagctctccctcgtaagcaacgcgataaaagccccagctcgctgttagaagacgccaaagagacatgcttcactagagatcgtaagggtggcttcttctcttcctttatgaaaaagcgtaacgcaccaacaccccctaagagaagttcttcattccgggagatggagaatcagcctcacaaaaagtatgaactgacggggaatttttccagtgtagcctctcttcagcatgctgacggcttttccttcacacccgcccaacaagaagcgaaccttgtccctccgaaatgctatggaggatcctttgcccagcgtaacctctgcaacgatgatggcggagggggaggggggagcggtaccgccggcgggggctggtccggaataaccggcttctttacaccaaggctgatcaagaagactctgggcctgagggcagggaaaccaaccgctagcgacgataccagtaagccttttccaagatcaaattcaacaagctctatgagctcaggcttacccgagcaggaccggatggcgatgacattgccccgcaattgtcagaggtcgaagttgcagctggaacggaccgttagcacatccagtcagccggaggagaacgttgatagggccaatgacatgctgcccaaaaagagtgaagaatccgccgctccttctcgggagcggccaaaggctaagctgctgccgaggggggccaccgccttacccctgcggaccccatctggcgatctggccattaccgagaaggacccaccaggagtgggcgtggcaggagtggctgcggctccaaagggcaaggaaaagaacggcggagcacggctcggcatggctggtgtgcctgaggacggggagcagccaggatggccctcccctgcaaaggctgctcccgttcttccaaccactcacaaccacaaggttcctgttctcatctctcccaccctgaagcacacgccagctgatgtgcaactcataggcacagacagccagggaaataaattcaaactcttgagcgagcaccaagtaaccagcagcggcgacaaggatcggcccaggcgggttaagcccaaatgcgcccctcctccacccccagtcatgaggctcctgcagcatccttccatttgcagtgatcctactgaagagccaaccgcattaaccgccggtcagtctacttccgagacccaagagggggggaaaaaggcggcgctgggtgctgtgcctatatctggaaaggccggaaggcccgttatgccccccccacaggtaccgctcccaaccagctccattagtcccgctaagatggccaacggcaccgccggaacaaaggtggcactcagaaaaaccaagcaggcagctgagaagatttctgcggacaagatcagcaaggaggctctgctggagtgcgccgatttgctgagtagcgcactcaccgagccggtgccgaacagccagctggtggacaccggccaccagctacttgactattgttcaggatacgttgattgcattccccaaacacgcaacaagttcgcgtttagagaggccgtgagtaagctggaactgagcttacaggaattgcaggtttctagtgccgccgccggggtgcccggtactaacccagtgcttaataacctcctttcttgtgtgcaagaaatctctgacgtggtacagagatag

SEQ ID NO: 211053 - DNA, 3177 bp, synthetic construct
  misc_feature 1..3177: note = Description of Artificial Sequence: Synthetic coding sequence
  source 1..3177: mol_type = other DNA
atgggccagcaggtgggccgggtgggcgaggcccccggcctgcagcagcctcagccccgaggcatacggggctcatcagcggccagaccaagcggtcggcgacgggaccctgccggaaggactactgagaccgggtttaatatcttcacccagcacgaagcactccatagaccatacggatgtgatgtcgagcctcaggcactgaacgaagccatccgctggagcagcaaggagaatcttctaggggctaccgagtccgatcctaatttgttcgtcgcactttatgatttcgtggctagcggtgataacactctgtctatcacaaagggggagaagttacgggtgttgggttataatcagaatggcgaatggtcagaggtgagaagcaagaatggccagggctgggtgccaagcaactacatcacccccgtgaactcactggagaagcactcatggtaccacggaccggtcagtcgaagcgccgcagagtacctcctctcatctttaataaatggtagctttctggttcgtgaaagcgaatcgtctccgggtcagctttccatttcactgcggtacgaggggagggtgtatcattataggattaatactacagcagacggcaaggtctatgtgactgcggagtctcgtttcagtacccttgctgagctggtccatcatcacagcactgtcgctgatggactggtcacaacactgcattaccccgcccccaaatgtaacaaacccacggtgtatggagtgtccccaatacacgacaagtgggagatggagcgaacagatattacgatgaagcacaaactgggaggtggacagtacggagaagtgtacgtcggcgtctggaaaaaatattccctaaccgtcgccgtcaagaccctaaaggaagatactatggaggtggaggaattcctgaaggaagctgccgtgatgaaggagatcaagcaccccaacctcgtccagttgctgggcgtgtgcacacttgaaccgccgttctatatagtgacggagtacatgccatacgggaatctccttgattacctgcgggagtgtaatcgcgaggaggtgaccgctgtggtgctgctgtacatggcgacgcaaatttcatctgcaatggaatacctggaaaagaagaatttcattcacagagatctggcggcccgaaactgcctggttggtgagaaccacgtcgttaaagttgccgacttcggcctgtccaggctgatgacaggtgacacttacaccgcacacgccggggccaaatttcccatcaaatggaccgcacctgaatcactcgcctacaataccttttccatcaagtcggatgtgtgggcctttggcgtcctcctttgggaaattgcaacttatggtatgtctccctatccaggcatcgacctgtcacaggtctatgatttgctagagaagggatacagaatggaacagcccgaagggtgtccaccaaaggtttatgaacttatgagggcatgctggaagtggagtcctgcagaccggccgtctttcgccgaaacacaccaggccttcgaaaccatgttccacgatagctctatctccgaagaggtggccgaggagctggggcgcgccgcttctagcagttcagtggtgccttacctgcccaggttgcctatcctgccttcaaagacacggaccttaaaaaaacaggtcgaaaacaaagagaatatagagggagcccaggatgcgacagaaaacagtgcctcatctttggcacccggattcattaggggcgcgcaggcctcaagtggaagccctgccctgcctcgcaagcagcgggataagtcccccagtagcttgttagaagacgccaaggagacttgtttcactcgggataggaaaggaggcttcttctcctcattcatgaaaaagagaaacgctcccactcccccaaagaggtcttccagttttcgggagatggagaaccagccccataagaaatatgagctgacgggattgccagagcaggaccgaatggcaatgaccctacctaggaattgccagcgatctaagttgcaactagaaaggactgtgtccacctcatcacaacccgaggaaaatgtggacagagctaatgacatgctgcccaaaaaatctgaggaatctgctgctccctcccgggagcgcccaaaggctaagttgctccctcggggggctactgctctgccactgcgaacaccttccggcgacctcgccatcaccgagaaagatcccccgggagtcggcgtcgcgggggtggcagcagcacccaaggggaaggagaaaaatggaggggcgaggcttggaatggccggagtacctgaggatggcgagcagcctggatggcctagtcctgcaaaggctgcgccagtgctgccaacgacccacaatcacaaagttcccgtcctgatatcacctacacttaagcatactccagcagatgtgcaactaattggaactgattctcagggcaataaatttaaactcctgtccgagcaccaggtcacctctagcggagataaggatagaccgcggcgggtgaagcccaagtgcgctcccccccctccacctgtgatgaggctcctgcagcacccgtccatctgcagtgaccctacggaggaacctacagctttgaccgcaggtcagtccacatccgaaactcaggagggaggtaagaaggccgcattgggcgctgtccctatctcagggaaagctggccgccctgtaatgccgcccccacaggtgcccctgcccacttcctctatttcacccgccaagatggcgaatggaacagcaggcaccaaagtcgcccttaggaagactaagcaggcagcagaaaagatttcagctgacaaaatatcaaaggaagctctcctggagtgtgctgacctcttgagctccgcattgaccgagcctgtgcccaactcacagctggtggataccggccaccagcttctcgattactgctctggctatgtagactgtatcccgcagaccaggaataaattcgctttcagagaggctgtctccaaactggagttgagcctacaggagctgcaggtgagctcagccgccgccggagtcccaggtaccaaccccgtgttaaacaacttgttatcatgcgttcaggaaataagtgacgtggttcagaggtag

SEQ ID NO: 211054 - DNA, 3240 bp, synthetic construct
  misc_feature 1..3240: note = Description of Artificial Sequence: Synthetic coding sequence
  source 1..3240: mol_type = other DNA
atgggccagcaggtgggccgggtgggcgaggcccccggcctgcagcaacctcagcctcgtggtatacgcggttcttcagccgccagaccttccggccgcagaagagaccctgcaggtcgaacgactgaaaccggatttaacatatttactcagcatgaccattttgctagttgcgtggaagacggctttgagggggataagacaggcgggtcctcacccgaagctctgcaccgcccatatgggtgcgatgtggagccacaagccctaaatgaagctataagatggtcatctaaggaaaacctcctaggagcaaccgagtctgacccaaatctgtttgtggcactttacgattttgtagccagtggcgataacaccttgtccatcactaaaggagagaaactgagagtgctaggctacaatcagaacggagaatggtccgaggttagatctaaaaacggacaggggtgggtgccttcaaattacatcacgccagtaaacagtctcgagaagcactcctggtatcacggcccagtctcacggtcagcagccgaatatctcctttcctcccttattaacggcagctttctggtgagagaatctgagtcttcacctggccagctgagcatttccctgcgatatgagggccgggtctaccactataggatcaacacaacagcagatggaaaagtttacgtcaccgcagagtcccggttcagcacattggctgaactagttcatcaccactcaaccgtcgcagatggcctggtgactacccttcattacccagcaccaaaatgcaataagcctacggtatatggcgtgtctcccatccacgataaatgggagatggaacggaccgacatcaccatgaagcataaactggggggcggacaatacggcgaagtctacgtcggggtatggaagaaatacagtttaacagtggcggtaaagacactcaaggaagacactatggaggtagaagagtttctgaaagaggccgccgtgatgaaggagatcaagcacccaaatttggtgcaacttctaggtgtttgtaccctggagcctccattctacatcgtcaccgagtacatgccttacggaaatctgctggactacctccgggaatgcaacagagaggaggtgacagctgtggtgctgctttacatggctacccagatcagctccgccatggagtatctggagaagaagaacttcatacaccgagatctagccgcccgcaattgcctcgtcggggagaaccatgtggtcaaggtggcagatttcggcttgtctcgccttatgaccggggatacctatacagcccatgccggagccaaatttcccatcaaatggacggcccccgagtcacttgcatataacaccttttctattaagagcgacgtgtgggccttcggcgtgctgctttgggagatcgcgacttatggtatgtctccttacccgggtatcgacttatcacaggtgtatgacctcttggaaaaggggtataggatggaacaacctgagggctgcccaccaaaggtctatgaactgatgagagcctgctggaagtggagccccgccgatcgtcctagtttcgccgagacccaccaggcgtttgaaacaatgtttcacgattcctcaatctcagaagaggtggcagaggagctcggccgcgccgccagcagcagtagtgtagtgccgtacctgccacggttacccatcctcccgtctaagaccaggacgctgaagaaacaggtagagaacaaagagaatatagagggtgctcaggacgccacggaaaattctgccagctccctggcccctggcttcatccgaggggcccaggcctcctctgggtctcccgcactacccaggaagcagagggataaatcaccctcgagtcttcttgaagatgcaaaagaaacttgcttcactagagaccggaagggagggttcttctcgagtttcatgaaaaagaggaatgctcctacccctccaaaacgctccagcagctttcgtgagatggagaaccagccgcacaagaaatatgaacttacagggctacccgaacaggataggatggccatgacgttaccgcgcaattgccagcgctcgaagctacagctggagcgtactgtgagcacaagctcccaacccgaggagaacgtcgaccgggctaacgacatgttacctaaaaagtcagaggaaagtgcagccccctcgagagaacgccctaaagctaagctgctccctcggggggccacagccctgcccctcagaaccccttccggagatctggccattaccgagaaggatcccccgggcgttggagtggcaggagtggcagccgcacccaaaggcaaggagaagaatgggggcgctcgcttgggcatggccggggttccagaggacggggaacaacccgggtggccttccccagctaaagctgctccggtgctcccaaccacacacaatcacaaagttccggtgcttattagccctaccctgaagcatacccccgcagacgtgcaactgattggaaccgacagtcagggcaacaaattcaagctgctctccgagcaccaggttaccagttctggggataaagacagaccgagaagagtgaaaccgaaatgcgcaccacctcccccacctgtgatgaggttacttcagcacccatcaatctgcagtgaccctacagaagaaccaaccgccctcaccgctggtcaatcaacttcagagacccaggaaggcggcaaaaaagccgcattaggggccgttcctatctcaggaaaagcgggtcgccctgtaatgccccctccgcaagtgcctctgcccactagcagcattagccccgctaagatggcaaacggaaccgctgggactaaggtggcactgcggaagactaagcaggcggccgagaagatttccgccgacaaaatttctaaagaggcactgctagagtgcgccgatctcctctccagtgcactaacggaaccagtgccaaattcacaactggtcgacaccggacatcaacttctggattattgctcagggtatgttgactgcatacctcaaacaagaaataagtttgcattccgggaggccgtttctaagctagaattgtccctccaagagctccaggtaagctccgcggcggctggtgttccgggcactaatccggtgctgaacaatctcctctcttgtgttcaggaaatttccgacgtcgttcagagatag

SEQ ID NO: 211055 - DNA, 2349 bp, synthetic construct
  misc_feature 1..2349: note = Description of Artificial Sequence: Synthetic coding sequence
  source 1..2349: mol_type = other DNA
atgaaccccgagaaggacttcgcccccctgacccccaacatcgtgcgggcccttaatgacaaattatacgaaaaaaggaaagtggccgccctggagatcgaaaagctcgtgagggagttcgttgcccagaataatacagtgcaaatcaagcacgtgattcagactctttcacaggaatttgcactctcacagcatccgcacagtcgcaagggcggcttgatcgggttggcggcctgtagtattgcgctcggcaaggactctgggctctatttaaaggaacttattgaacctgtgctcacatgtttcaatgacgcagattcgcggctgagatattatgcttgcgaggccctgtacaacatcgttaaggtggcccgtggggccgtgctcccccatttcaatgtgctatttgacgggctcagcaagctcgccgcggaccctgatccaaatgtgaagagcggctccgagctgctcgacagactgctcaaggatatcgtaaccgagagtaataagttcgacttggtttcctttattccccttctcagggaacggatctacagcaacaaccagtacgctaggcagtttataatcagctggatcctggtgcttgagtctgtccccgatatcaacctgttagactacctgcccgagattcttgacgggctcttccagatattgggagataacgggaaggaaatccgcaagatgtgtgaagtcgtgctgggcgaattcctgaaggagataaagaagaatccttcttccgtcaaatttgctgagatggcgaacattctggtcatacattgccagaccactgatgatttgattcagctaacagccatgtgctggatgagagagttcatccagttggctggacgcgttatgttgccctactcctccgggatcctaacggctgtgcttccctgtctggcctatgatgacagaaagaagagcatcaaagaagtggctaacgtgtgcaaccagtcactcatgaaactggttactccagaagatgacgagctggatgaactcaggccaggacagcgacaggccgagcctaccccagacgacgccctgccgaagcaagaaggcacagctagtgggggccctgatggaagttgcgacagcagcttcagttctggaatctccgtctttaccgcagcttctaccgagcgagcacccgtcaccttgcatctggatggtatagtgcaggttctcaactgtcacctctcagacactgccatcggcatgatgacgcgaattgcagtactgaaatggctctatcacttgtacataaagacaccaaggaagatgttccggcacacggattctcttttcccaatcttgttacagactctgtccgacgagagcgatgaggtgatccttaaggatctggaagtgctggctgaaatcgcgtcaagcccagccggacagaccgatgatccaggtcctcttgatggcccagatctacaggcgagccattcggagctccaagtgcccacacctggccgggctgggcttctgaacacttccggaacgaaaggcctggagtgcagtccatccacaccaaccatgaattcctacttctacaaatttatgattaacctacttaagcgcttttcaagtgagagaaagctgcttgaggttcgcgggccctttatcatccgccagctgtgtcttctcctgaatgccgaaaatatttttcattctatggcagatattctgctgcgcgaagaggatctgaagttcgcaagtacaatggtgcatgctctgaacacaatccttctgaccagtaccgagctgttccagctgcgcaaccaactgaaggacttaaagactctggagagccagaacctcttctgctgtttatatcgctcatggtgtcacaacccagtcacaaccgtatccctatgcttccttacccagaattataggcatgcatacgacctgattcaaaagtttggagacctggaggtgaccgtggacttcttggcagaagttgataaacttgtgcagctgattgagtgccctattttcacatatcttcggctccagcttcttgatgtcaagaacaacccatatttaattaaggcattgtacgggttgctgatgctgctgccccagagctctgccttccagctgctgtctcaccggctacagtgcgttccaaacccggagttactgcagacagaggactctctcaaggccgcccctaaatcacagaaggctgattccccaagcatagattatgccgaattactgcagcattttgagaaggtccaaaataagcatcttgaggtgcgccaccagcgtagtggacgcggagatcacctcgatcgccgcgtggtcctgtag

SEQ ID NO: 211056 - DNA, 645 bp, synthetic construct
  misc_feature 1..645: note = Description of Artificial Sequence: Synthetic coding sequence
  source 1..645: mol_type = other DNA
atggccgacatcctgctgcgggaggaggacctgaagttcgccagcaccatggtgcatgccctcaataccattcttcttaccagtaccgagctattccagttgcggaatcagctgaaagaccttaagaccctggagtcacagaatctcttctgctgcctgtacagatcttggtgccataaccccgtgaccacggtgtcgctttgttttctgacccagaattatcggcatgcctatgacttaattcagaaatttggggaccttgaggtcaccgtcgattttctggccgaagtcgataagctcgtgcaacttattgagtgtcctatcttcacatacctacgcctgcagttactcgatgtcaaaaataatccatatcttattaaggccctttacggacttctgatgctcctgccccagtcctctgcattccagctcctttctcacaggctgcagtgtgttccaaacccagagttactccaaactgaggattcgttgaaggcagctccaaaatcacagaaggccgactcccctagcattgattacgccgaattgctgcagcattttgagaaagtgcagaataaacacttagaagttcgccatcagcggtccggccgtggggatcatttggacagacgagtggtcctatag

SEQ ID NO: 211057 - DNA, 1062 bp, synthetic construct
  misc_feature 1..1062: note = Description of Artificial Sequence: Synthetic coding sequence
  source 1..1062: mol_type = other DNA
atggccagcagctggccccccctggagctgcagagcagcaaccagtcccagcttttcccacaaaacgccacggcatgtgacaacgccccggaagcgtgggatcttctgcatcgagtcctgcccacgttcatcatttccatctgcttcttcggattattgggtaacttattcgtgctacttgtctttctcctcccgagaaggcagctgaacgtggccgaaatctatctggccaatctggccgcatctgacttggtgttcgttctgggtctgcctttctgggcagaaaatatctggaaccagtttaattggcccttcggggcgctgctgtgtagggtgatcaatggggttattaaggctaacctgttcatctccatctttctggttgtcgccattagtcaggatcgttaccgcgtgctggtgcacccaatggcttccaggcgtcagcagcgcaggcggcaggcaagggtgacctgtgtgttaatctgggtcgtcgggggccttctgtccatccccacgttccttttgagatcaattcaagctgtccccgacctgaatatcacagcctgtattcttctgctgccccacgaagcctggcacttcgcacggattgtagaactgaatattctcggcttcctcctgcctttggcggctatagtctttttcaactaccacattctcgcctcgcttaggacacgggaagaagtcagtcgtacccgctgtggtgggcgaaaggattctaaaacgactgccctgatccttaccctggttgtggctttcttggtatgctgggcaccctatcacttcttcgcctttctcgaattcctcttccaagtacaggctgtgagaggttgtttttgggaggactttatcgatctgggcctgcagctggcaaacttctttgcatttactaattcaagtctgaatcctgtgatctatgtttttgtgggacggctgtttcgcacaaaggtatgggaactgtacaagcagtgcactcccaagtcactcgcaccgatatcctccagccaccgaaaagagatcttccagctcttttggagaaactag

SEQ ID NO: 211058 - DNA, 1527 bp, synthetic construct
  misc_feature 1..1527: note = Description of Artificial Sequence: Synthetic coding sequence
  source 1..1527: mol_type = other DNA
atgccccccaagcggaacgagaagtacaagctgcccatccccttcccagagggcaaggtgctggacgatatggaagggaaccaatgggttctgggaaagaagattggctcagggggtttcggactgatttacctggcatttccaactaataagcccgagaaggacgcccggcatgtggtgaaggtggaataccaagagaatggccctctgttctctgaactgaaattttatcaaagggttgctaagaaagactgtatcaagaaatggatcgaacggaagcaactggactacctcggaattcccctcttttacggctccggactcactgagttcaaaggaagatcttaccggttcatggttatggagaggctgggtatcgatttgcaaaaaatcagcgggcagaatgggaccttcaagaaaagtaccgtgttacagcttggcataaggatgctggacgttctggaatatattcacgagaacgagtatgttcacggagacattaaggctgccaacttgcttcttggatataaaaatcctgatcaggtctatctcgcagactacgggctttcgtatcgctattgccctaacggaaatcataagcagtatcaagagaaccctcggaaggggcacaacggcacaatcgaatttactagcctcgatgcacataagggagtcgctctctcacgaagatcggacgtggagattctgggatattgtatgctaaggtggctttgtggcaagttgccatgggaacagaacctgaaggatccagtggcagttcagaccgcgaagactaatctgctggatgagcttcctcagtctgtgttgaagtgggccccttctggctcatcatgttgcgagatagcacagtttctagtgtgcgcgcatagccttgcttatgatgagaagcccaactatcaagcactgaagaagattttaaatccccacggcatcccactgggtcccctggacttctcaaccaagggccagagcatcaacgtacacacccccaactcgcaaaaggtcgacagtcaaaaggcagctactaagcaagtgaacaaagcccataaccgcctaatcgaaaagaaagtacatagtgagcggagcgccgaatcgtgtgccacctggaaagtacagaaggaggaaaagctgattggactaatgaataatgaggcagcccaggagtcaactcgtaggaggcagaaataccaggaatctcaagagcccctgaacgaggtgaattcatttcctcagaaaatctcttatacccagtttccaaacagcttctacgagccacatcaagacttcacctcacctgatatctttaaaaagagccgcagccctagctggtataagtatacctcaaccgtctccactggaattacagacctcgagagcagtacaggtctgtggcccaccatctctcagttcacactgagcgaagagactaacgctgatgtctactattaccgaatcatcattccagtgttactaatgcttgttttcctcgcacttttttttctctag

SEQ ID NO: 211059 - DNA, 1203 bp, synthetic construct
  misc_feature 1..1203: note = Description of Artificial Sequence: Synthetic coding sequence
  source 1..1203: mol_type = other DNA
atgccccccaagcggaacgagaagtacaagctgcccatccccttcccagagggcaaggtgctcgacgatatggagggcaaccagtgggtgttagggaaaaagattgggtctggggggtttgggctcatttacctggcttttcctacaaataagccagaaaaggatgctcgccacgtcgtgaaggtggagtaccaagaaaacggaccattgttctcagagctgaagttttaccaacgagtagccaagaaggattgtatcaagaaatggattgagcggaaacagctcgactatttaggaataccactgttttacggctcaggcctaacagaatttaaagggcgttcctaccgttttatggttatggagaggcttgggatcgacctgcaaaagatctcaggccagaatggaaccttcaaaaaaagcacagtgctgcagttgggcatccgaatgctcgacgtgctcgagtacatacacgagaacgaatacgtgcacggagacatcaaggccgccaatctattgctggggtacaaaaaccctgatcaggtctacttggctgactatgggctctcttatcgttactgccccaacggtaaccacaagcaataccaggaaaatcctcgaaaagggcacaatggaacgattgagttcactagtctggacgctcataagggggtcgcgttatcacgccgctccgacgtcgaaatcctgggctactgtatgctgcgctggctgtgcggaaaactgccttgggaacagaatttgaaggacccagtggccgtacagaccgccaagacaaacctcctggatgaattgccacagagcgtgttaaagtgggcccccagcggatcatcctgctgcgagatcgcgcaattcctggtttgtgcacattctttggcctacgatgagaaacccaattatcaggccctgaagaagatcctcaatccgcacggcatccctctaggcccactcgacttcagcacgaaagggcagagcatcaacgtccatactcccaatagccagaaggtcgatagccagaaagctgcgacaaaacaagtaaacaaggcccacaacaggctgatcgagaaaaaagtgcattctgaaagatctgcagaatcttgcgcaacttggaaagtgcagaaagaagaaaagctaatagggcttatgaacaacgaggccgcacagattcggcagcttggatattag

SEQ ID NO: 211060 - DNA, 1191 bp, synthetic construct
  misc_feature 1..1191: note = Description of Artificial Sequence: Synthetic coding sequence
  source 1..1191: mol_type = other DNA
atgccccccaagcggaacgagaagtacaagctgcccatccccttccctgagggcaaagtgctcgacgatatggagggcaaccagtgggttttaggaaaaaagattgggagtggcggcttcggtctcatctatttagctttccccactaataagcccgagaaggatgctaggcacgtggtaaaggtcgaataccaggaaaacgggccgctgttctcagaactgaagttctaccagcgcgtagctaaaaaggactgcatcaaaaagtggattgagcgcaagcaacttgattacctcgggatcccactgttttacgggtccggactcaccgaattcaaaggcagatcttacaggtttatggtgatggagcggttgggtatcgacttgcagaagatttcgggacaaaacggcacgtttaagaaatctaccgtcttgcagctgggaataaggatgctggacgtgctcgaatacatacacgagaatgagtacgtccatggagatatcaaagccgcaaatttactcctgggatacaagaaccctgatcaggtgtatctcgcggattatgggctctcttataggtactgccctaatggaaatcacaagcaataccaggagaacccaagaaaaggacacaatggcactatcgaattcacttctctcgacgcacacaaaggggtggctctgtccaggagaagtgacgtcgaaattttagggtactgtatgctgaggtggctctgtgggaagcttccatgggagcagaatcttaaagacccagtggcagtccagacagcgaagaccaatctcctggatgaactccctcagagtgttctgaagtgggccccctcaggcagctcatgttgtgaaatcgctcagtttctggtctgcgcacattccttggcctacgacgaaaagccaaattaccaggcactaaagaaaattttaaacccccatggaattcccctaggcccgctggactttagtacaaagggtcaaagtataaacgtgcacacacccaatagccagaaggttgacagtcaaaaggctgctactaagcaggtcaacaaggcccataatcgcctgatcgagaagaaggttcactctgaacgcagcgcagaaagctgtgctacctggaaggtacagaaggaggagaagctgattggtctgatgaataacgaagccgcacagttcaggtag

SEQ ID NO: 211061 - DNA, 876 bp, synthetic construct
  misc_feature 1..876: note = Description of Artificial Sequence: Synthetic coding sequence
  source 1..876: mol_type = other DNA
atgccccccaagcggaacgagaagtacaagctgcccatccccttcccagaggggaaggtgcttgacgacatggaaggcaaccagtgggtcttgggcaagaaaatcgggagtggcggatttggcctgatctacttagcattccccaccaacaagccggagaaggatgcgcggcatgtcgttaaagtcgagtatcaggagaatgggcccttatttagtgaattaaagttctaccagcgggtggccaaaaaagattgcatcgtgtttgttgtcaagaaatggattgagcggaaacaattggactatttgggcatcccacttttctacgggagtggcctgacagagttcaagggccgcagttatagatttatggttatggaacggctgggaattgatctgcaaaagataagcggtcaaaacggaacctttaagaagtcaacggtgttacagctgggcatcagaatgttagacgtcctcgagtacatacacgagaacgagtatgtccacggagatattaaggctgcaaatctgctgctcggctacaaaaatcccgaccaggtgtacttagctgattatggcctgtcctatcggtattgtcctaacggaaaccataagcagtaccaggagaaccctaggaaaggtcacaacggaaccatcgagttcacctctctggacgcacataagggcgtggccttaagtagaaggtctgatgtggagatcctgggctactgcatgctacgctggctctgtggaaagctgccttgggagcaaaatctcaaggatccggtggccgtgcagacagcaaaaacaaagtataagttcagtagcatatctagttgcactgcacccggtcttaagggttacatcaagggaagctag

SEQ ID NO: 211062 - DNA, 1527 bp, synthetic construct
  misc_feature 1..1527: note = Description of Artificial Sequence: Synthetic coding sequence
  source 1..1527: mol_type = other DNA
atgccccccaagcggaacgagaagtacaagctgcccatccccttcccagagggcaaggtcctggacgacatggaaggaaatcagtgggtgctcggcaaaaagatcggctccggtggcttcggcctcatctatctagccttcccgactaacaaacccgagaaggacgcacggcacgtcgtgaaggttgagtaccaggagaacgggcctctgttttccgaattaaagttttatcagagggtggctaaaaaggattgtatcaagaaatggatagaacgtaagcagttggattacctgggcatccctctgttctatggatccgggctgacggaattcaagggccggtcctatcgctttatggttatggaaagattgggaatcgacttacagaaaataagtggacagaacggcacttttaagaagagcaccgtgctccagctcggcatccgaatgctggacgtcctggagtatattcatgagaatgagtacgtgcatggtgacatcaaagccgccaacctgctcctcggctacaagaacccggatcaggtgtacttagctgattatggactgtcctatcggtactgcccaaacggcaatcacaaacagtaccaggaaaacccgcgcaaaggccataatggtaccatcgaattcactagtctcgatgcccacaaaggtgtcgccctgtcccggcgctcggacgtcgagatcctcggctattgtatgctgaggtggctgtgtggaaaactgccctgggagcagaatctcaaagatccggtggccgtgcagaccgctaagaccaatttactggacgaactcccacagtctgtgctgaagtgggctccaagcgggtcttcctgctgcgaaatagctcagtttttagtctgtgcccattcactcgcatatgacgaaaagcccaactatcaggcacttaagaagatactaaatccacatgggataccactggggccacttgactttagcaccaagggtcagtcaatcaacgtgcatacccccaactcccaaaaggttgatagtcagaaagcggcgacgaagcaagtcaataaggctcacaatcgcctgattgaaaagaaagtgcactcggagagatccgcagaaagctgcgccacctggaaggttcagaaggaggagaagctgatcggccttatgaataacgaggccgcccaggaatctactcggagaagacagaagtatcaagagagtcaggaaccactaaacgaggtgaactcttttcctcagaagatctcttacacgcagttccctaattccttttacgaaccacaccaagacttcacgagccctgatatcttcaagaagagcaggagtccttcctggtacaagtacacatcgacggtgagtacaggcattacagacctggagtcttccacgggactctggcccacgatcagccaatttaccctgtctgaggagaccaatgccgacgtctactactatcggatcataatccccgtgttactgatgctggtgtttctagccctctttttcctgtag

SEQ ID NO: 211063 - DNA, 1458 bp, synthetic construct
  misc_feature 1..1458: note = Description of Artificial Sequence: Synthetic coding sequence
  source 1..1458: mol_type = other DNA
atggagggcaaccagtgggtgctgggcaagaagatcggcagcggcggcttcggacttatctacctggcgttcccgacgaataaacctgagaaggatgccaggcacgtcgtaaaggtggaatatcaagagaatggccctctgttcagcgagttgaagttttatcagagagtggccaagaaagattgcatcaaaaagtggatcgagagaaaacaactggactatttgggtatcccactgttttacgggtcaggcctcacggagtttaagggacggagctatcggttcatggtcatggagcgattgggtatcgatttgcagaaaatcagcggacaaaatgggacttttaagaaatctactgtcttgcagctgggcatccggatgttagatgtgctcgaatacatccacgagaacgagtacgtgcacggcgatattaaggcagcgaatctcttgttgggatacaagaatcccgaccaggtatacttggctgattatggtctttcatataggtactgcccaaatggaaatcataagcaataccaggagaatcctcggaagggccacaatggaaccattgagttcacatccctcgacgcccacaagggggtcgccctgagccggagaagcgacgttgaaatcctgggctattgtatgctccgatggttgtgcggcaagcttccttgggaacaaaatttgaaagaccccgttgccgttcagacggctaaaaccaacttgctggacgaactaccacagtccgtgctgaaatgggctccttctggtagttcgtgttgcgagattgcccagtttctagtgtgcgctcatagcttagcatacgatgagaaacccaattatcaggccctaaaaaagatcttgaatccccatgggattccactggggcccctagacttttctaccaagggacagtcaatcaatgttcacacgccaaattcccaaaaagttgatagccaaaaggcggctaccaaacaggttaacaaggcccacaatcgcctgatcgaaaagaaggttcactcagagcggtctgccgaaagctgcgccacatggaaggttcagaaggaggagaagttgattggcttaatgaacaatgaggcggcacaagaaagcacacggaggcggcaaaagtaccaggaatctcaggagcctttgaatgaagtcaactcattcccccagaagatctcatacacacagttcccgaactcgttctatgagccccatcaggacttcacctccccagatatctttaagaaatctcggagtccttcctggtataaatacaccagcacagtaagtaccggcatcacagacctggaatcctcgacgggcctatggccaaccatcagtcaattcactctgtctgaggagactaatgccgacgtgtattattatcgcatcatcattccggttctcctcatgctcgtgttcctcgcattattcttcctgtag

SEQ ID NO: 211064 - DNA, 531 bp, synthetic construct
  misc_feature 1..531: note = Description of Artificial Sequence: Synthetic coding sequence
  source 1..531: mol_type = other DNA
atggccatgagcttcgagtggccctggcagtaccggttccccccctttttcaccttgcaacccaatgtggatacgcgtcaaaaacaactggctgcctggtgttctctcgttctcagtttctgccgcctgcacaagcaatccagcatgacagtcatggaagcccaagagtctcccctcttcaataacgtcaagctccagaggaagcttccggtggaaagcatacagattgttctggaggagctaaggaagaaaggtaatctggagtggctcgacaagtccaaatcctcatttttgattatgtggaggagacctgaagagtggggcaaactaatctaccagtgggtgtcacgctccgggcagaacaactcagtgttcacactctatgagctgacaaatggagaggataccgaggatgaagagttccacggactggacgaagcaaccctgctaagggcactccaggccctgcaacaggaacataaggccgaaatcataactgtcagtgacgggagaggtgtcaagttcttttag

SEQ ID NO: 211065 - DNA, 984 bp, synthetic construct
  misc_feature 1..984: note = Description of Artificial Sequence: Synthetic coding sequence
  source 1..984: mol_type = other DNA
atgagcttcctgggcggcttcttcggccccatctgcgagatcgacattgtgttaaacgacggtgaaacaaggaaaatggccgagatgaagactgaggatggcaaggtggagaagcactacctcttctatgacggcgagagcgtgagtgggaaagtgaatcttgctttcaagcaaccaggcaaaaggctggaacatcagggaattcggatagaattcgttggccagattgagctcttcaacgacaaatcaaacacccacgagttcgtcaatctcgttaaggagcttgccctccctggagaattgacacagtccaggagctacgatttcgagtttatgcaggtggaaaagccttatgaatcgtatattggagctaatgtgaggcttagatatttcctcaaggtgacaattgtcaggagactcacggacctcgttaaggaatatgacctgattgtccaccagctggccacgtatccagatgttaacaactctatcaagatggaagtcgggatcgaggattgcctccacattgaatttgagtacaacaagtccaagtatcacttgaaagacgtgattgtcggcaaaatctatttcctgcttgttcggattaagatacaacatatggaacttcagctaatcaagaaggagattaccggaatcggcccttcaacaacaactgaaaccgagacaatcgctaagtacgagatcatggacggcgcccctgtaaaaggtgagtccatccccatccggctcttcctggccgggtacgatccaacccccaccatgcgtgacgttaataagaagtttagcgtgcgctattttctgaatctggttttggtggatgaagaagacagacgatacttcaagcaacaggaaatcatcttatggaggaaggcccctgagaagctgaggaagcagagaaccaactttcatcaaagatttgagagcccagaaagccaggcttcggccgagcagcctgagatgtag

SEQ ID NO: 211066 - DNA, 984 bp, synthetic construct
  misc_feature 1..984: note = Description of Artificial Sequence: Synthetic coding sequence
  source 1..984: mol_type = other DNA
atgagcttcctgggcggcttcttcggccccatctgcgagatcgacattgttcttaacgacggtgaaacccgcaagatggccgagatgaaaactgaggatggcaaagtggaaaagcactatctcttttacgacggagagtctgtgagcgggaaggttaatctagcattcaagcagcctggcaagcgtctcgagcaccagggcattcgcatcgaatttgtgggacagatcgagctatttaatgataagagtaatactcatgaattcgtcaatctcgttaaagaactcgccctgcctggggagctcacccagagcaggtcttatgacttcgagtttatgcaggtggaaaagccttacgagtcatatatcggcgctaacgtccgcctgagatattttcttaaagtgacaatagttagaaggttgacagacttagtgaaagagtacgatctcatagttcatcagcttgctacataccctgacgtaaataactccataaaaatggaggtcggcattgaagactgtttgcatatagaattcgagtacaataagtctaagtatcacctaaaagacgtgatcgtgggtaaaatctactttctcctggttagaattaagattcaacacatggaattgcagctgattaaaaaggagatcaccggaatcggcccaagcaccacaaccgagacagagacaatcgcaaagtacgagatcatggatggagcccccgttaaaggtgagtctatcccaatccgactgttcctggccggctatgacccaacacctaccatgagggacgtgaataagaaattttctgtccgttacttcttgaacctagtcctcgttgacgaagaggatcggaggtacttcaaacagcaggagataatcctctggaggaaggcgcccgagaaactgcgaaaacagcgtacaaatttccaccagagattcgaaagtcccgagagtcaggcctccgcagagcagccagagatgtag

SEQ ID NO: 211067 - DNA, 756 bp, synthetic construct
  misc_feature 1..756: note = Description of Artificial Sequence: Synthetic coding sequence
  source 1..756: mol_type = other DNA
atgagcttcctgggcggcttcttcggccccatctgcgagatcgacatcgtgctcaatgatggagaaacccgcaaaatggccgagatgaagacggaggacgggaaggtcgagaagcactatctcttctacgacggagagtcagtgtccgggaaggtgaacctggcattcaaacaacccggaaaaagactggaacaccagggcattcgcattgaatttgtgggccagatcgagctttttaatgataaaagcaacacccatgagttcgtgaacctcgtgaaagaactcgcattaccaggtgaattgacacaatcccgcagttatgacttcgagttcatgcaagtcgagaagccgtatgagtcctatattggagccaacgtgaggctccgttacttccttaaagttacgattgtgagaaggctgactgacttggtgaaggaatatgatctaatagtgcaccaactcgccacatatcccgacgtcaacaatagcataaagatggaggtgggcattgaagactgcctccatatagagtttgaatacaacaaatctaaataccacttgaaggatgtaatcgtgggcaagatatatttcctgctcgttcggattaaaattcagcacatggaactccagctgattaagaaggagatcacaggaattggcccctcaaccacaactgagaccgaaactattgcaaagtatgaaattatggatggggctcctgtcaagggcgacaacttcatggagaagagctcttag

SEQ ID NO: 211068 - DNA, 651 bp, synthetic construct
  misc_feature 1..651: note = Description of Artificial Sequence: Synthetic coding sequence
  source 1..651: mol_type = other DNA
atgcaggtggagaagccctacgagagctacatcggcgccaacgtgcgcctgcggtattttctgaaggttacgatcgtacgccgtctcaccgatttggtaaaggagtacgacttgattgtccaccagctggcaacatatccagatgtgaataacagtatcaagatggaggtcggcatcgaagactgcttgcatatagagttcgagtataacaagtctaagtatcaccttaaagatgtaatcgtgggaaaaatttattttctgctggtcaggattaaaatacaacatatggagcttcagctcatcaaaaaggagatcactgggatcggcccgtcaactacgacagagactgagacgattgccaagtatgaaattatggatggcgccccagtgaagggtgaaagtataccgatccggctgttcctggccggttatgatccgacacctaccatgagagacgtgaacaagaagttcagcgtgagatactttctcaatctggtgctggtcgacgaggaagaccgacgttattttaaacagcaggaaatcattttatggaggaaggccccagagaagctccgcaaacagagaaccaatttccatcagcgcttcgagtcacccgagtctcaggccagcgccgaacaacccgagatgtag

SEQ ID NO: 211069 - DNA, 933 bp, synthetic construct
  misc_feature 1..933: note = Description of Artificial Sequence: Synthetic coding sequence
  source 1..933: mol_type = other DNA
atgaccgagaaccccttccaggagcggtacagcgtggaggacctgtcgacctttggtatgtgcttgtgcatggtccgttatgtgtatgacgccttctataaggtaaacctggcatttaagcagcccggaaagcgtctggagcatcagggtatccgtatcgaattcgtgggccagatagagctgttcaacgataaatcaaacacccacgagtttgtcaacttagtaaaagagctggccttgcccggggaattaacacaatcccggtcttacgatttcgagttcatgcaagttgagaagccgtacgagtcatatatcggcgcgaacgtccgactgaggtatttcttgaaagttaccatcgtgagacggctcaccgacttggtcaaggaatacgatctcattgtgcaccagctggctacctacccagatgtgaacaatagcattaagatggaagtgggaatagaggattgcctgcacatagaattcgaatataataaatccaaatatcacctcaaagacgtgatcgtgggaaaaatttacttccttctcgtgcgcatcaagatccagcatatggagctccagctcattaaaaaggagattacaggcattggccctagcactacaaccgagaccgagacgattgctaagtatgagataatggatggcgctcctgtcaaaggggaatccattccaattagactgttcctcgcaggttacgacccgacacctacaatgcgcgatgtgaacaagaagttctctgtgagatatttcttgaatctcgttctggttgatgaggaggatcggagatacttcaaacagcaggaaataatactgtggcgtaaagcacccgagaaactacgcaaacagcggaccaatttccatcagcggttcgaaagtcccgaatcccaggcctctgccgagcaaccagagatgtag

SEQ ID NO: 211070 - DNA, 1011 bp, synthetic construct
  misc_feature 1..1011: note = Description of Artificial Sequence: Synthetic coding sequence
  source 1..1011: mol_type = other DNA
atgagcttcttcggcttcggccagagcgtggaggtggagatcctgcttaacgacgcggaatcccgtaaacgggccgagcacaaaacagaggacggaaaaaaagagaagtatttcctattctacgacggagaaactgtctctggaaaggtgtccctggcgcttaagaatcctaataaaagactggaacatcagggtatcaagatagagtttatagggcagattgagttgtattacgaccgaggcaaccaccatgaattcgtgagtttggtgaaggatttggctcgacccggcgagatcacacagagccaagcgttcgacttcgaattcactcacgtggaaaaaccatatgagtcttacactggacagaacgtcaagctccgttacttcttaagagctaccatcagcagacggctcaatgatgtggtaaaagaaatggacatcgttgttcacaccctgtctacgtaccctgaactgaacagcagtatcaagatggaagtgggtatcgaggattgcctacatatcgaattcgagtataacaaatccaaatatcatctgaaggacgtgatcgtggggaagatctacttcctgctggttaggatcaagatcaagcatatggagatcgacattattaagagggaaaccactgggactggtcctaacgtctaccatgagaatgacaccattgctaaatacgagattatggatggggcccctgtccgcggagagtctattccaataagactctttctggccgggtacgagctgactcccactatgcgagacattaataaaaaattttccgtccggtattatctgaatcttgtgcttattgatgaagaggagcgcaggtacttcaagcagcaggaagtagttctttggcgcaagggcgacatcgtccgtaagtcaatgtcgcatcaggccgcaattgcatcccaaaggtttgaaggcaccacgagcctcggtgaggttcggactcctagccagctctccgacaacaactgtcggcagtag

SEQ ID NO: 211071 - DNA, 666 bp, synthetic construct
  misc_feature 1..666: note = Description of Artificial Sequence: Synthetic coding sequence
  source 1..666: mol_type = other DNA
atgttccacggcatccccgccacccccggcatcggcgcccccggcaacaaacctgagctgtacgaggaagtaaagctctataagaatgctcgtgagagggaaaaatatgacaacatggccgagttatttgccgtagtgaagactatgcaggcattggagaaagcttacatcaaggactgtgtgtcaccctcagagtacacggccgcttgcagtcggctgctggtccaatataaagcagcattcagacaggtgcaggggagcgagatctcctcgattgacgagttctgccgcaagtttaggttggactgtcccttagccatggaacggattaaggaggaccgtcccatcacaattaaggatgataaggggaatctgaatcgctgtattgcagacgtcgtttcactcttcatcaccgtcatggataagttgaggctggagatcagggctatggacgaaatacagccagatctacgggagttgatggagactatgcaccgtatgagccacctgcctcccgattttgaggggaggcaaactgtaagccagtggctccagactctctccggaatgtcagcttcggatgagcttgatgattcccaggtgagacagatgctgtttgacctcgaaagcgcatataatgcctttaacaggtttttgcatgcctag

SEQ ID NO: 211072 - DNA, 702 bp, synthetic construct
  misc_feature 1..702: note = Description of Artificial Sequence: Synthetic coding sequence
  source 1..702: mol_type = other DNA
atgttccacggcatccccgccacccccggcatcggcgcccccggcaataaacctgaactttacgaggaggtcaagttgtataaaaatgctagggagcgcgagaaatatgacaatatggccgagctcttcgcagtggtgaagactatgcaggcgctggagaaggcctacatcaaggattgcgtcagcccctctgagtacaccgcagcgtgttcgagactgctggtgcaatataaggccgctttccgacaggtccagggctccgaaatcagttctattgatgagttctgcaggaagttcagattggattgtcctctggcaatggaacgtattaaagaggaccggccaattactataaaggatgataaagggaatctgaatcgatgcatagcggatgtggtatctctctttattacggtgatggataagttaagattagagatccgagccatggatgaaatccagccggatttgagggaactgatggagactatgcatagaatgagtcatctcccgcctgatttcgaggggcggcagaccgtaagtcagtggtgggttagtctccccgccaggcagagtcctgccgtgcccgaaacccttcccgccagacgatctcccgccgtaccgctccgtccaagcgcacccacatgccccgtgctgcattcacaggccgccgatccagagcgccacgtgggcgtcaggtag

SEQ ID NO: 211073 - DNA, 666 bp, synthetic construct
  misc_feature 1..666: note = Description of Artificial Sequence: Synthetic coding sequence
  source 1..666: mol_type = other DNA
atgttccacggcatccccgccacccccggcatcggcgcccccggcaacaagccagagctctacgaggaagtgaagctgtacaagaatgctcgtgagcgcgaaaagtacgacaacatggccgagttatttgcagtcgtgaaaactatgcaagccctggaaaaagcctatatcaaagattgcgtctcaccatccgaatacactgctgcatgtagtcgtctactggtgcagtataaagcagcattccgccaggtgcagggctctgaaatttcttcaatcgacgagttctgtcggaagttcagacttgattgcccacttgctatggagaggattaaggaggaccgacccattaccatcaaggacgacaaaggtaatctgaatcgctgtatcgcagacgtcgtcagcctgtttattacggtcatggataaactgaggctggagatcagggccatggacgagatccagcccgatttgagagaactcatggagactatgcatcggatgtcacacctcccccccgattttgagggacgtcagacagtatcccaatggttacagacgttatcggggatgagcgcttccgacgaactggacgacagccaagtcaggcagatgctgttcgatctggagtctgcctacaatgcctttaacaggttcctccatgcatag

SEQ ID NO: 211074 - DNA, 1791 bp, synthetic construct
  misc_feature 1..1791: note = Description of Artificial Sequence: Synthetic coding sequence
  source 1..1791: mol_type = other DNA
atggccgcccacctgagctacggccgggtgaacctgaacgtgctgcgggaggcagtgagaagagaactccgggaattcctcgacaagtgcgcagggtcgaaggcaattgtttgggacgagtacttgaccggtccatttggactcatcgctcagtactcccttctgaaggagcacgaagtcgagaagatgtttacattaaaaggaaacaggctgccagcagcggatgtgaaaaacatcatcttctttgtaagaccaaggctggagctgatggacataattgcagagaatgtgctttccgaggatcggcgcggacctacacgggactttcacatactttttgtgccccgcagatctctgctttgcgagcagagactgaaggatctcggcgtgctgggaagttttatccacagggaggaatacagtttggatctgattccctttgacggggacttattgtcaatggaatcagaaggtgccttcaaggaatgctacctcgaaggagaccagacctccttgtaccacgcagccaaggggctgatgacccttcaagctctttatgggactattccccaaatttttggaaaaggcgagtgtgccagacaggtggccaacatgatgataagaatgaaacgggagttcaccgggtctcaaaattcgatctttcctgttttcgacaatcttctcctgctggaccgaaacgtcgacctgctgacgcccttagctacgcagctaacatatgaaggcctgatcgatgagatctacggtatccagaacagctacgtgaagttgcctcctgagaagttcgccccaaagaagcagggtgatgggggaaaggacctgcccacagaggctaaaaagcttcagctgaactctgccgaagagctttatgccgagatcagggacaagaattttaatgccgtgggctctgtcctgagcaaaaaggccaaaatcatctcagccgctttcgaggagcggcacaatgcaaaaacagttggagagatcaaacagttcgtgagtcagctgccccatatgcaggccgcaagaggttctctcgcaaatcacacatccatcgccgagctcatcaaggatgtgacgacctccgaggatttcttcgataaactgaccgttgagcaggagtttatgtctgggatcgacactgacaaggttaacaattacatcgaagactgcattgctcagaaacattcactgataaaagtcctgaggctggtgtgcctgcaatccgtgtgtaattccggactcaagcaaaaagtgttggattattacaaacgcgaaatcctgcagacatacgggtatgaacacatacttaccctgcacaatttggagaaagcgggattgctgaagccacagacgggcggtaggaacaactatcccacaatccggaaaactcttagactctggatggacgacgtgaatgaacaaaatccaacagacatttcatatgtttactccgggtacgcacccctgtcggtgagattggcccagctcctttcccgacccgggtggaggagtattgaagaggtcctgaggattctcccagggcctcactttgaagagagacagcctctgcccacagggctgcagaaaaaacggcagccgggggagaatcgggtgaccctgattttcttcctgggaggcgtcacatttgctgagatagccgccctcagattcctgtcacagctggaggatggcgggacagaatacgtcatcgctaccactaagttgatgaacggtacatcctggattgaagctctgatggaaaagcccttttag

SEQ ID NO: 211075 - DNA, 1854 bp, synthetic construct
  misc_feature 1..1854: note = Description of Artificial Sequence: Synthetic coding sequence
  source 1..1854: mol_type = other DNA
atggccttcccccaccggcccgacgcccccgagctgcccgacttcagtatgttgaagaggctagcgcgagaccagctgatctacctactggaacaacttcctggaaagaaggacttgttcattgaggccgacttgatgagcccgctggaccgaattgccaacgtcagcattctgaaacagcatgaagtagataagctgtataaagtcgagaacaagcctgcgttatctagcaacgaacagctctgctttctcgtacgacctagaattaagaacatgaggtatattgcttccctcgtgaacgcagataagctcgcaggccgtaccagaaagtacaaggttatcttctcccctcagaaattctatgcatgtgagatggtgctggaagaagaaggcatctacggcgacgtctcatgtgatgagtgggctttctcgctactcccactggatgtcgacttgctcagcatggaacttcccgagttttttagggactattttttggaaggcgatcagcgctggattaacacagtcgctcaggcattacacctgctcagcaccctatacgggcccttcccaaattgctacggcatcggcagatgcgcaaagatggcttacgagctgtggagaaacctggaggaggaggaagatggtgaaactaaaggccgacggcccgagattgggcacatatttcttctcgatagagacgtggattttgtcaccgcactttgctcccaagttgtgtatgaaggattggtggacgataccttcagaataaagtgcggctcagtcgacttcggacctgaagtcactagcagtgacaagtcgctcaaggtgctcttgaatgcagaggacaaagtctttaacgaaatccgcaacgagcatttttccaacgtctttggctttctgtcccaaaaggcgcgtaaccttcaggctcagtatgacaggagacgtggaatggatattaagcagatgaagaatttcgtgtcacaggaactgaaaggtttgaagcaggaacatcggctgttgagtctgcatattggagcttgtgaatccatcatgaagaagaagacgaaacaagactttcaggaactgatcaagacagagcatgccctgctggagggcttcaatatcagggagtctacgtcttatattgaagagcacattgatcggcaagtctcccccattgaatctctgaggctgatgtgcctgttatctattaccgagaacggcctgatccctaaagattaccgatcccttaagacacagtatctacagtcctacgggccagagcatctgctgacattttccaacttgagacgagcagggcttctcacggagcaggctccaggcgatactctaacggcggttgagtccaaagtcagcaaattagtcactgataaggccgctggtaagatcaccgacgcattctcatcactcgcgaagaggagtaatttccgagcaattagcaaaaaactgaacctcatacctagggtggacggagaatacgatctgaaggtcccacgggatatggcctacgtctttggaggagcctacgttcccctgagttgccggatcatcgaacaggtgctcgagcggcgatcttggcagggactggacgaagtcgtgcgcttgttaaattgcagtgacttcgcttttacagacatgacgaaggaggacaaagctagttcagagtcgctcaggctgatcctggtggtattcttgggcggttgcaccttctccgagatctcagctctccgattcctgggcagagaaaaaggctacagatttattttcttgacaactgctgttacaaactctgccaggttaatggaagctatgagcgaagtgaaggcctag

SEQ ID NO: 211076 - DNA, 1719 bp, synthetic construct
  misc_feature 1..1719: note = Description of Artificial Sequence: Synthetic coding sequence
  source 1..1719: mol_type = other DNA
atgagccccctggaccggatcgccaacgtgagcatcctgaagcagcacgaggttgataaactgtacaaagtggaaaacaagcccgcattgagcagcaacgaacaattgtgcttccttgttagaccgcgcataaagaacatgcggtatatcgcctccctcgtcaacgccgataaattggctggtcgcacaagaaagtacaaggtgatctttagcccccagaagttctacgcctgtgagatggtgttggaagaagaaggcatctatggggacgtatcctgcgatgaatgggcgtttagcttgctgcccctggatgtggacctgctgtccatggagttaccggagttttttagggattacttcttggagggagatcaaagatggatcaacacggtcgcccaagccttgcatctgctgagcacgctgtacggtccgtttcccaattgctacggcatagggagatgtgctaaaatggcttatgagttgtggcggaacctggaggaagaggaggacggagaaaccaagggcagacggccggagatagggcatatctttctcctggatagagacgttgattttgttactgcactctgtagtcaggttgtgtacgaaggcctcgtggatgataccttccgcatcaagtgcggaagcgtcgacttcgggccagaagtcacctccagtgataagtctctgaaggttcttctgaatgccgaggataaggtctttaacgagatcagaaacgaacacttttcaaatgtgtttggctttctctctcaaaaagcacgaaacctgcaggcccagtacgacaggagaagggggatggatatcaagcagatgaaaaactttgtcagccaggagttgaagggcctgaagcaggaacaccgcttgttgtctctgcacatcggcgcctgtgagtctattatgaagaaaaagaccaagcaagattttcaagagctgatcaagacagaacatgccttgttggagggctttaacattagagagtccacctcatacatcgaagaacatattgatcgtcaggtgagtcccattgaatcactgaggctgatgtgcctgctcagtatcactgagaacggattgattcccaaggactatagatcccttaaaacacagtaccttcagtcatacgggccagaacatctcttgacattctcgaacctgagaagagccgggctgctcactgagcaagcgccgggagataccctgaccgctgtggagagcaaggtttctaaactcgtgaccgataaggcggctggaaagattacagatgcgtttagtagtctggccaagaggtctaacttccgcgctatttcaaagaagctgaatttaatccctcgcgtggacggggagtacgatcttaaggtacctagggacatggcttacgttttcggtggggcctacgtacctttgtcctgccgaatcatagaacaggtgctggaaagaaggtcctggcagggtctggacgaagtggtcaggctccttaactgcagtgactttgcgttcacagatatgaccaaagaggacaaggcgtcaagtgagtctttacgattaatccttgtagttttcctgggtgggtgcaccttcagtgagatctctgcattgcgcttcctaggacgcgagaagggataccgatttatctttctgacgaccgccgttactaactcagcccgccttatggaggctatgtccgaagtaaaggcatag

SEQ ID NO: 211077 - DNA, 2391 bp, synthetic construct
  misc_feature 1..2391: note = Description of Artificial Sequence: Synthetic coding sequence
  source 1..2391: mol_type = other DNA
atgcccaccacccagcagagcccccaggacgagcaggagaagctgttggacgaagcgattcaagctgtcaaagttcaatctttccaaatgaagcgctgccttgataagaataagctcatggatgcactcaagcacgcctctaatatgctgggtgagctgagaacttctatgctgtccccaaagagttattacgaactgtacatggcgatcagcgacgagcttcactacctagaagtatacctgaccgatgaattcgctaaagggcgcaaagtggcagacttgtacgaacttgttcagtacgctggaaatatcattccgcggctgtaccttctgatcacagtgggagtggtctatgtgaaatcattcccacagagcaggaaggacatcttgaaagaccttgtagagatgtgtaggggcgtacagcatccactccggggattattcctgcggaattacctcctccagtgtactagaaacattctacccgatgaaggcgagccaacagacgaggagaccacaggagatatcagcgactcaatggattttgtccttctgaatttcgctgaaatgaataaactgtgggtcagaatgcagcaccagggccattctagagacagggaaaagcgggaaagggagcgccaggagctgcgcatactggtagggacaaacttagtgcgcttgagccagctggaaggcgtgaacgtggaaagatataagcagatcgtcttaaccggaatcctcgagcaggttgtaaactgtcgtgacgcgttagctcaggagtatctaatggagtgcatcatacaggtgttcccagatgagttccacctgcaaaccttgaatcccttcttacgggcttgcgctgagcttcatcagaacgtaaatgtgaagaacataatcatcgctctgatagacaggctagccctatttgcccatcgggaggacggccccgggattccagccgacatcaaattgttcgatatcttctcccaacaggtcgccaccgtcatacagtctaggcaggatatgccgtctgaggatgttgtgagcttgcaggtatctctcatcaatctggcaatgaagtgttaccccgatcgagtggactatgttgataaagttctcgagaccactgtggagatctttaataagctgaaccttgaacacatcgccacttcctccgcagtctccaaggagctgacaaggttacttaaaattccagtcgacacctataataatattctcaccgtcctcaaactgaaacattttcacccattgtttgagtatttcgactatgagtcccggaagtccatgtcttgctatgtgctgagtaacgtgctggattataatacagagattgtatcccaggaccaggtggattctataatgaacttggtgtccacgctgatccaagaccaaccagatcagcccgtggaggacccagaccccgaagattttgccgatgagcagtctttagtgggaaggttcatccatttgctcagatcagaagacccagaccaacagtatctgatcctgaatactgctcgtaagcattttggggcagggggcaaccaaagaatcagattcactttgccacccttggtttttgccgcatatcaactcgcattccgctacaaagagaacagtaaagttgatgataagtgggagaaaaagtgccagaaaattttttcctttgctcaccagacaattagcgccttaatcaaagcggaacttgctgagttgcccttgcggctattcctgcaaggagccctcgccgcgggcgagatagggttcgaaaatcatgagaccgtagcatatgagttcatgtcccaggctttttccctgtatgaggacgagatcagcgattccaaggctcagctagccgccattaccctgatcattggtacctttgaaagaatgaagtgcttcagcgaagagaaccatgagcccctgcggacccagtgtgctctggccgcctccaagcttttgaagaaaccagaccaaggtagagccgtgtcaacatgcgcgcatctgttctggagtggccggaatacggacaaaaatggggaggaactgcatgggggtaaaagagtgatggaatgtttgaaaaaggccctaaagatcgccaatcagtgtatggacccctccttacaggtgcaactttttattgagattctgaatagatatatctacttttacgagaaggagaatgacgcagtcacgatacaggtgttaaaccagctcattcagaaaatcagggaggacctccccaacctggagtccagcgaggaaaccgagcaaatcaacaaacacttccataacaccctcgagcacctaagactgcgccgggagtcgcccgagagcgagggacccatatacgaaggccttatcctctag

SEQ ID NO: 211078 - DNA, 1989 bp, synthetic construct
  misc_feature 1..1989: note = Description of Artificial Sequence: Synthetic coding sequence
  source 1..1989: mol_type = other DNA
atgtgccggggcgtgcagcaccccctgcggggcctgttcctgcggaactatctactccagtgcacaaggaatattctccctgatgagggtgagcccactgacgaagagacaacgggtgacataagtgattcaatggatttcgtcttgctaaatttcgctgagatgaacaagttatgggtgagaatgcagcaccagggacactcaagagatagagagaagcgcgaacgcgagaggcaggaactgcggattctcgtaggaaccaatctcgttcgtctgtcgcaattggaaggagtgaatgtggaacggtacaagcagatcgtgttgacaggcattctggaacaagtcgtgaactgtagggatgctctggcgcaagagtaccttatggaatgtattatacaggtattccctgacgagtttcacttgcaaacattgaacccttttctgcgggcctgcgctgagctccatcaaaacgtgaacgtgaaaaacattatcatcgcactcattgaccggctcgccctttttgcccatcgggaggacggtcccggcattcctgctgacatcaagctgtttgatattttctcccaacaggtggctaccgttatacagtccagacaggatatgccttccgaggatgtagtgtccctccaggttagtctaattaatttggcgatgaagtgttatcccgatcgggtcgattatgtggataaggttctggagaccacagttgagatcttcaataaactgaacctcgagcatatcgcaactagctctgctgtgagtaaggaactgacaaggttgctcaaaatcccagttgacacatacaataacattctgacggtattaaaactgaaacactttcaccctctcttcgaatacttcgattatgagagcagaaagtccatgtcgtgctatgtgctgtctaacgtgttagactacaatacggaaattgtgtctcaggaccaggtagactccatcatgaacttagtatcaacattgatccaggatcagcccgaccaacctgtcgaggatccagaccctgaggattttgccgatgagcagtccctggtggggcggtttattcatctcctgagaagcgaggaccctgaccaacagtacctgatcttaaacaccgcgcggaagcactttggagccggcgggaaccagaggataagatttactctgccacctctggtgttcgctgcttatcagctggccttcaggtataaagagaattctaaagtggacgacaagtgggaaaagaagtgtcagaagattttctctttcgcccaccagaccatctccgccctaattaaggccgaactggctgaactaccactccggctcttcctccagggcgcactagccgctggcgaaatcggtttcgagaatcacgagacagttgcctatgagtttatgtctcaagcctttagtttatatgaagatgaaatctctgattccaaggcacaactggcagccattactctgatcatcggcacatttgaaaggatgaagtgtttttcagaggaaaaccatgagccgctacgcacacaatgcgcactggcggcctccaaacttcttaaaaagcccgaccagggacgtgccgtttctacgtgtgcacacctgttttggtctggccgcaataccgacaagaatggggaggaactacacggtgggaagcgggttatggagtgcctgaagaaagccctgaagattgctaaccagtgcatggatccaagccttcaggtccagctcttcatcgagattctgaacaggtacatttatttctacgagaaggaaaacgatgcaattgtgacaattcaggtgctgaaccagttaatccaaaaaatccgcgaggacctgcccaatcttgagagtagtgaggagactgagcagataaacaaacatttccataacaccctcgagcatctgcgactccgacgggagtcacccgaaagcgaggggccgatctatgaggggctgatcctatag

SEQ ID NO: 211079 - DNA, 1161 bp, synthetic construct
  misc_feature 1..1161: note = Description of Artificial Sequence: Synthetic coding sequence
  source 1..1161: mol_type = other DNA
atggaccggttcgtgtggaccagcggcctgctggagatcaacgagacattggtgattcagcaacggggcgtaaggatctatgatggggaggaaaagattaagtttgacgcaggcacgctgcttctgagtactcaccgcttgatatggagagatcagaagaaccacgagtgttgtatggcaatcctgctcagccagatcgtattcatcgaggagcaggctgcagggatcggaaagtctgctaaaattgtggttcatctgcacccggcccctccaaacaaggagcccggaccatttcagagttcgaaaaatagctatatcaaattgtcctttaaagaacatggtcagattgagttttacagacgtctctccgaggaaatgactcaacgccggtgggaaaacatgcctgtatcacagtcactccaaacaaatcgcgggccacaaccaggccgcatacgggccgttggaattgtcggtatagaacgcaaactcgaggagaaacgcaaagagacagataaaaacatctcagaagcatttgaagatctatccaaactcatgattaaagcaaaggagatggtcgagctgagtaaatccatcgcgaataagataaaggacaagcagggagacatcaccgaggacgaaacaattcggttcaagtcctacctgctctcgatgggaatcgccaaccctgttacccgggaaacatatggatctggcacacagtatcatatgcagctggccaagcagctagcgggaatcctgcaggtgcccctagaagaacgcgggggcattatgagtctcacggaggtgtactgtctggttaaccgagccaggggaatggaacttctctctccagaagatttggtgaacgcatgcaagatgctggaagccctgaagctaccgctccgcttacgagtgtttgatagcggcgtgatggtaattgagctgcaaagccataaggaagaggagatggtcgcctcagctttagaaaccgtgtcggagaaaggttcactgacctcggaagagtttgccaagctggtgggcatgagtgttttattggcgaaagaaaggctgctgctcgccgagaaaatgggccacctctgcagggacgatagcgtcgagggcttgagattctatccgaatctgttcatgacccaatcttag

SEQ ID NO: 211080 - DNA, 558 bp, synthetic construct
  misc_feature 1..558: note = Description of Artificial Sequence: Synthetic coding sequence
  source 1..558: mol_type = other DNA
atgagctggctgttccccctgaccaagagcgccagcagcagcgccgccgggtctcccggcggactgacatccctccagcagcagaagcaaagactgattgaaagtctgcgtaactctcattctagcatagcggaaattcagaaggatgtcgagtaccggctgcccttcactattaacaatcttactatcaacattaatattttactacctccccagttcccgcaggagaagccggttatctctgtctaccctcccatacggcatcatctgatggataaacagggcgtctacgtgacgtcccccttagtaaataatttcactatgcacagtgacctcggcaagattattcagagtctgctcgacgagttttggaagaacccacctgtcctggccccaacctcaacagcatttccctatcagctggaaatccgttggcaccacccccattgcctcgaaatttccctggcccgctctagcaatagtttggggttttccattagcagcagtatttcatcgaccaggtccaaacaggaatatcacttcttcatatgctgctag

SEQ ID NO: 211081 - DNA, 1194 bp, synthetic construct
  misc_feature 1..1194: note = Description of Artificial Sequence: Synthetic coding sequence
  source 1..1194: mol_type = other DNA
atgagctggctgttccccctgaccaagagcgccagcagcagcgccgctgggtctcctggaggacttacctcactgcagcaacaaaagcagaggctcatagagagcctcaggaacagccactcaagcatcgcagagatccagaaggacgtggaatacagactgccttttactattaacaatctgaccataaatatcaatatcctcctgcccccacagttcccgcaagagaagcctgtgataagcgtctacccgccaatccgccaccacctcatggataagcagggcgtttacgtgaccagcccacttgtcaacaacttcacaatgcactcggacctcggcaaaattattcagtctctgttggacgagttttggaaaaatccccccgtgctcgcacctacatccaccgccttcccatacctctacagtaatcctagtggaatgtctccctacgcctcacaaggcttcccttttttgcccccttatcctcctcaggaggctaatcgaagcattacgagtctgagcgtagcagacaccgtcagctccagcacaaccagccacaccaccgcgaaacctgctgctccctctttcggcgtattgtcaaacttaccgctcccaatacccacggtggatgcgagcataccaaccagccagaacggtttcggctataagatgcctgatgtccccgatgcttttccagaactctcagaactatctgtgtcccaactgacggatatgaacgaacaggaggaagtcctactggagcaatttttaacgctgcctcagttgaagcagatcataacggacaaagacgatctcgtcaaatcgattgaagaactcgccaggaagaacctcctgctcgagcccagtctggaagcaaagcgccagacggttctggacaaatatgagctgttgacacagatgaaaagtaccttcgagaagaaaatgcagcgacagcacgagctgtctgaatcctgtagtgccagcgccctgcaggcacgtttaaaggtcgccgcacatgaggccgaagaggaatccgataatatagcagaagactttctggagggcaaaatggagatcgatgacttcttaagctctttcatggaaaaacgcaccatctgtcattgtcgccgggcaaaagaggaaaagctgcagcaggctatcgccatgcattctcaatttcatgcaccgctctag

SEQ ID NO: 211082 - DNA, 1119 bp, synthetic construct
  misc_feature 1..1119: note = Description of Artificial Sequence: Synthetic coding sequence
  source 1..1119: mol_type = other DNA
atgagctggctgttccccctgaccaagagcgccagcagcagcgccgctggaagcccgggcgggcttactagtctgcagcaacaaaagcagagactgattgagtccctccgcaactcacactcacgtctcctcccccctcagtttcctcaagaaaaaccagtgatatcagtctaccccccaatcagacaccacctgatggacaagcagggtgtctacgttacaagtccccttgtaaacaatttcactatgcactcagacctcgggaagatcatccagagtctgctcgatgagttttggaaaaatcccccagtgttagcccctacatctaccgccttcccttacctttacagcaacccaagtggtatgagcccgtacgcctcacaaggctttccttttctgccaccttacccccctcaagaggcaaaccgtagtattacttcattatcagtcgctgacaccgtgagcagttctaccacttcacatactacagcaaagccagcagccccctcttttggagttctctccaatctgcccctgcccatcccaaccgtggacgctagtatcccaaccagtcagaatgggttcggatacaagatgccggacgtgccagatgcctttcccgaattatctgagctgagcgtgagtcaactaactgacatgaatgagcaagaagaggtgctgttggagcagttcttaaccctgccccagttgaaacagattataacggacaaggatgacttagtgaaaagcatagaggaattagccagaaagaatttgctattggaacccagcctggaagccaagaggcagacagtgctcgataaatacgagttactgacacagatgaagagcacattcgagaaaaagatgcaacgccagcacgagttatctgagagttgtagcgccagtgcccttcaggcaaggctcaaagtggcagcgcacgaagccgaagaagaaagcgataatatcgctgaggacttcctggaaggcaagatggagattgacgacttcctgtcttcattcatggagaagcgcactatctgtcactgtcgacgggcaaaagaggaaaagcttcaacaggccattgctatgcattctcagtttcacgcacccctttag

SEQ ID NO: 211083 - DNA, 858 bp, synthetic construct
  misc_feature 1..858: note = Description of Artificial Sequence: Synthetic coding sequence
  source 1..858: mol_type = other DNA
atggccggcgccggcagcgaggcccggttcgccggcctgagcctggttcagttaaacgagctcttagaggatgagggtcagctgacagaaatggtacagaaaatggaagaaacccagaacgtgcagctgaacaaagaaatgacactcgccagcaacaggagcctggccgagggcaatctgttgtaccagcctcaactcgacacactgaaggcgagacttactcagaaatatcaggaactgcaggtgctgttcgaggcctatcagattaaaaaaacaaagctagatcgccagtcaagtagcgcgtcactggagactcttctcgcactcctccaggcagaaggtgccaagattgaagaggatacagaaaacatggctgagaaattccttgatggcgagctgccattggactccttcatagacgtttaccagagcaagcgtaaactggcacatatgcgtcgagttaaaatagagaagctgcaggaaatggttctcaagggacaacgcctgccacaggccctggctcctcttcccccccgtctgcctgagcttgcaccaacagctccgctcccttatcctgcaccagaggcctctggaccccctgcagtggcaccccggagaataccccctccccctcctccggttccggccggacggctagctaccccatttactgccgcgatgagctctgggcaagctgtaccgtacccaggcctgcaatgccctcccctgccacccagggtagggttgcctacgcaacaggggtttagtagccagtttgtgtcaccttaccccccccctcttcctcaacgccccccgccgagactgccaccccatcagccaggatttattctccagtag

SEQ ID NO: 211084 - DNA, 1068 bp, synthetic construct
  misc_feature 1..1068: note = Description of Artificial Sequence: Synthetic coding sequence
  source 1..1068: mol_type = other DNA
atggagaccctgaaggacaagaccctgcaggagctggaggagctgcaaaatgacagtgaggcaatagaccagctggccctcgaaagcccggaggtgcaggatttgcagctggaacgggagatggcccttgctacaaacaggagcctggcagaacgcaacctggaattccaaggccctttagaaatctcaaggagcaacctgagtgatagataccaggagctgagaaaattggtagagagatgccaggagcaaaaggccaagctggagaagttttcttcagctctgcagccaggaactcttctggatctgctacaggtcgagggcatgaagatagaagaagaatctgaggcgatggcggagaagtttctggagggggaagtgccattagagacatttctggagaatttcagctccatgaggatgctctctcatcttcggagggtgagagtggagaagctgcaggaggtggtgaggaagccgagagcatcacaagaactggccggggatgcacctcctcccaggccaccaccgcccgttagacccgtcccccagggaacacctccagttgtggaagagcagcctcagccccccctggctatgccaccttacccactcccatactctcccagtccttcccttcccgtaggaccaactgctcacggggcactacccccggcccctttcccagtagtttcccagcccagcttctactctggacctctgggcccaacttacccggcggctcaattaggaccgaggggtgcggccggatacagctggtcacctcagcggtcaatgcctccacgccccggctatccaggaacacccatgggagccagcgggcctggctatcctttgaggggcgggagagcgccctcaccaggctatcctcagcagtccccttaccctgctaccggtgggaaacccccttatccaatccagcctcagctcccaagctttccgggccagcctcagccttcagtgcccctgcagccaccatacccacccgggcctgcacccccttatggatttccaccaccaccgggccccgcctggccagggtattag

SEQ ID NO: 211085 - DNA, 447 bp, synthetic construct
  misc_feature 1..447: note = Description of Artificial Sequence: Synthetic coding sequence
  source 1..447: mol_type = other DNA
atggagaccctgaaggacaagaccctgcaggagctggaggagctgcagaacgacagcgaggctatagaccagttggccctcgagtcgccagaggtgcaagatctgcagctagaaagggagatggctctcgccaccaatagaagcctggctgaacgcaatctggagttccaggggcccctggaaatcagtagatctaatctctccgatcgctaccaggagttgcgtaagctcgtcgaaaggtgtcaggagcagaaggcaaaactagagaagtttagctcggccctgcagcccgggacactcctggacctgctgcaggttgagggaatgaagatcgaggaagaaagcgaggccatggcggagaaattcttggaaggggaagtgccactagagacctttctagagaacttctccagtatgagaatgttaagccacctgagaagggtatag

SEQ ID NO: 211086 - DNA, 969 bp, synthetic construct
  misc_feature 1..969: note = Description of Artificial Sequence: Synthetic coding sequence
  source 1..969: mol_type = other DNA
atggagaccctgaaggacaagaccctgcaggagctggaggagctgcagaacgattccgaagctatcgaccagctggcacttgaaagtccagaggttcaggatctccagctcgaacgggagatggcgctggcaacgaaccgttcccttgcggagaggaacctggagttccaggggcccctggaaatttcccggagcaaccttagtgaccgctaccaggagcttaggaagcttgttgagcgatgtcaggaacagaaggctaaattggaaaaattcagctctgccctgcaacctggtacgttgctggacttgcttcaggtagaaggcatgaagatagaagaggaatccgaagctatggctgaaaagttcctggagggagaggtgccactggaaactttcctggagaacttctcctccatgcggatgctttcacatctccgaagggtgcgcgtcgaaaaactgcaggaggtagtgcggaagcctcgtgcctctcaggaactagctggcgacgccccaccacccaggcctccgccccctgtgcggccagttcctcagggtacccccccagtagtcgaagagcagccccagccgcctctagcgatgccaccttaccccttgccatattcacccagtcccagcctgcccgtgggcccaactgcacacggggcccttccgccagccccattcccggtcgtgagccagccatccttctacagcgggccactgggcccgacctaccccgccgctcagttaggaccaaggggcgccgcaggctattcttggagtccacagcggtctatgcctccacggcccggatatcccgggacgccaatgggtgcttcaggtccaggttaccccctccgggggggccgagccccttctcccgggtatccccaacagagtccttatcccgcgaccggcggcaaacccccttaccccatacagccacaactgcccttctccctatgttag

SEQ ID NO: 211087 - DNA, 756 bp, synthetic construct
  misc_feature 1..756: note = Description of Artificial Sequence: Synthetic coding sequence
  source 1..756: mol_type = other DNA
atgtaccgggcccgggccgcccgggccggccccgagcccggcagccctggaaggttcgggatcctttctacgggccaattgcgcgatctgctgcaggacgaacccaaattggataggatcgtgcgcttgtcccgtaagtttcagggcctgcagctggaaagggaagcttgcctggcctccaattacgcactggctaaggagaatttagccctgcggccacggctggagatgggacgcgccgctctggccattaaatatcaggaactccgggaagtagcagagaactgtgcagataaacttcaaaggttggaagaaagtatgcaccggtggagcccccattgcgctttggggtggttgcaggcagagctcgaagaagcagagcaggaggctgaggagcagatggagcaactgcttctgggagagcagagtttagaggccttcctgcccgcttttcagcgcggaagagctctggcacatttgaggcgcacccaggcagaaaagctacaggaactcctcagacgcagagagcgatccgctcagcccgcccctacatcggcagccgatcctcctaaaagctttccggccgctgcagtcctgccaacaggcgccgcccgggggccacctgccgtgcctagatcactcccgcctttagatagtaggcccgttcctcctcttaagggcagtcctggatgcccgctgggcccagctccactcctgtccccccggccttctcaacctgagccgccacaccggtag

SEQ ID NO: 211088 - DNA, 2628 bp, synthetic construct
  misc_feature 1..2628: note = Description of Artificial Sequence: Synthetic coding sequence
  source 1..2628: mol_type = other DNA
atgcacgacgccttcgagcccgtgcccatcctggagaagctgcccttgcaaatcgattgtttggccgcctgggaggaatggctactggttgggaccaaacagggtcacctcctactctaccggatcaggaaagatgtcggatgtaataggtttgaagttaccctggaaaagtctaacaagaatttcagcaaaaagatccagcagatccatgtagtctcccagttcaagatcttggtgtccctgctggaaaacaacatttacgttcatgatctcctcacattccagcagatcaccacagtgagtaaggccaagggtgcctcgctctttacttgcgacttacagcatacagagactggcgaagaggtgctgcgcatgtgtgtggccgtgaagaagaaactccagctgtatttctggaaagaccgggagttccacgaactgcagggagacttcagcgtgcccgacgtgccaaagagtatggcctggtgtgaaaacagcatttgcgtgggctttaagagggattactatctaatccgggtggacggaaagggatctatcaaggagctgtttcctaccgggaagcaactcgaacctctggtggcacctcttgcagacggcaaggtagccgtgggccaggatgatttaaccgtggtcctgaacgaggaagggatttgcacgcaaaagtgcgctctcaactggaccgacatccccgtggcaatggaacaccaaccaccttacattattgcggtcctgcctagatatgtagagatcagaacctttgaaccgcgcctcctggttcaatccatcgaactgcaacgccccaggttcataaccagtgggggttcaaatatcatttacgtcgcaagcaaccactttgtttggcgactcattccagtccccatggccacccaaattcagcagctgctccaggacaagcaatttgagctagctctgcaactggccgaaatgaaagacgacagcgactcagagaagcagcaacaaatccaccacatcaagaacctgtacgcatttaatctcttttgccagaagagattcgatgaatctatgcaggtctttgccaaattaggcaccgatccgacccacgttatgggactgtatccggatttgcttcccacagattaccgaaaacaactccagtacccgaaccctctgccggtgctgtctggcgcagaattggagaaggcacatctggccttgattgattatctgactcaaaagcgctctcagttggtgaaaaaactcaatgacagcgaccaccagagctctacatcccctttgatggaggggacacccaccatcaagtctaagaagaaattactgcagattatcgacacgaccctgctgaagtgttacctccataccaatgtggccctcgtggcgccactactgagacttgagaacaaccattgccatatcgaggaatcagagcacgtgctgaagaaggcacataagtacagtgagctgatcattctatatgaaaagaagggcctccacgaaaaagccctccaggttttggttgaccagtcgaagaaggccaactcaccccttaaaggacatgagcgcacagtgcaatatcttcagcacctgggcactgaaaacctgcacctcatattcagctactcagtctgggttctgcgggattttcctgaggatggactgaaaatcttcactgaggatctgcctgaggtggagagtctgcctagagatcgtgtgctgggttttctgatcgaaaacttcaaaggcctggccataccctacctcgagcatattatccacgtatgggaggaaacaggctcacgcttccacaattgccttatccagctgtactgcgaaaaggtgcagggacttatgaaagagtacttactgagcttcccagccggaaaaactcccgtgcctgccggggaggaagaaggagaattaggagagtatcggcagaagctgctgatgttcctcgaaatcagcagctactacgacccagggagacttatctgcgatttccctttcgacggcttactcgaagagcgggcgcttttactggggcgaatgggcaagcacgaacaagccctgttcatatacgtacacatcttaaaggacacccgaatggctgaggagtattgccacaagcactacgatcgtaataaggatgggaataaggatgtttatctgagccttttacggatgtacctgagcccaccttctatacactgcctcgggcccattaagctagagctgttagaacccaaagccaacctgcaggctgcacttcaagttttggagctgcaccattctaaactggatacgaccaaagcactgaacttactcccagcaaacactcaaataaatgatattcggatcttcctcgagaaggtgctggaagagaacgcccagaagaaacgtttcaatcaggtcctgaagaaccttctccacgccgagtttctgagggtccaggaggaacggatccttcatcagcaagtgaaatgtatcatcacggaagagaaggtttgcatggtgtgtaaaaagaaaattggtaacagtgcgttcgctagatacccaaatggggtggttgtgcactacttttgttctaaggaggtgaaccccgccgacacttag

SEQ ID NO: 211089 - DNA, 2661 bp, synthetic construct
  misc_feature 1..2661: note = Description of Artificial Sequence: Synthetic coding sequence
  source 1..2661: mol_type = other DNA
atgcacgacgccttcgagcccgtgcccatcctggagaagctgccccttcagatcgactgtctggctgcctgggaggagtggttgctggtcggaaccaagcagggccatctactcctgtaccgcattcgaaaggatgtggttcccgcagatgtcgcatcccccgagagcggatcctgcaatcgattcgaagtgacattggaaaaaagcaacaagaatttctctaaaaagattcaacagattcacgtcgtctcacagtttaaaatactggtgtccctgcttgagaataatatctatgtccacgatctcctgaccttccagcagatcacaacagtcagcaaggccaagggcgcctctctgttcacatgcgatctccagcatacagagacaggagaggaggtgctgaggatgtgtgtagccgtgaagaaaaagctccagctttatttttggaaagatagggagttccatgaactacagggggatttcagtgtgcccgatgtgccaaagtccatggcttggtgtgaaaactctatctgtgtgggatttaaacgggactactacctgatacgtgtcgacgggaagggttccataaaggagttatttcctaccggtaaacagctcgagccattagtggcccccctcgctgacggaaaggtggccgttggtcaggatgatttgaccgtggtactcaacgaggagggaatctgcacacagaaatgtgccctgaactggactgacattcccgttgctatggaacatcagcctccttacataattgccgtgctcccacgttacgtggaaattagaacctttgagccacgacttctcgtgcagtccattgagttgcagagaccaaggttcattacctcaggcggatccaatattatctatgttgcctcaaatcactttgtatggagattgatccccgtccccatggctactcagatacagcagctgcttcaggataagcagttcgagctcgctctccaactggccgaaatgaaggacgattcagacagcgaaaagcaacagcagattcaccatattaagaacctgtacgcgtttaatctcttctgtcaaaagaggtttgatgaaagcatgcaagtgttcgccaagttggggactgatccaacgcacgttatgggactctaccccgaccttttgccgacagattaccggaaacaactgcagtaccctaaccctctgccggtactctctggcgcagagttggaaaaagctcatttggcactgattgactacctgacccagaaaaggagtcaactggtaaagaaattaaatgacagcgatcatcagtcaagcacgagcccattaatggagggtacaccaactataaaatcgaagaaaaaacttttgcaaataatcgacactactctgttaaagtgttacctacacaccaacgtcgcactagtggctccgctgcttcgccttgaaaataaccattgccacattgaagaaagtgagcacgttctgaaaaaagcccataagtactccgaattaatcattctctatgagaaaaagggactgcacgaaaaggctctgcaggtgcttgtagaccagagtaagaaagcgaattccccccttaaaggccatgagaggacggtgcagtaccttcagcatttagggaccgaaaacctgcacctcatctttagttactcagtgtgggtgttacgggacttcccagaggacggcctgaaaatcttcacagaggatcttcctgaagtagaaagccttccccgagatagagtgttgggcttcctgatcgaaaacttcaagggcctcgcgatcccgtaccttgagcacatcatccacgtttgggaagaaaccggttcccggttccataactgtcttatacagctatattgcgagaaggtacagggtctcatgaaggagtacctgttatccttcccggccggcaaaacccctgttccggcaggtgaagaggaaggcgaactaggagaatataggcagaaactgctaatgttccttgagatctcttcctactatgaccccggtcgattgatttgtgatttccccttcgatggactactggaagagcgcgctctcctcttaggtcgcatgggcaagcacgagcaggctctctttatttatgtacatatcttgaaagacacccgcatggcagaagaatactgccacaaacactacgaccgcaataaggacggtaataaggacgtgtatttgagtctgcttcggatgtacttgtctccccccagcatccactgcctcgggcccatcaagcttgagctgcttgagcccaaggctaacctgcaggctgcactccaggtgctcgagctgcatcactccaagctggacactacaaaggcgctcaacttgctccccgccaatactcagattaatgacattcggatatttttagaaaaggtactagaggagaacgctcagaagaagcggtttaatcaagtcttaaagaatttactccacgccgagtttcttcgggtgcaggaagaaagaatacttcaccaacaggtgaaatgcatcatcaccgaggagaaagtttgcatggtgtgcaagaaaaaaattggcaattccgcttttgctagatatcccaacggtgtggtggttcactacttttgttcgaaagaggtgaaccccgctgatacctag

SEQ ID NO: 211090 - DNA, 1314 bp, synthetic construct
  misc_feature 1..1314: note = Description of Artificial Sequence: Synthetic coding sequence
  source 1..1314: mol_type = other DNA
atgaccaccagcaccctgcagaaggccatcgacctggtgaccaaggctaccgaggaggacaaggccaaaaattatgaggaggctctgcggctgtaccaacatgccgtagagtattttctgcacgccatcaaatacgaggctcattccgacaaggccaaagagagcatcagggctaagtgcgtgcagtatctggatagggctgagaaacttaaggactatctacggtctaaagagaagcacgggaagaagcccgtaaaagagaatcagtccgagggcaaaggctcggacagcgactctgaaggcgataacccagagaagaagaaacttcaagagcagctcatgggtgcagttgtgatggaaaaacccaacatccggtggaacgacgtggctggacttgaaggcgccaaagaagccctgaaggaggccgttatcctccctatcaagttcccccatttattcacaggtaaacgaaccccttggagaggaatactactctttggtcctccaggaaccgggaagtcgtacttggctaaggcagtagccacagaggccaacaactccacgttcttctcagtctcaagtagtgatctcatgtctaagtggctaggagagtccgaaaaacttgtaaagaatctgttcgaattggcaagacagcataagccttccatcatcttcatcgacgaggtagactcactctgcggatcgcgaaacgaaaatgaatccgaggctgcccgccgaatcaagaccgagttcctggtgcagatgcagggggtggggaacaacaacgacggcacattagtcctgggggctacaaacattccttgggttttagacagtgccatccggagaaggtttgaaaagcgaatctacatccctctgcctgaagaagccgcccgcgcccagatgttcagacttcacctcggtagcacacctcacaacctgacagacgccaacatccatgaactggcccgaaagaccgaaggctactccggcgctgacataagtatcattgttagggacagcctgatgcagcccgtacgcaaagtccagagcgctacccactttaaaaaggtttgcggaccctctaggactaacccatcaatgatgattgatgacctgttgacgccatgttctccaggcgatcccggcgccatggaaatgacctggatggacgtgcctggggacaagttgttagagccggtggtttgtatgtctgatatgctgcgcagccttgcaacgacaaggcccacggtgaacgccgacgatttgctgaaggtgaagaagttcagcgaagattttgggcaggaatcttag

SEQ ID NO: 211091 - DNA, 1335 bp, synthetic construct
  misc_feature 1..1335: note = Description of Artificial Sequence: Synthetic coding sequence
  source 1..1335: mol_type = other DNA
atgagcagcaccagccccaacctgcagaaggccatcgacctggccagtaaggccgcccaagaggacaaagccggcaattacgaagaagcattacaactgtaccagcacgccgttcaatacttcctgcatgtcgtcaagtatgaggcccagggtgacaaggctaagcagagcattcgcgcaaagtgcacagagtaccttgatagggctgagaagcttaaagagtatctgaagaacaaggagaagaaggctcaaaaaccagtcaaggagggacagcctagtccagctgacgaaaaggggaatgattctgatggtgaaggagaaagcgatgatccagagaagaagaaacttcaaaaccaactgcagggcgcaattgttatcgaacgcccaaatgtgaaatggagcgacgtcgctgggctcgagggagccaaggaggccctgaaagaagcagtgatcctccctatcaagttcccccacctgttcaccggtaagagaacaccatggcgggggatcctcttatttgggccgccgggcactggcaaatcctatttggctaaggccgttgccaccgaagcaaacaacagcacattctttagtattagcagttccgatctggtgagcaaatggctaggagagtctgagaaattggttaagaacctgttccagttggctcgagaaaataaaccttctataatatttattgatgaaatcgactctctgtgcggctccaggtcagagaacgagagtgaggccgcaaggaggattaagactgaattccttgtgcagatgcagggagtgggcgttgataacgatggaattctcgtacttggggccactaacattccctgggtattggactctgccatccggaggcggtttgaaaagagaatttacatcccactacccgaaccacacgcacgagcagcaatgtttaaacttcatctgggaacaacccagaatagcttgaccgaagcagacttcagggaattgggccggaaaacagacggttattcaggggcagacatctccattatcgtcagggacgcgctgatgcagcctgtccgtaaggtacagtccgctactcattttaaaaaggtgagaggccccagccgtgcagaccctaatcatctggtggatgaccttctgactccttgctccccaggggacccaggtgctattgagatgacatggatggacgtgccaggagataagctgctagaaccagtggtgtcgatgagtgatatgctgaggtcactgtctaatacaaaacctaccgttaacgaacacgacctccttaagttgaaaaagttcaccgaggattttggccaggaaggatag

SEQ ID NO: 211092 - DNA, 630 bp, synthetic construct
  misc_feature 1..630: note = Description of Artificial Sequence: Synthetic coding sequence
  source 1..630: mol_type = other DNA
atggccgaggccgaggagcaggagaccggcagcctggaggagagcaccgatgagtcagaagaagaagagtcagaggaagaacctaagttgaagtatgaacgcctgtctaacggcgttacagagatccttcagaaagatgccgcttcatgcatgactgtgcacgataagtttctggctctgggcacacattatgggaaggtgtatctgctcgacgtccaaggaaacatcacacagaaattcgatgtgagtcctgtcaagattaatcagatctcactggacgagtctggagaacacatgggagtttgctcagaggacggcaaggttcaggtgttcggattgtactccggcgaggagttccacgagacgttcgactgtcctattaagatcatagccgtccatccccatttcgtgcgttcttcttgcaagcagtttgtaaccggaggcaaaaaactgctactgtttgagagaagttggatgaaccggtggaagtcggcggtcctacacgaaggagaagggaatattcgctccgtaaaatggcgaggccacttaatcgcttgggctaataacatgagcaagaaaccggaagcctggcgagtggcgaagaaaatgaaatcctatctgaataattag

SEQ ID NO: 211093 - DNA, 2565 bp, synthetic construct
  misc_feature 1..2565: note = Description of Artificial Sequence: Synthetic coding sequence
  source 1..2565: mol_type = other DNA
atggccgaggccgaggagcaggagaccggcagcctggaggagagcaccgacgagtcagaagaggaggagagcgaggaggaaccaaaactcaaatatgagcggttgagtaacggcgttactgaaatcttgcagaaggatgcagcctcttgcatgaccgtgcatgacaaattcttggctttggggacccattacgggaaggtatacctgctcgacgtgcaaggaaatatcacccaaaaattcgatgtgagtcccgtgaaaatcaatcaaatttcactggacgaatccggtgagcacatgggcgtgtgtagcgaggacggaaaagttcaggtgtttggcctttatagtggggaagagttccacgagacattcgattgccccattaaaatcattgcagttcacccccacttcgtcaggtcaagctgcaagcagttcgtgacaggtggcaagaaactacttctattcgaaagatcgtggatgaatagatggaaatcggccgtcctgcacgagggagaaggcaatattagatccgtgaagtggcggggccacctaattgcctgggccaacaacatgggcgttaagatcttcgatattatttcaaaacagcgcatcaccaacgtacccagagatgatatttcattgcgccccgacatgtacccctgtagcctgtgctggaaggataatgtaacactcattattggctggggaacctccgtcaaggtttgctcagtgaaagaaaggcacgccagcgagatgcgggacctgccaagcagatacgtggagattgtaagccagttcgagactgagttctacatatccggactggcccctctgtgtgatcagcttgttgtgctgtcttatgttaaggaaatctctgagaaaactgagagggagtattgcgcgcgcccgcggcttgacattatccaacccctatccgagacctgtgaagaaatctccagtgacgccttaacggttcgtgggttccaagagaacgagtgtagggattaccacttggagtactcggaaggcgaaagtttattttacatcgtgtctccccgggatgtggttgttgctaaagagagagaccaggacgatcacattgactggctgcttgaaaagaagaaatacgaagaggccctgatggcagcagagatttcccagaaaaacataaagcggcataaaatcttggacatcgggctggcctacattaaccatctggttgaaaggggagactacgatattgctgctaggaagtgccagaaaatactgggcaagaacgcagcattatgggaatatgaagtgtataaattcaaggaaatcggtcagctgaaggctataagtccctacctcccaagaggagaccccgttctaaagcccctgatatacgaaatgatcctccacgagtttttagagtctgactacgagggcttcgccacgcttattcgagaatggcccggggacctgtataacaattccgtaatcgtacaagctgtcagagatcatctcaaaaaggattcgcagaacaaaactctgctcaaaacccttgctgaattgtatacctacgataaaaattacgggaatgccctggagatttatctcacacttcggcacaaggatgtgttccagctgatccacaagcacaacctattctcgagcataaaggacaaaattgtgctgctgatggacttcgactctgagaaagcagtggacatgctcctcgataatgaagataagataagcatcaaaaaggtggttgaagagctcgaggataggccagaactccagcatgtgtacttacacaagctgttcaagcgggatcatcataagggtcagaggtatcatgagaagcagatcagcctctacgccgaatacgatcgacctaatctgttgccctttctgagagactcaacacactgccccctagaaaaggcactagagatttgtcagcagcggaatttcgtggaggaaaccgtctatcttttatcccgtatgggcaattcaagaagtgcactcaagatgattatggaagagttgcatgacgtagacaaagctattgagtttgcaaaggagcaggacgatggagagctctgggaggatttgatactttatagcatcgacaaacctccctttatcacaggtcttctaaataatatagggacgcacgtcgatcctattctcctgatccaccgcattaaggagggaatggagattcctaacttgagggactccctggttaaaattctgcaggactacaacctgcagatactgctgagggaaggttgtaagaaaatattggtcgcggattccctgtccctgctgaagaagatgcatcgaacacagatgaaaggagtgttggtggatgaggaaaacatctgcgagtcctgcctctcacctattctcccttcagatgcggcaaagcccttttcagtcgtcgtatttcattgtagacacatgttccacaaagagtgtctgccaatgccatcgatgaattccgctgctcagttctgcaatatctgtagtgctaaaaatcgtggacccgggagcgctatcctggaaatgaagaagtag

SEQ ID NO: 211094 - DNA, 2490 bp, synthetic construct
  misc_feature 1..2490: note = Description of Artificial Sequence: Synthetic coding sequence
  source 1..2490: mol_type = other DNA
atggccgaggccgaggagcaggagaccggcagcctggaggagagcaccgatgagagtgaggaagaggagtctgaagaagagcccaaattaaagtacgagcgtctatcaaacggggtcaccgagattttgcagaaggacgccgcttcatgcatgactgtacatgacaagttcttggccctgggaactcactacggaaaggtgtatctgctggatgtgcaaggaaacattacccagaagttcgatgtcgttcaggtgttcggtctgtattcaggagaggagttccatgaaacctttgattgtcctatcaagattattgctgttcatcctcattttgttagaagttcatgcaaacagttcgtcacaggtgggaaaaaattgctactgtttgagcggtcctggatgaaccggtggaagtcagcagtcctccacgagggagagggtaatattcgctctgtcaagtggagaggccacttaattgcatgggccaacaacatgggggtaaagattttcgacatcatcagcaagcaacggatcacaaacgtgcccagagatgacatcagtctgcgaccagacatgtacccttgttccctgtgctggaaggataacgtgaccttgataattggctggggaacaagtgttaaggtgtgcagcgtgaaagaacgccatgccagtgagatgagggacctgccaagtcggtacgtcgaaatcgttagccaatttgagactgaattctacatttcaggcttggctcccttgtgtgatcaactggtagtgctgtcctacgtcaaggagattagtgaaaaaaccgaacgagagtattgcgctagacctagacttgatatcattcagcctcttagtgagacatgtgaggagatcagttctgatgcactaactgtgcgcggctttcaggagaatgaatgtagagattatcacctggagtattcagaaggggaaagcctcttttatattgtgtctccacgggatgtcgtggttgcaaaagaacgggatcaggacgaccacattgattggctgctggaaaagaagaagtatgaggaagcactcatggcggcggagatctcccagaagaacattaagcgccacaaaatcctggatatcggcctggcatatataaaccacctggtggaacgaggagactacgatatcgcagctaggaagtgccagaaaatattaggaaaaaatgccgccctctgggagtacgaggtatataagttcaaggaaatagggcagctgaaagcaatctccccttatctgccgcgcggagaccccgtgctcaaaccattgatctatgaaatgatactgcacgagttcctagagtcagattatgaaggttttgctaccctgattcgagagtggccaggcgacctgtacaacaattccgtcatcgtgcaagccgttagagaccaccttaagaaagattcacaaaacaaaaccttgctcaaaaccttggccgaactgtacacatatgataagaattacgggaatgccttggaaatctatctaaccctgagacacaaggatgtgttccagctcattcacaaacataacttgttctccagcataaaagacaaaatcgtgctgctgatggactttgactctgagaaagcagtggacatgctgctcgataatgaggacaaaatttcaatcaagaaggtcgttgaggagcttgaggatcggcccgaactccaacatgtttatctgcataagctgtttaagcgtgaccaccacaaagggcaacgctaccatgagaaacagatttctttatatgcagaatacgatcggcctaacctgctgccttttctgcgcgatagcactcactgtcccctagaaaaagcactggagatctgtcaacagcgaaatttcgtggaggagacagtctatctgctcagcagaatgggaaatagcagaagcgccctgaagatgattatggaagaactgcacgacgtggacaaagccattgaattcgccaaggagcaggacgatggcgagctatgggaagacctcatcctctatagtatcgataaaccgcctttcatcacaggactactgaataatataggcactcacgtcgaccccatcctgctgattcaccgcattaaagagggaatggagattcccaacctccgggattccttggtaaaaattttacaagactacaatcttcagatactcttgcgagagggctgtaaaaaaatcctagttgcggattctcttagtcttctgaaaaagatgcatcgcactcagatgaaaggggtgctggtggatgaagagaatatctgtgagagttgtttgtcccccatactcccaagtgacgccgctaagccattcagcgttgtggtgtttcactgtcgtcatatgttccacaaagaatgtctgcccatgcccagcatgaactccgccgcccagttctgcaatatttgcagtgccaagaatcggggaccaggtagtgccattttagaaatgaagaaatag

SEQ ID NO: 211095 - DNA, 1617 bp, synthetic construct
  misc_feature 1..1617: note = Description of Artificial Sequence: Synthetic coding sequence
  source 1..1617: mol_type = other DNA
atggtgtacacccagagcgagatcctgcagaaggaggtgtacctgtttgaaagaattgactcccagaatcgcgagattatgaagcaccttaaagcgatttgtttcctgcgcccgaccaaggagaatgttgactacataatccaggagctgcgccgcccaaaatataccatatactttatttatttttcaaatgttatttctaagtctgatgtcaagagcctggcagaggctgatgaacaggaggtagtcgcggaggtgcagcaggtcatcaccaaggagtacgaactgttcgaatttcgtcgcactgaagttccccccctgctcctgatcctggatcgatgcgatgacgccatcacacccctcttgaatcagtggacttatcaggccatggtacacgagttgttagggatcaataataatcggatcgatttgagcagggttcctggcatttcaaaggacctccgtgaggtggtactgagtgccgaaaacgacgaattttacgccaataatatgtatttaaattttgccgaaataggtagtaatattaaaaacctaatggaggattttcagaagaagaagccaaaggaacaacagaaactcgaatccattgcagatatgaaggcattcgtagaaaattatccgcaattcaagaagatgtcaggtactgtgagcaaacatgtcaccgtcgtgggagagctctctcgacttgtgtctgagcggaatttattggaagtaagcgaagttgagcaggaacttgcgtgtcagaacgatcactcttcagccctccagaatataaagaggttgctacaaaatccaaaggtcacagaattcgatgctgcacgactggtaatgctatatgctcttcattatgagaggcactcgagcaattctctcccaggcttgatgatggatctgaggaacaaaggggtgtccgagaaataccgtaaactggtgagcgcggtggtggagtacggcgggaaaagagttcgaggctctgatcttttttcccccaaggacgctgttgctattaccaaacagtttcttaagggccttaagggcgtggagaatgtgtacacacagcatcagccattcctgcacgaaacccttgaccacctaattaaaggccgtctcaaggagaatctgtacccatacttaggaccaagtactttacgcgaccgcccccaggacatcatcgtatttgttattgggggcgcgacctacgaggaagccctgaccgtgtataaccttaacaggacaacaccaggagtgaggatcgtgctcggagggacaacagtgcacaataccaagagagatggtgtgtcgctttgcagtcctgcgtggtttagaacaccgggtctgaagcgtagcacacgcttgagtctgccgaaatgctgggactattcttttccccgaggatcttcagggttttggactgcccagcctaaacagggagaactgagctcccatatcaaagtgtccgaacagaaaatgaaacgctggctgggcgaagggcactccttcttaagctgcccccactatcgcttctcattgctaaataagggcgttggagagcaactgtgggtcctgtgctggcttcttgagttaatcagtcgctag

SEQ ID NO: 211096 - DNA, 1713 bp, synthetic construct
  misc_feature 1..1713: note = Description of Artificial Sequence: Synthetic coding sequence
  source 1..1713: mol_type = other DNA
atgaacgtggtgttcgccgtgaagcagtacatcagcaagatgatcgaagactctggtccgggcatgaaggtcctcttaatggacaaggaaaccacaggaatcgtgtccatggtgtacacccagtcggaaatcctgcagaaggaggtatacttattcgagagaatcgactcccagaatcgtgagattatgaagcacctgaaagccatttgttttctcagaccgaccaaagaaaatgtggactatattatccaagagttgagaagacccaaatatacaatctattttatttactttagcaatgtcatctccaagtccgacgttaaatccctggccgaggcggatgagcaggaagtggtagccgaggtgcaggaattttacggggactatatcgctgtgaatccccacttgttctcactgaatattctcggatgttgccaaggacggaattgggaccctgcccaactgtcgcggaccacccaggggctgaccgctctattgctgagcctgaagaagtgtcctatgatcagatatcaactgtcgtctgaagccgccaagcgacttgccgaatgtgttaaacaggtgatcactaaagaatacgagttatttgagttccggcgcacagaagtcccacccttattattgatcctggacagatgcgacgatgccataacgcccctgttaaaccagtggacctatcaggcaatggtccacgagcttttaggaatcaataataaccggatcgacctctcccgagtgcctgggattagtaaagacctacgggaagtcgtgttaagcgctgagaacgacgagttttatgcaaacaatatgtatcttaacttcgccgagattgggtccaacataaaaaatctcatggaggactttcagaagaaaaagcccaaggaacagcaaaaactcgagtctattgcagatatgaaagcctttgtggagaactatccgcagtttaaaaaaatgagtgggaccgtgtccaagcatgtcaccgtagtgggcgaactgtcacggctcgtcagcgagaggaatctgctcgaagtaagtgaagtcgaacaggagctcgcatgccagaatgatcacagttccgctctccagaatatcaagagattgttgcaaaaccctaaagtgaccgagttcgatgctgcgcgactagttatgctctatgcgcttcactacgagaggcactcaagcaattcactgcctggcctcatgatggaccttagaaataagggagtgtctgaaaaatacagaaagctggtgagtgccgtggtcgagtatggtggtaaaagagtacgcggaagcgacctgttctcacctaaagatgccgttgccataacaaagcagtttttgaagggtctcaagggggtcgagaatgtgtacacacagcatcagcctttcctgcatgaaactcttgaccaccttatcaaaggacgactcaaggagaatctatacccttacctaggcccatccacactgcgcgatcgcccacaagatatcattgttttcgtgatcggcggcgctacctacgaggaggctctcactgtgtataatctgaacaggactactccaggagtgcgtatagtgctgggcggcaccacagtccataacaccaaatctttcttggaagaagtcttggcatcgggcttgcactcacggtctaaagagtctagtcaggtaacttcccggagtgctagcagaaggtag

SEQ ID NO: 211097 - DNA, 951 bp, synthetic construct
  misc_feature 1..951: note = Description of Artificial Sequence: Synthetic coding sequence
  source 1..951: mol_type = other DNA
atgaacgtggtgttcgccgtgaagcagtacatcagcaagatgatcgaggacagtggtcctggcatgaaagttcttctgatggacaaagagaccactggcatcgttagcatggtttatactcagtcggagatcctgcagaaggaagtttacctgtttgaacggatcgactctcagaaccgcgagatcatgaaacaccttaaagctatttgctttctccgccctacaaaggagaacgtggactacatcatccaggaattgcgacggccaaaatatacaatttactttatatattttagcaacgtgatctctaagtctgatgttaagagcctggcagaggcggatgagcaggaagtcgtggcagaagtacagcaggttattaccaaggaatatgagctgttcgaatttcgacgcactgaggtaccgcctcttctgctgatactggacaggtgtgacgacgccattaccccactgctcaatcagtggacctatcaagctatggtgcatgagctgctgggaattaacaacaaccgaatagatctgagtcgtgtccctggtatctctaaagatcttcgggaagttgtgctatccgccgaaaacgatgagttttacgctaacaacatgtacctgaattttgccgagattggttcaaatattaaaaacctcatggaggacttccagaagaagaagcctaaagagcagcagaaactggagagcatcgcggatatgaaggcctttgttgaaaattatccccagttcaaaaaaatgtcaggtacagtcagtaagcacgtgaccgtggtcggtgagctctcgaggctcgttagcgaacgcaatttgctggaagtctcagaggtcgaacaagagctggcttgccagaatgatcattcctcagccctccagaacatcaagcgtctgttgcagaatccaaaagtgacagagtttgacgccgcctag

SEQ ID NO: 211098 - DNA, 1305 bp, synthetic construct
  misc_feature 1..1305: note = Description of Artificial Sequence: Synthetic coding sequence
  source 1..1305: mol_type = other DNA
atgaacgtggtgttcgccgtgaagcagtacatcagcaagatgatcgaggattccggtcctggaatgaaggttcttcttatggataaggagaccaccggcatcgtttctatggtctacacgcagagtgagattcttcagaaagaggtctatctgttcgaaagaatcgactctcagaatagagaaatcatgaaacacctgaaggccatctgtttcctcagacccactaaggaaaacgtagactacatcatccaggagcttcgtcgaccaaaatatactatctattttatatacttttctaacgtgatcagcaagtccgacgtaaagagcctcgccgaggctgacgagcaggaagtggtcgccgaggttcagcaggtgatcaccaaggaatacgaactgtttgagttcagacggaccgaagtgccccctctccttcttattcttgatagatgcgatgacgcgataacccccctgctgaaccagtggacctaccaggccatggtgcatgagctgctgggcatcaacaataacaggattgacctctctagagttccaggaatcagtaaggatctccgcgaagtcgtgctcagcgccgagaacgatgaattctacgctaataatatgtacctgaacttcgcagagataggaagcaacataaagaatctaatggaagatttccagaaaaaaaagccaaaggagcagcaaaaacttgagagcatcgcagatatgaaagcatttgtcgaaaattaccctcagttcaagaagatgagcggcacagtaagcaagcacgttactgtcgtgggtgagctgtcccgccttgtcagcgaaagaaacctgttggaggtatccgaagtcgaacaggagttagcttgtcagaacgatcattcaagcgccctgcagaatattaaacggcttctacaaaatcccaaggttacggaattcgatgccgccaggttggttatgctctacgcacttcactatgaaaggcactcttccaattcgttgcctggattaatgatggacctacgtaacaaaggggtgagtgagaagtatagaaaactggtaagcgctgtggtggagtacggcggaaagcgtgttcgcggctctgatttgtttagtccaaaggatgcagtggccatcacaaaacaattcctgaagggcctgaagggcgtagagaatgtgtacactcaacatcagccatttctgcatgagacattagatcatttaataaaaggccgcttgaaagagaacttgtacccttacctgggaccatctaccctgcgggaccgcattgcttcttgcctgtag

SEQ ID NO: 211099 - DNA, 1338 bp, synthetic construct
  misc_feature 1..1338: note = Description of Artificial Sequence: Synthetic coding sequence
  source 1..1338: mol_type = other DNA
atgaacgtggtgttcgccgtgaacccccacctgttcagcctgaacatcctgggttgctgtcaggggcgcaattgggaccctgcccagttatcacgcactacacaaggtcttactgcgttgctgctgtccctcaaaaaatgtcccatgatccgttatcagctgagcagtgaagccgccaagcgattggcggaatgcgtgaaacaggttataacaaaagagtatgagctctttgaattccgacggacagaggtcccgccactcttgctcatactagaccgatgtgacgacgccatcacccctctattgaatcagtggacctaccaagctatggtgcatgaactgctcggcattaacaacaaccggatcgacctgtcgagggtcccaggtattagtaaagacctgagagaggtcgtgttgtctgcggaaaacgatgaattctatgcgaacaacatgtatcttaattttgcggagatcggatccaacattaaaaatctgatggaagacttccagaaaaagaagcctaaggagcagcagaaattggagagtattgccgacatgaaggccttcgtggaaaattatccacagttcaagaaaatgagtggcaccgtatctaaacacgtgacagtggtaggggagctttccagactggtttcagagaggaacctccttgaagtgagtgaagttgaacaggagttggcatgccagaacgaccactcaagcgctttacaaaacatcaaacggctcctccagaatcccaaggtcaccgaattcgacgctgctcggctagtgatgctgtacgcactacactacgaaagacattcgtccaattcactgcctggtctaatgatggatctgagaaataagggggtcagtgagaagtaccgaaaacttgtttccgcggtcgtagaatacggcggtaagcgtgtccgcggctccgacctgttttcccccaaagatgccgtggccatcacaaagcagttcctcaagggcctgaaaggtgtcgagaatgtgtacactcagcaccaacccttcctacacgagacactggatcaccttataaaaggacgcctgaaggaaaatctgtatccctacctagggcccagtacattgagggaccggcctcaggatattatcgtgtttgttatcgggggagcaacttatgaggaggctctgaccgtgtacaacctcaatcgcacgactcccggagtgagaattgtattaggtgggacaacggtacacaatacaaaaagttttttagaagaggtattagccagtggcctgcatagccgcagcaaagaatcatcccaggttacgtcccggagcgctagccgcaggtag

SEQ ID NO: 211100 - DNA, 1128 bp, synthetic construct
  misc_feature 1..1128: note = Description of Artificial Sequence: Synthetic coding sequence
  source 1..1128: mol_type = other DNA
atgagcctggccggcggccgggccccccggaagaccgccggcaacagactcagcgggctcctggaggccgaagaggaagacgagttttatcagaccacctacgggggcttcactgaggagagcggggacgacgaataccagggtgatcagtctgatactgaggacgaggtggacagtgatttcgatatagacgaaggagatgagccctcctcagacggagaggctgaggaaccccgtcgaaagagaagggttgttaccaaagcgtataaagagcccctgaagtcattgcggccccggaaggttaatacacctgccggatcctctcagaaggccagggaagagaaagctctactccctcttgaactccaggacgacggaagcgattctcgtaaaagcatgcgccagagcacggccgagcatactcggcaaacttttcttagagtgcaggaaaggcaggggcagagtcggcgaagaaagggcccccattgcgagcgccccctgacacaggaggagctgctgagggaggccaagataacggaagagttgaatctgcgcagcttggagacgtatgaacgacttgaagcagacaaaaagaaacaggtgcataaaaaaagaaaatgccctggaccaataattacatatcactcggttactgtgcccctagtgggagagccaggcccaaaagaggagaacgtggatatcgagggaagcctctgtttcagtctcagtttcgtactgaggttagacccagctccttccgtgtccgcactcacgccccatgctgggacaggtcctgtgaacccacctgctcgatgttcccggacttttatcaccttttctgacgatgctaccttcgaagaatggtttccccaaggcaggcctccaaaggtgcccgtgcgtgaggtgtgtcctgtgactcatcggccagctttatacagggatccggtcaccgatataccctacgctacagccagagctttcaaaattatccgggaagcctacaagaaatatattaccgcccacgggctccctccaacagccagcgccctgggcccaggtccaccgccacctgaacccttgccgggttccgggccccgggcgctgagacaaaagatcgtcatcaaatag

SEQ ID NO: 211101 - DNA, 1095 bp, synthetic construct
  misc_feature 1..1095: note = Description of Artificial Sequence: Synthetic coding sequence
  source 1..1095: mol_type = other DNA
atgagcctggccggcggccgggccccccggaagaccgccggcaacaggctgagtggtttgttagaggccgaggaagaggatgagttttaccaaaccacctacgggggtttcaccgaggaatccggtgatgatgaataccagggagaccagagtgacaccgaggacgaagttgactccgacttcgatatcgacgagggtgatgagccgtcatccgatggagaggccgaagaaccccgaagaaagcgtagagtggtgactaaggcttacaaggaacccttgaagtcacttcgccctcgtaaagtcaacacgcccgccggcagctcacagaaagcaagggaagagaaagcccttctgcccctggagctccaagatgacggatccgacagccggaaaagtatgcggcaaagcacagcagaacacacaaggcagactttcctgcgcgtgcaggagaggcaaggacaatcccggagaagaaagggccctcattgtgagcgcccactcacacaagaggaactgctccgtgaagccaaaatcaccgaggagcttaatctgagatctctggagacatacgaacggctggaagccgataagaagaagcaggtgcacaagaagagaaagtgccctggacctatcataacctaccactccgttaccgtccccctcgtgggtgaacccggtccaaaagaagaaaacgtcgacatcgaaggactagatcctgcacctagcgtttctgccctgacgccacacgctggtacaggccctgtgaacccgcctgctcgctgtagtaggacatttattaccttttcagacgacgcaaccttcgaggagtggttcccccagggccggccgccgaaggttcccgtgagagaagtctgtcccgtgacgcacaggccagccctgtacagagacccagtgaccgatattccttacgctactgcgcgtgctttcaagatcatcagagaggcatataagaaatatattacagctcatggcctgccaccaactgcctccgccttaggaccaggaccacctccaccagagccactgcccggaagcggcccccgcgccctccggcagaaaatcgtgattaaatag

SEQ ID NO: 211102 - DNA, 1221 bp, synthetic construct
  misc_feature 1..1221: note = Description of Artificial Sequence: Synthetic coding sequence
  source 1..1221: mol_type = other DNA
atggccgagaacggcaagaactgcgaccagcggcgggtggccatgaacaaagaacaccacaatggcaactttacagatccgtccagcgtgaacgaaaaaaaacgccgcgagcgtgaggaacggcaaaatatcgtgctctggcgccaacctctaatcacgctgcagtatttctccctggaaattttagtgatcctgaaggaatggacgagcaagctgtggcatcggcagtcgattgtggtctccttcctgcttctgctcgcagtcctgatcgcgacatactacgtcgagggggttcaccagcagtacgtgcagagaattgaaaagcaatttctgttgtacgcttattggatcggactgggaattctaagcagcgtgggacttggtaccggacttcacacctttctgctctacctgggcccccacatcgcatccgttactctggccgcatacgagtgtaacagcgttaactttcccgagccaccctaccctgaccaaattatttgtcccgatgaggaggggactgaaggaaccatctcgctctggtcaattatatccaaagtaaggatcgaagcgtgtatgtggggaattgggaccgcaatcggtgagctccccccttacttcatggcccgcgcagcgcgcctgtccggcgccgagcccgacgatgaagagtaccaagagttcgaagagatgttggagcacgcagaatcagcccaggacttcgcatcacgcgctaagcttgccgtccaaaaacttgtgcagaaggtagggttctttggcatccttgcttgcgcaagcatacccaacccactgtttgatctggctggcattacgtgcggccattttttggtgccgttttggaccttcttcggcgccaccctgatcggtaaggccatcatcaagatgcatatacagaaaatctttgtaatcataaccttttcaaaacacatcgtcgaacaaatggtcgcctttatcggtgctgtgcctggtattggaccctccctccagaagcctttccaagagtacttagaagcgcagaggcaaaagttacaccataaaagcgagatgggaacccctcagggcgaaaactggctttcctggatgtttgagaagctggtggtcgtaatggtgtgctatttcattctgagtatcattaactccatggcccagagttacgccaaaagaattcagcagcgtctgaatagcgaagaaaaaacaaagtag

SEQ ID NO: 211103 - DNA, 930 bp, synthetic construct
  misc_feature 1..930: note = Description of Artificial Sequence: Synthetic coding sequence
  source 1..930: mol_type = other DNA
atggacctgaagtacgtgcagcggatcgagaagcagttcctgctgtacgcttactggatagggctcgggattctgagttctgtgggactggggaccgggctgcacactttcctgttatatctgggccctcacatcgcctcagtgacactagctgcctacgaatgcaattcggtcaattttcccgagcccccttaccccgaccagattatctgcccagatgaggagggcactgagggaacgatttccctgtggagtatcatcagcaaagtgcggattgaggcttgtatgtggggaatcgggaccgccattggggaactaccgccatatttcatggccagagccgctagactgagcggggccgaaccagacgatgaggaatatcaggagttcgaggagatgctggaacacgccgagtcagcgcaggatttcgcctcccgggcaaaattggcggttcagaagcttgtacaaaaggttggcttcttcggaatcctggcctgtgctagcattccaaacccgctctttgatttggccggcatcacctgtggccatttcttagtgcccttttggactttcttcggcgctactctaattggtaaggctatcataaaaatgcatatccaaaagatttttgtgatcattacgttcagtaagcacatcgtggagcaaatggtcgcctttattggggccgtccctggaatcgggccaagcctccaaaaaccctttcaggaatacctcgaagcacaaaggcagaagctgcaccataaaagcgagatgggaacgccgcagggcgagaattggctgtcttggatgttcgaaaaattggtggtagttatggtgtgctattttatactgtccatcattaactccatggcccagtcttacgctaaacggatacagcagagactgaatagtgaagagaagacaaagtag

SEQ ID NO: 211104 - DNA, 819 bp, synthetic construct
  misc_feature 1..819: note = Description of Artificial Sequence: Synthetic coding sequence
  source 1..819: mol_type = other DNA
atggacctgaagggcccccacatcgccagcgtgaccctggccgcctatgagtgtaactcagtgaatttcccagagccgccctatccggaccagataatatgtcctgacgaggaaggcacagaaggtactatttccctgtggagcattatctctaaggtcaggatcgaggcctgtatgtggggtatcggaacagcaatcggcgaacttcccccctatttcatggcccgcgccgctcgattatccggagcggagccagatgacgaagaatatcaagaatttgaggagatgctggagcatgccgagtccgcacaggactttgcttctagggcgaagctcgcagtgcagaaactggtccaaaaagtgggcttcttcggcattttggcgtgtgcctccatccccaatcccctttttgacctggctggaattacttgtggccacttcttagtacccttttggacttttttcggggccacgttaatcggcaaagccattattaaaatgcacattcagaagatcttcgttatcataactttctccaagcacattgtggagcagatggttgccttcattggcgccgtccccggcatcgggcctagcttgcagaaacctttccaagagtacctcgaggctcaacgacagaagctgcaccataaaagcgagatgggtacaccgcagggcgagaattggctgagctggatgttcgagaaactggtggtggtgatggtttgctacttcatcctgtccatcattaacagtatggcacagagctatgctaagcggattcagcagaggctgaactccgaggagaagacaaaatag

SEQ ID NO: 211105 - DNA, 645 bp, synthetic construct
  misc_feature 1..645: note = Description of Artificial Sequence: Synthetic coding sequence
  source 1..645: mol_type = other DNA
atgtggggcatcggcaccgccatcggcgagctgcccccctacttcatggcgcgggcagctaggctcagcggagcagaacccgacgatgaagaataccaggagtttgaggagatgcttgagcatgctgaatctgcacaggattttgcgagccgcgcgaagctggcagttcagaagttagtacagaaagtgggcttttttgggattctggcgtgtgcttcgatcccaaacccacttttcgaccttgccggaattacctgcggacattttctcgttccattctggacattctttggagctacactgattggaaaggccattataaaaatgcacattcagaaaattttcgttatcatcactttctctaagcatattgtggagcagatggtcgcatttatcggcgccgtgcccggcattggaccttccttgcaaaaacccttccaggaatacttagaggcccaacggcagaagctgcatcataaatcagagatgggtactccccagggtgagaattggctaagctggatgttcgaaaagctggtagttgttatggtctgttactttatcctgtctattatcaattctatggctcagagctatgcaaagagaatacagcaaaggctgaactcagaagagaaaacgaaatag

SEQ ID NO: 211106 - DNA, 1053 bp, synthetic construct
  misc_feature 1..1053: note = Description of Artificial Sequence: Synthetic coding sequence
  source 1..1053: mol_type = other DNA
atggccgagaacggcaagaactgcgaccagcggcgggtggccatgaacaaggagcatcataacggtaattttactgacccttcctccgtgaatgagaagaagaggcgcgagcgcgaagaacgacagaacatcgtattatggcggcagcccttaattaccttgcagtacttctccttggagattcttgtaatcttgaaggagtggacatcgaagctgtggcaccgacagagcattgtcgtgagcttcctgctgctgctggctgtgctgatcgccacttattatgtcgagggggtgcaccagcaatacgtgcagcgcattgaaaagcagtttcttctttacgcttactggatcggcctcggaatcctatcttccgtggggctgggaactgggttgcacacctttttgctgtatttaggcattggtaccgccatcggcgagctgcctccctattttatggctagagccgccagactgagcggcgccgagcctgatgatgaagaataccaggagtttgaggaaatgctggaacacgctgagtcggcacaagactttgcctcccgagccaaactggccgtccaaaagctagtccagaaggtgggattttttgggatcctggcttgcgcgagtattcctaatccattatttgatctcgcggggattacttgcgggcactttctggttcctttttggacattttttggcgccacgctcatcggcaaggccatcatcaagatgcacatacagaagatatttgtgattattacttttagtaagcatatcgtagagcagatggtggccttcattggagccgttcccggaatcggtccatctctgcaaaagccttttcaggagtaccttgaagcacagaggcagaaactacaccacaagtccgaaatgggcacccctcagggtgaaaattggctctcctggatgttcgagaagttagtggtagtgatggtgtgctatttcattttaagcataatcaacagcatggcacaatcttatgcaaaacgcatacagcagcgactgaacagcgaggagaaaacgaagtag

SEQ ID NO: 211107 - DNA, 1443 bp, synthetic construct
  misc_feature 1..1443: note = Description of Artificial Sequence: Synthetic coding sequence
  source 1..1443: mol_type = other DNA
atgagcgacgtggccatcgtgaaggagggctggctgcacaagcggggcgagtacatcaaaacctggaggcctaggtatttcctcttaaagaacgatgggaccttcattggctacaaagaaagaccacaggacgtagatcaaagggaagcccctcttaacaatttctcagtagcccagtgccaactgatgaaaactgagcggccccgccctaacaccttcatcatcaggtgtctgcagtggaccacagttattgaacggactttccacgtggaaacgcccgaagaacgagaagagtggaccaccgctatacaaacggtggctgacggactgaaaaaacaagaagaagaagaaatggattttcgctccggttccccatctgacaatagcggagctgaggagatggaggtcagcctcgctaagcccaaacaccgagttaccatgaacgaatttgagtatctaaagttgttagggaagggaacttttggcaaggtgatactcgtgaaagaaaaagcaaccggccgctactacgccatgaagattctgaagaaagaggtcatcgttgcaaaggatgaggtggcccatacattgacagagaacagagtgcttcagaattcccggcacccgttcctgacagcactgaagtactcgttccagactcatgacaggctgtgctttgtcatggaatacgccaacggcggggagctgttctttcatctgtctcgggaacgcgtcttctcagaggacagggcgaggttttacggcgctgaaatcgtaagcgccctagactaccttcattcagaaaaaaacgtggtgtaccgagatctcaaacttgagaaccttatgttggacaaagatggtcacattaaaattacagactttgggctgtgtaaagaagggattaaggatggtgccactatgaagacattctgtggaactccagagtacctggcccctgaagtgctggaagataacgactacgggagggctgtcgattggtggggcctcggtgtggtcatgtacgaaatgatgtgcgggcgacttcctttctacaatcaagatcacgagaaactgttcgaactcattctcatggaagagattcgttttccccggacattaggccccgaggcgaagagtctgttaagcggcctgcttaaaaaggaccctaagcaacggttagggggagggtctgaagatgcgaaagagattatgcaacatagattttttgctggcatagtctggcagcatgtgtatgagaagaagctgagccctcccttcaaacctcaagtgaccagcgaaacagatactcgctattttgatgaagaatttaccgctcagatgatcactatcactccaccagaccaagatgacagcatggaatgtgtcgactcagagaggaggcctcattttccacagttctcctatagcgctagcggcacggcatag

SEQ ID NO: 211108 - DNA, 1443 bp, synthetic construct
  misc_feature 1..1443: note = Description of Artificial Sequence: Synthetic coding sequence
  source 1..1443: mol_type = other DNA
atgagcgacgtggccatcgtgaaggagggctggctgcacaagcggggggagtatattaagacatggcgtcccaggtacttcttgctgaagaacgacggaacatttattggctacaaggaaaggcctcaggatgtcgaccagcgggaagcacctttgaataatttcagcgttgctcagtgtcaactaatgaaaaccgagcgccctaggcccaacacatttatcatccggtgcctccagtggaccacggtcatcgaacggactttccatgttgagacacccgaggagcgggaagagtggacgacagccatccaaacagttgccgatggcctgaagaagcaggaggaagaggagatggattttagaagcggatctccctcagataattccggggctgaggagatggaggtgtctttggctaagccaaaacaccgcgtaactatgaacgagtttgagtatcttaaactgcttggcaagggcacatttggtaaagtgattctcgttaaggagaaggcgaccggccgctactacgctatgaagattctgaaaaaggaggttatcgtggctaaggacgaagtggcccacaccctgaccgaaaaccgcgtcctccagaacagccgtcacccattcctgacagctctgaagtattctttccaaacacacgatcggttatgtttcgtgatggaatatgctaacggcggcgagctgttctttcatttgagcagagaacgcgtctttagcgaggacagagcccgcttctatggcgcagaaattgtgtcggcactcgactatttacactcagaaaagaacgtagtgtacagagacttaaagctcgagaacctgatgcttgacaaagatggccacattaaaataaccgatttcggattatgcaaagaagggatcaaggatggagccacaatgaagaccttctgcgggactcccgaatacctcgcacccgaagtactggaagacaacgattatggcagagccgtagactggtggggcttgggggttgtcatgtacgaaatgatgtgcgggcgtttacccttctacaaccaggatcatgaaaaactcttcgagctgattctcatggaggagatccggttcccacgcactctggggccggaggccaagtcattgttgagcgggctgctgaagaaggatccaaaacagcggctcggcggcggatctgaagacgcaaaggagataatgcaacaccggtttttcgccggcatcgtgtggcaacacgtatacgagaagaaattgtcccctccattcaaaccacaggtgacgtctgagaccgacaccaggtattttgatgaagaatttactgctcagatgatcactataactccccctgaccaggacgattctatggagtgtgttgactcagagcgaaggcctcacttcccccagttctcctattctgcttctggcactgcttag

SEQ ID NO: 211109 - DNA, 1257 bp, synthetic construct
  misc_feature 1..1257: note = Description of Artificial Sequence: Synthetic coding sequence
  source 1..1257: mol_type = other DNA
atgaagaccgagcggccccggcccaacaccttcatcatccggtgcctccagtggacaactgtgattgaacgtacctttcatgttgaaacaccagaagagagggaagaatggacaacagccatccagacagttgcggacggactcaagaaacaggaagaggaagagatggattttaggtcgggatctccgtccgacaactccggcgcagaagagatggaggtgtccttggcaaaacctaaacaccgcgtgacgatgaacgagttcgagtacttgaagctgttagggaaaggaaccttcggaaaggtgattttggtcaaagagaaggccactggacgctattacgctatgaagattttgaaaaaggaggtaatcgtcgctaaagacgaggtggcccacacactgacagagaatcgggtgctccagaactcacggcacccgtttctcacagccctgaagtacagctttcagacccacgaccgcctctgcttcgtgatggaatacgctaacggcggcgagttgttctttcacctaagtcgggagagggtcttctccgaggatagggcaaggttctacggagctgagattgtctcagcactggattacctgcactccgagaagaacgtcgtataccgtgacttaaagctggagaatttgatgctagacaaggatggccatatcaagattacggactttggactatgtaaggaagggatcaaggacggcgccaccatgaaaaccttctgcggcacgccagagtatttagcgcccgaggtcctcgaggacaacgactacggcagggctgtcgattggtggggtttgggggtggtaatgtacgaaatgatgtgcggccgccttccattctacaatcaggaccacgaaaagctttttgagttgattctcatggaagaaattagatttccccggacgttgggcccagaagccaaatcccttttgtccggcctcctcaagaaggaccctaagcagagactggggggaggaagcgaggatgccaaggaaatcatgcagcatagatttttcgcgggcattgtgtggcagcacgtgtacgaaaaaaaactgtctccgcccttcaaaccacaagttacgtccgaaacagacacacggtactttgacgaggagttcacagctcagatgattaccattactccccctgatcaagatgacagcatggaatgcgttgatagtgaaagacgccctcattttccacagttctcctatagcgcgtctggcacagcctag

SEQ ID NO: 211110 - DNA, 1443 bp, synthetic construct
  misc_feature 1..1443: note = Description of Artificial Sequence: Synthetic coding sequence
  source 1..1443: mol_type = other DNA
atgagcgacgtggccatcgtgaaggagggctggctgcacaagcggggggagtacataaaaacttggagacccagatacttcctgctgaagaatgatggcaccttcatcggatataaagaacgccctcaagacgtggatcagcgagaggctccgctcaataatttttcggtggctcagtgccaattgatgaaaacagagaggcccagaccaaatacattcataatccgctgtctgcagtggacaaccgtcatcgagcggacattccatgtagaaaccccggaagaacgcgaagaatggacgacagccattcagaccgtggccgacgggcttaagaagcaggaggaggaggaaatggactttagaagcgggagtcccagtgataacagcggcgctgaggagatggaggtcagcttggccaaacctaaacaccgggtcactatgaatgaattcgagtacctgaaactgctggggaagggaaccttcggtaaggtgattctcgtaaaagagaaagccacgggcagatattatgccatgaagatactgaagaaagaagtgattgtagccaaggacgaagtagctcacaccctgactgagaaccgggtcctgcaaaattcccgtcatccatttctgaccgccctgaagtactcctttcagactcacgatagactctgttttgtgatggaatacgcgaacgggggtgagctgtttttccatctctcccgcgagcgagtctttagcgaagaccgagcgcggttctatggggccgaaatagtctcggccctagactacctgcacagcgaaaagaatgtggtttatcgcgacctaaaactggagaacctgatgctggataaagatggccatatcaaaattaccgactttggcctttgtaaagagggtatcaaggacggtgcaaccatgaagacgttctgtggtacccccgaatatttggcaccagaggtgctggaggataacgactacgggcgcgcagtcgattggtggggcctgggcgtggtcatgtacgagatgatgtgtggtcgactacccttctataatcaagaccacgaaaagctcttcgaactgatcctgatggaggagattcgcttccctaggaccctgggccccgaggccaagtcacttctgagcggcctgttaaaaaaagatccgaaacagcgcctcgggggcggctcagaggacgcaaaggagatcatgcagcaccggtttttcgccggaatcgtgtggcagcacgtgtatgaaaagaaactcagcccaccatttaaacctcaggtgacttcggagaccgatacccggtacttcgacgaagagtttacagcacagatgattacaattaccccaccagatcaggacgactcaatggagtgcgtcgactcagagcggcgacctcatttcccccagttctcatactctgctagtgggacggcttag

SEQ ID NO: 211111 - DNA, 1443 bp, synthetic construct
  misc_feature 1..1443: note = Description of Artificial Sequence: Synthetic coding sequence
  source 1..1443: mol_type = other DNA
atgagcgacgtggccatcgtgaaggagggctggctgcacaagcggggagagtacattaagacctggaggcccaggtatttcctcctgaaaaacgacggtacatttattggatataaagaacggccccaagacgtggatcaacgagaggcccccctgaacaacttttcagttgcacagtgccagttaatgaaaactgaaaggcctcgccccaatactttcatcattaggtgcttgcaatggacaaccgttatagaacggacatttcacgtcgagacgccggaagaacgtgaggaatggactacagcgattcaaacagtggccgatggactcaagaaacaggaggaagaagagatggacttccgttccgggagcccaagcgacaatagtggggcggaagagatggaagtgagcctagccaaacctaaacacagggtcaccatgaatgagtttgagtatctgaaacttctcggaaagggcacgtttggcaaggtgatacttgtcaaggagaaggcaaccgggcgatattatgcgatgaaaatcctgaaaaaggaagtgatcgtagccaaggacgaagtagcacatacgctcactgagaaccgggttctgcagaactcgcggcatccattccttaccgccctcaagtacagttttcagacccatgaccggttgtgctttgtcatggaatacgccaacgggggcgagctgttcttccaccttagtagagaacgggtcttctccgaggacagagctcgcttctatggagcagaaattgtcagcgccctggattacctgcactctgaaaaaaacgtggtgtatcgggatctcaagttggaaaacctgatgctggacaaggacggtcatattaagataaccgactttgggctgtgtaaagaaggtatcaaggatggggcaaccatgaaaacattttgcggcactcccgaatacctggcacccgaagtactggaggacaacgattacggtagagcagtggactggtggggactcggcgtcgttatgtacgaaatgatgtgtggtagattgcccttttataatcaggatcacgagaagctgtttgagttgatcctgatggaggagattaggttcccccgtactctcgggccagaagccaaaagtcttttaagcgggctgctgaagaaagaccccaagcagcgtctgggaggtggcagcgaggacgcaaaggaaattatgcagcacaggttcttcgccggtatagtgtggcagcacgtttatgagaagaaactcagcccaccattcaagccccaggttacgagcgaaaccgacactagatacttcgatgaggaatttacagcacaaatgatcacaatcacccccccagaccaggacgatagcatggagtgtgtggactctgaacggcggcctcacttcccccaattctcctactctgcatctgggaccgcctag

SEQ ID NO: 211112 - DNA, 1443 bp, synthetic construct
  misc_feature 1..1443: note = Description of Artificial Sequence: Synthetic coding sequence
  source 1..1443: mol_type = other DNA
atgagcgacgtggccatcgtgaaggagggctggctgcacaagcggggagagtatatcaagacgtggcgacctagatatttcctgcttaaaaacgatggtactttcattggctacaaggaaagaccacaagatgtggaccagagagaggcacctctgaataacttttctgtggcgcagtgtcagctgatgaagaccgagagacctcgccccaatacttttatcatcagatgcttgcaatggaccaccgtgatcgagcggacattccacgtggagacccctgaagagagagaggaatggaccaccgccatccaaacagtggctgacggattgaaaaaacaggaagaggaggaaatggacttcaggtctggaagccctagtgacaacagcggagccgaagagatggaggtgtctcttgctaagccgaagcaccgtgtgactatgaacgagtttgaatacctgaaattgctcggcaaaggcacctttgggaaggtaattttggtgaaggaaaaagccactggtcgttactatgcaatgaaaatactcaaaaaagaagtaatcgtcgctaaggacgaagtagcacacaccctcacagaaaaccgggtgctgcagaactcccgtcaccctttcctgacagccctgaaatattcattccagacgcatgatcgattatgcttcgtgatggagtacgccaacggcggcgagcttttcttccacctgagcagggagcgagtcttctcagaggaccgggcgagattttatggcgctgaaattgtctcggcactcgactacctgcatagtgagaaaaacgtcgtgtatcgcgatctgaagttggaaaacttaatgttggacaaagacggacatattaaaatcactgatttcggtctgtgcaaggagggcattaaggacggcgctactatgaagactttctgcggcacacctgagtacctggcacctgaagtgctggaggacaacgactacggacgcgccgtggactggtggggtctgggggtagtgatgtacgagatgatgtgtggcagactgccgttttacaaccaggatcacgaaaaactcttcgaactaatccttatggaggagatacggtttccacggactctggggccagaagccaaatcactgctcagcgggctactcaagaaggaccccaagcaacggctggggggcggaagcgaggatgcaaaagaaatcatgcagcatcgcttcttcgcaggtatagtctggcagcacgtctacgaaaagaagttatctccaccttttaagccacaggtaacatccgagactgatacaaggtattttgacgaagagttcacagcgcagatgattaccatcactccccctgaccaggatgattccatggagtgtgtggattctgagcgcagaccccacttccctcagttttcttactcagcctcaggcaccgcttag

SEQ ID NO: 211113 - DNA, 279 bp, synthetic construct
  misc_feature 1..279: note = Description of Artificial Sequence: Synthetic coding sequence
  source 1..279: mol_type = other DNA
atgagcgacgtggccatcgtgaaggagggctggctgcacaagcggggcgagtacatcaagacctggcgaccgcgctacttcctgctgaagaacgacggaacattcattggctacaaagagcggcctcaggatgtggatcagagagaagctccactgaataacttctctgtggcccagtgccagctgatgaaaaccgaacgacccagaccaaacacttttataattcgttgtcttcagtggactaccgtcatcgagagaaccttccatgtggagacctag

SEQ ID NO: 211114 - DNA, 2421 bp, synthetic construct
  misc_feature 1..2421: note = Description of Artificial Sequence: Synthetic coding sequence
  source 1..2421: mol_type = other DNA
atggccagcggcgccgacagcaagggcgacgacctgagcaccgccatcctcaagcagaaaaacaggccaaatagactcatcgtcgatgaggccatcaatgaagacaactcagtggtttccttatcacagccaaagatggatgagcttcagctgtttcgaggagacacagtgctgctgaagggcaagaaacgcagagaggctgtgtgtatagtgctctctgacgatacttgcagcgacgagaagattcggatgaatagagtggtgaggaataatctgcgtgtgcggttaggtgatgtgatcagtattcagccatgccccgatgtcaaatatggcaagagaattcacgtactgcctattgacgataccgtggagggcattaccggaaacctgttcgaggtgtacctcaaaccctacttcctcgaggcatatcggcccatccggaaaggtgacatctttctcgttcgagggggcatgcgggcagtggaattcaaggtcgtcgaaacagacccgagtccgtactgtatcgtggccccagatactgtaattcactgcgagggggaaccaataaaacgggaggatgaggaggaaagtctgaacgaagtggggtacgatgacattggcggctgtcgcaaacagctcgcccagatcaaagaaatggtggagttacctctacggcatcctgccctgttcaaggctattggcgtcaaaccgccaagggggatcttgctctatggtcctcctggtacaggcaaaaccctcatcgctagggcagtggctaacgaaactggggctttcttttttcttatcaatggtcctgaaatcatgagcaagctggcaggggaaagcgaatcaaaccttcgcaaggcctttgaggaggcagagaagaatgccccggccataatttttatcgacgaactcgacgccatcgcaccaaagcgggagaaaactcatggggaagtagagagacggattgtcagccagttgctgacccttatggacggactaaagcagcgagcacatgtgatagtcatggccgcaacgaaccgcccgaacagcatcgatccagccttgaggaggttcggacgattcgaccgcgaggtagacattggtatccccgatgctaccgggagactcgagattcttcaaattcacacaaagaatatgaagttggctgatgacgttgaccttgagcaggtggccaatgaaacacacgggcacgtgggagctgacctggctgcactgtgtagtgaggcggctctccaagcaatccggaagaaaatggatttaatcgatttggaagacgaaaccatagatgcagaagtgatgaatagtttggccgtgacaatggatgacttccgatgggcactgagccagtctaatccgtcagccttgcgcgagacagtggttgaggtccctcaagtcacctgggaggatatagggggacttgaggacgtgaagcgggaactgcaggagctagttcaatacccggtggagcacccagacaaatttctcaagtttggtatgacgccttccaaaggtgttttgttctacggaccacctgggtgtggtaaaacgcttctcgccaaggcaatcgcgaacgaatgccaggctaactttatcagcattaaggggcccgagcttctgaccatgtggtttggagagagcgaagccaatgtcagagagatcttcgacaaagctcggcaggcagccccctgcgtgctcttcttcgacgaattggattccattgcgaaagccagaggcgggaacattggggatggtggaggggccgcagacagggtcatcaatcaaatactgacggagatggacggtatgagtacaaagaagaacgtcttcattattggagccaccaacagacccgacattattgatcccgcgatacttcgcccgggtcgcttagatcaactgatctacattcctctgcccgatgagaagagccgagtggctatcctgaaggcaaacctaaggaaatcacctgtcgccaaagacgtggacctggagtttctggccaaaatgaccaatggcttctctggggccgacctgacagaaatatgtcaacgggcatgtaagctcgccattagagaatctatcgagtcagaaattagacgagagcgcgaacggcagacgaatcccagcgccatggaggtggaagaagacgatcctgtgcctgagataaggagagaccactttgaggaggccatgcgctttgccaggaggtcagtatcagacaatgacattcgcaaatacgagatgtttgcccagactctccagcagagcaggggattcgggagcttcaggttcccctctggcaatcagggtggtgctggcccttctcagggatcaggtggcggcacaggcggaagtgtgtacaccgaggacaatgatgatgacctctatggttag

SEQ ID NO: 211115 - DNA, 3669 bp, synthetic construct
  misc_feature 1..3669: note = Description of Artificial Sequence: Synthetic coding sequence
  source 1..3669: mol_type = other DNA
atgagccagcccccccccccccccccccccctgcccccccccccccccccaccagaggccccacagaccccgagctctctcgcaagtgctgcagcctctggcggcctcctgaagaggagagaccggaggatcttgtccggctcgtgcccagaccccaagtgccaagccaggcttttctttcctgcatcagggtccgtcagtatcgagtgcacagaatgcggccagcgtcatgaacagcagcaactgctaggcgttgaagaagttaccgacccggatgtggtgttacacaacctgctgaggaatgccctgttgggggtcacaggtgctccaaagaagaataccgaactggtcaaagtaatgggcttgtctaactatcactgtaagctactgtctcctatactggcaaggtacgggatggacaagcagactggacgtgccaaactgctgcgcgacatgaaccagggcgagctatttgactgcgcactcctgggcgatagagctttcctgatcgagcctgagcatgtaaacaccgttgggtacgggaaggatagatcaggttccctattgtatctacacgacaccctcgaagacatcaagagggccaacaagagtcaggaatgcctgatcccagtgcacgttgatggcgatgggcactgtctggttcacgccgtatccagagccctggttggaagagagctgttctggcacgctctcagagagaatttaaagcaacacttccagcaacacctcgcccgctatcaagccctgttccacgacttcatagacgccgcagagtgggaggacatcataaatgaatgcgacccactattcgtgccgcccgagggggtgccgctcgggctgcggaatatccatattttcgggctggccaatgtcctgcaccgcccaattatcctgcttgacagcctgagcgggatgaggtcttcgggggattactccgctacgtttctccccggcttgattcccgccgagaagtgcaccggaaaggatggccatctcaacaagcccatctgcatcgcatggtcctcgtcgggaaggaaccattatatacctctggttgggattaagggagccgccctgcctaaattgccaatgaatctgcttccgaaagcttggggagttccacaggacctcataaagaaatacatcaagctggaagaggatggcggctgcgttattgggggtgaccgcagtctccaggacaaatacttgctgagactcgtggcagccatggaagaagtatttatggacaagcacggcatccatcccagcctggtggctgatgtccaccagtatttctataggaggacaggcgtgatcggtgtacagccagaggaagtgaccgctgctgcaaagaaagcagttatggataacaggcttcataagtgcctcctgtgcggtgctctttctgagttacacgtgcctcccgagtggctggctcctgggggcaagttgtataatttggctaaaagcacacacgggcagttgagaacagataagaattattctttccctctcaataatctcgtttgcagctatgattctgtgaaggatgtcctcgtaccggattacggcatgtccaacctcaccgcctgtaattggtgccatggcacctctgttcgtaaggtccggggcgatggcagtatagtgtacctggatggcgaccgtacaaactcgaggagcaccggcggaaaatgcggttgtggtttcaagcatttctgggacggcaaagaatacgacaatctgcccgaggcatttccaattactctggaatggggaggaagggttgtgagagagacagtgtactggttccagtacgaatctgacagctctttgaattcgaacgtctatgatgtggcgatgaaacttgtgactaaacactttcctggggaatttgggtctgagatcctggtacagaaggttgtgcataccattctccaccagacggctaagaagaatccggacgactatacacctgtgaacatcgatggagcccacgcacagagggtcggagatgtgcagggacaagaatccgaaagccagctgcccaccaaaatcatcctgactgggcaaaagacaaaaacccttcacaaggaggagctgaatatgagtaaaactgagagaacaatccagcagaacattacagagcaggcaagcgtgatgcaaaagaggaaaaccgagaagctgaagcaggagcagaaaggccagcctagaacagtatccccgtcgaccattcgagacggcccttccagcgctcccgcgactcccaccaaggcgccctacagcccaactacgtctaaggagaagaaaatccggatcacaaccaacgatgggcggcagagtatggtcacgcttaagagttcaactaccttttttgagctgcaggagtcaatcgcccgagagttcaacatccctccttacctacaatgtatacgatatgggttcccccccaaggaactgatgcctccccaggccggtatggagaaggaacctgtcccccttcaacacggggaccgaatcacaatcgaaatcctcaaatccaaggcagaagggggccagtccgctgcagcacactcagctcatacagtgaagcaggaggacatcgcagtaactggtaagctaagttccaaggagctacaggaacaggctgagaaagagatgtatagcttatgtctcctggccactctcatgggggaagatgtgtggagctacgccaagggtctgccacacatgtttcagcaaggtggtgtcttttattcaattatgaagaagactatgggtatggctgacgggaagcattgtacgtttccgcacttacctggtaagactttcgtgtataacgcctccgaagacaggctggagctgtgtgtggatgccgctggtcattttccaataggccccgacgttgaagacctggtaaaagaagccgtctctcaggtgcgcgccgaagctacaaccaggtcccgcgagagctcacccagccatggcctcttgaagctcggctctggaggggtggtgaagaaaaaatctgagcagctccacaacgtcacagcatttcagggaaagggccactcattggggacagctagtggaaacccccacctggatccgagagcaagggagaccagtgtcgtacggaagcacaatactggaactgatttcagcaactcctccacgaagaccgagccctcggtgtttacggcctcatcatctaactccgaactgattcgtatagccccaggcgtggtgacaatgcgcgatgggaggcagctggatccagatttagtagaagctcagagaaaaaaactgcaggagatggtgagttctatccaggccagtatggacagacacctgcgggaccagtctacagaacagtcccctagcgatctgcctcagcgcaagactgaagttgtgagctcatcggccaagtcgggatccctgcaaacgggcctgcccgagtcatttccacttaccggaggaactgaaaatctgaacaccgaaaccacggatgggtgtgtggccgatgccctgggtgccgcctttgccacgcgctctaaggcacaaagggggaacagcgtggaagaactcgaggaaatggatagccaggatgccgaaatgactaacacaactgaaccaatggatcattcgtag

SEQ ID NO: 211116 - DNA, 3381 bp, synthetic construct
  misc_feature 1..3381: note = Description of Artificial Sequence: Synthetic coding sequence
  source 1..3381: mol_type = other DNA
atggagcccaacgacagcaccagcaccgccgtggaggagcccgacagcctagaagttctagtaaagacactcgatagtcaaacccggacatttattgtgggagctcaaatgaacgtgaaggagttcaaggaacacatcgccgcttcagtctctatccccagtgaaaagcagcgacttatatatcagggcagagtactgcaagatgataagaaactccaggaatataatgtgggagggaaagtgatacacctggttgagcgggcaccgccccaaacccacctgcctagtggcgcttcttccggaacggggtccgcatctgcaactcatggcgggggctcaccccctggtacccggggtcccggcgcatccgtccacgacaggaatgcgaatagttatgtgatggtgggaacattcaatctcccgagcgacggcagcgctgttgacgtgcacattaacatggaacaggccccaatccaaagcgaacctagagtcagactggtcatggctcaacatatgatccgagacatccaaactctgctcagccgtatggaatgcaggggggggccacaaccacagcactctcaaccgccacctcagccgccagcagtgaccccagaacctgtggctctttcctctcagactagcgaaccagtggagtctgaagccccaccccgagaaccaatggaagccgaggaagtggaagagcgagcgccagctcagaaccccgagctgactcccggcccagcccctgcagggccaactccagccccagaaacaaatgcaccaaaccatccgtctcccgccgagtacgttgaagtactgcaggagcttcagagacttgagtcccggcttcagccctttctccaacgttattatgaagtgttgggggcggcagctaccacggattacaacaataaccatgaaggaagggaggaggaccagcggctgatcaacctagtgggtgagtccctgcggctcctcggcaatacattcgtggcactaagcgaccttaggtgtaacctggcgtgtactcctcccaggcatctccacgttgtgaggccaatgagccattataccacaccaatggtactgcagcaggctgctatccctatccagattaacgttgggactaccgttaccatgactggtaacggtacgagaccacccccaacacctaacgccgaggcaccccccccaggccctggacaggcaagtagtgtggccccaagctctaccaacgttgagtcaagcgcggagggggctccacctccgggacccgcccctccgccggcaacctcgcatccgagagttatacgaatcagtcaccagtctgtggagcccgtggtcatgatgcacatgaatattcaggattctggaactcagcccggtggagttccatccgcccctaccggcccgcttggcccccccggacatgggcaaacccttggccagcaggtgcctggattccccactgccccaaccagggtggtgatcgcccgccccactcccccacaggcacgaccatctcacccagggggccctcccgtctcaggtacactgcagggtgccggattgggtaccaatgcatctctagcccagatggtgtctggactggtgggtcagctccttatgcagccagttctcgttgcccagggaacaccggggatggctcccccaccggcaccagcgaccgcctcagccagtgcgggcaccaccaacaccgcaaccaccgctggccctgctccaggcgggcctgcccagccacctcccaccccgcagccctccatggctgatctgcagtttagtcagttgttagggaatctgctcgggcctgctgggcctggagcaggtggatcaggagtcgcatctccaactatcactgtggctatgccaggtgtgccggcattcctgcaggggatgaccgattttctgcaggctacacagactgcaccaccacctcctcctcctccccctcctcccccccctgcaccagagcaacagaccatgccccctccggggtcccccagcggtggggcaggctctccaggagggctgggcctggaatcactgtcaccagagttctttacaagcgtggttcagggcgtgctgtcatcactcctaggaagtcttggcgcacgggcggggtcatcagaatcaatcgccgcatttattcagcgactcagcggaagtagtaacatttttgaacctggggcagacggcgcactggggttcttcggcgctctgctgagcttattatgccagaatttctctatggtcgatgttgtgatgttgctgcatggccatttccaacctctccaacggctgcagccccagcttcggtcttttttccatcagcactacctggggggacaagagccaactccttctaacattcgcatggccacacacaccttaatcacggggctggaggagtatgtacgcgagtccttcagtctggtccaggtgcagcccggtgtggatattattagaaccaacctggagttcctgcaggagcagttcaattcaatcgcagcacatgtgctgcactgtaccgactcaggctttggcgctcgtcttttggaactgtgcaatcaggggctgtttgagtgtctcgccctgaatctccactgcctgggcgggcagcaaatggaactagccgccgtaatcaatgggcgaattaggcgcatgagtagaggtgtgaatccttcattggtgtcatggcttacaacaatgatggggctacgtctgcaagtggttctcgagcacatgccggtggggcctgatgctatcttgcggtacgttcgccgcgtgggcgaccccccacaacctctgcctgaagaaccaatggaggtgcaaggggccgagagggcctcccccgagccgcaacgtgaaaacgcctccccggcccctggaacaactgcagaagaggccatgtccaggggaccaccaccagcgcctgaaggggggtctagagacgagcaagatggggcctcagcagagacagaaccgtgggcagctgctgtcccgccagagtgggttccaatcattcagcaggatattcagagtcagagaaaagttaagccgcagcctcctttgagcgacgcatatctgtccggtatgccagcgaaacggagaaagactatgcagggagaggggccccagttgttactgtccgaggccgtatctagagcggccaaggctgccggcgcccgtcctctgaccagtcccgagtccttgtcccgcgatctggaagctcccgaagttcaagaaagttaccggcaacaactacgctcagacatccaaaagcgacttcaagaagatcccaactattccccccagagatttcccaatgcccagcgcgcttttgcagacgatccgtag

SEQ ID NO: 211117 - DNA, 3795 bp, synthetic construct
  misc_feature 1..3795: note = Description of Artificial Sequence: Synthetic coding sequence
  source 1..3795: mol_type = other DNA
atgagcaccctgtacgtgagcccccaccccgacgccttccccagccttcgagcactgatcgccgccagatatggcgaagcgggcgagggtccggggtgggggggagcccaccctagaatttgcctccagccccctccaacgtctcgcacacccttccccccccctcgcctcccagccctagagcagggaccgggtggcctttgggtttggggggctaccgccgtcgctcaactcctgtggcccgccggcctcggaggcccaggggggtcgagggcggctgtgctggttcaacagtgggtgagctacgccgacactgagctgatcccggcagcctgtggtgcaaccctccccgccctgggccttcgcagctccgcccaagatcctcaggcagtgctcggcgcactgggcagagccctaagtccccttgaggagtggcttcgtctgcacacgtatcttgccggtgaggcaccgacacttgccgacctggcagctgtcaccgcattgttgctgccatttagatatgtgttggacccaccagcgagacgcatctggaataacgtgaccagatggtttgttacctgcgtgcgtcagccagaattccgcgctgtgctcggcgaggtggtgctgtattccggagcaaggcccttgtcacaccagcccggtcctgaagcccccgctcttcccaaaacggctgctcagctcaagaaagaagcaaagaagcgggagaagttggagaaattccagcagaagcagaaaattcagcagcagcagccaccccccggcgagaagaaaccaaagcctgaaaaaagagagaaacgagaccctggagtgattacctacgacctgccgaccccacccggcgagaagaaggacgtgtccggtccgatgcccgacagctattctcccaggtacgtggaggctgcatggtacccttggtgggaacagcaggggttctttaaaccagagtatggacggcctaacgtgtctgctgcgaatcccaggggagtcttcatgatgtgtattcctcctcctaatgtgactggtagcttacacttgggccacgctctgacaaatgcaatccaggactcactgacaaggtggcataggatgcgaggcgagacaacgttatggaatccaggctgtgaccacgccggaattgctacacaagtggtggtggaaaagaagctgtggcgggaacagggccttagtcggcaccaattgggtcgggaggcatttcttcaagaagtttggaagtggaaggaagagaagggtgatcgcatttatcatcagctgaaaaagctgggaagctctttagattgggatcgcgcctgcttcaccatggatcctaaactcagcgccgctgtaactgaagcatttgtccgacttcacgaggagggcatcatctatagatctacgaggctcgtgaactggagctgcaccctcaattctgcgataagtgacatcgaggtggacaaaaaagagctgaccggcagaacactgctcagtgtgcctggctataaggaaaaggtagagttcggagtgctggtgagctttgcatacaaagtccaagggagcgacagtgatgaggaggtggttgtggctactacaagaattgagaccatgttaggagatgttgccgtcgccgtgcacccgaaggatacacgttatcagcacctgaaagggaagaacgtgatacacccgtttctgagtcggtccctacccatagtattcgacgagtttgtcgatatggactttgggacaggagctgtgaagattacccccgctcacgaccagaacgactatgaggtggggcagcggcacggactcgaagccatctctatcatggatagcagaggggctctgatcaatgtgccgcctccctttttaggcctgccaaggttcgaggctcggaaagctgttctggttgccctgaaggagcgtgggctttttcgtggaatcgaggacaacccgatggttgtccccctttgcaataggtctaaagatgttgtggaaccgcttctccgtccgcagtggtatgtgcgctgcggagagatggcccaggccgcatcagctgcagtgacccgaggcgatcttaggatcttaccggaggcccaccaacgaacctggcacgcatggatggataacattcgcgagtggtgcatctcacgccagctttggtggggacaccgaattcctgcatatttcgtgaccgtctccgatccagccgtccctcctggtgaggatccagacgggcgttactgggtctcaggccgcaatgaggccgaggcgcgagagaaagcagctaaagagtttggggtgagccccgacaaaatctccttacaacaggacgaggacgtcctcgatacatggttcagctccggtctgtttccacttagcattctcggatggcccaatcagtccgaggatctgagtgtgttttacccgggaactctcctagagaccggacatgacatactcttcttttgggtggccagaatggtgatgctgggcctgaaactcactggaagacttccttttcgggaggtctatctgcacgccattgtgcgggatgctcacggtaggaaaatgagcaagagcttgggcaatgtgatcgatccattagacgtgatctatggaatctccctgcaaggcttgcataatcagctgctgaactctaatctggatccatctgaggtggagaaagctaaggaaggacagaaagctgacttccccgctggcattccagaatgcggcacagacgcgctgaggttcgggttatgcgcatacatgagtcagggaagggatattaatctggatgtcaatagaattttaggctaccggcatttctgcaacaagctgtggaatgcgaccaagtttgccctccgcggcctgggtaagggttttgtgccctcgcccacgagccagcctggggggcatgagtcactcgtggatcggtggatcagatcaagactgaccgaagctgttcggttgtccaatcaagggttccaggcctacgattttcccgctgtcaccaccgcacagtactccttctggttgtacgagctctgtgatgtctacctagagtgtcttaagccagtgctcaacggagtggatcaggtggctgcagaatgcgcccgtcagactctgtacacatgtctcgacgttgggctaaggctccttagtccttttatgccatttgttactgaggagctgttccagagactcccccgccggatgccccaggctccgccttctctttgtgtgaccccctaccccgagccttccgaatgctcctggaaggatccggaggctgaagcagctctcgagctggccctgagcatcacgcgggccgtccggtcattaagggccgactacaacctcaccaggattagaccggattgtttcctggaagtagcggatgaggcaactggggctctggcatctgccgtcagcggctatgtgcaggccttggcgagcgccggcgtcgtagctgtgctggctctcggagcccctgcccctcagggctgcgcagtggcactggcctctgatcggtgctcaattcacttgcaacttcaagggctcgtggatccagctcgagagttggggaaactccaagccaagcgggtggaggcacagagacaagcccaacgccttcgcgagagaagggcggccagcggttatcccgttaaagtacctttggaggttcaggaggccgatgaggcgaagttgcagcagacagaggcagagctgaggaaggtcgacgaagctatcgcactgtttcagaagatgctgtag

SEQ ID NO: 211118 - DNA, 525 bp, synthetic construct
  misc_feature 1..525: note = Description of Artificial Sequence: Synthetic coding sequence
  source 1..525: mol_type = other DNA
atgagcaccctgtacgtgagcccccaccccgacgccttccccagcctgcgggccctgatcgccgctcgttacggggaggccggagagggaccagggtggggtggcgcccatccacggatatgtctgcagccgcctccaaccagccgcacctccttcccaccaccacgcttacccgccctggagcagggccctggcggattatgggtatggggggccacagctgtcgcacagttactctggccagctggtctcggaggaccaggcggctcaagggccgcagttctggtgcagcagtgggtgtcttacgccgataccgaactgattccagctgcttgtggagccacactccctgcgttaggactaaggtcgtcggcacaggaccctcaggcagtgctcggggcattaggccgtgccctgagtcccttggaagagtggctcagactccacacatacctggcaggcgaagcaccgactttggccgacttggccgccgttaccgccctgctgctacctttccggtattag

SEQ ID NO: 211119 - DNA, 525 bp, synthetic construct
  misc_feature 1..525: note = Description of Artificial Sequence: Synthetic coding sequence
  source 1..525: mol_type = other DNA
atgagcaccctgtacgtgagcccccaccccgacgccttccccagcctgcgtgccctcattgcagcaaggtatggggaagcgggggagggcccaggatggggcggtgctcaccctcggatatgcctccagcctccgccgactagtaggacatcgtttcccccaccccgcctgccagcccttgaacaggggcccggaggactgtgggtgtggggcgcgacagcagttgctcagctcttatggcccgccggcctgggtggacctggtggaagccgggccgccgtgctggtgcagcagtgggtttcttatgcagatactgagctgatccctgccgcatgcggggctacccttcctgcgctcggtttgagaagcagtgcccaggacccccaggccgttctcggggccctgggtagggctctaagtccactagaggaatggctgcgtttgcatacctatctggctggcgaggctccaactcttgctgatcttgctgccgtcacagcgctcctgcttccctttaggtattag

SEQ ID NO: 211120 - DNA, 867 bp, synthetic construct
  misc_feature 1..867: note = Description of Artificial Sequence: Synthetic coding sequence
  source 1..867: mol_type = other DNA
tgaaaggagcggggcctgttccggggcatcgaggacaaccccatggtcgtgcctttgtgcaataggtctaaggacgttgtggaaccgctgctgcgtccccaatgggagtggtgcatatctcggcaactttggtgggggcacaggataccggcctacttcgtcaccgtgtccgaccctgcagtccccccaggtgaagaccctgacggcaggtattgggtatctggccgaaatgaggctgaggctcgtgagaaagcagcaaaggaattcggggtatcacccgacaagatttctctccaacaagacgaggacgtgctggatacttggtttagctccggtctcttcccgttaagtatactgggctggccaaatcaatcggaggatcttagcgtcttctaccccggaacgctgctagagaccgggcacgatatcttgttcttttgggtggccaggatggtcatgctggggctcaagttgacaggaagactgccattcagagaagtttaccttcacgctatcgtacgagatgcgcatggcaggaaaatgagtaagtcactcggcaatgtaatcgacccgttagacgtaatttacgggatatcactccagggcttgcacaaccagctgctaaatagcaacctcgacccttccgaggtggaaaaagcaaaggaagggcagaaggccgatttccccgcagggatcccggaatgtggcaccgatgctctgcggttcgggctttgtgcctacatgagtcaaggcagagatattaatttggacgtgaacagaatcctgggataccgccatttctgtaataagctatggaatgcgacaaaattcgccctacgaggcctggggaagggcttcgtgccctag

SEQ ID NO: 211121 - DNA, 3795 bp, synthetic construct
  misc_feature 1..3795: note = Description of Artificial Sequence: Synthetic coding sequence
  source 1..3795: mol_type = other DNA
atgagcaccctgtacgtgagcccccaccccgacgccttccccagcttgagagcgctcatagcagctcggtacggggaggcgggagagggcccaggatgggggggggctcaccctcggatctgcctgcagccaccccctacatcgaggacgtctttccccccacctcgactgcctgctttggaacagggtcccggtggactatgggtgtggggggccacggctgtggcacaactgttgtggcccgctggcctcggtggaccgggcggatctcgggccgcggtgctcgtgcagcagtgggtgagctatgcggacaccgagctgattccagctgcctgtggggctaccctgccagctctaggacttagatcgtccgcccaggatcctcaagccgttttgggtgcactgggtagagcgctttctcctctcgaagagtggcttcggctgcacacctatttagcaggcgaggctcctacattggccgacctcgcagccgttaccgcccttttgttgccattcaggtacgttcttgacccccctgcccgcagaatctggaataatgttacccgatggtttgtaacttgcgtccgtcagcccgagtttcgggctgtgttaggcgaggtcgtactttacagcggcgctcgccctttgagtcaccaaccaggccctgaagccccagcacttcccaaaactgccgcccagctgaagaaagaagctaaaaaaagggagaagctcgaaaagtttcagcagaaacaaaaaatccagcagcagcagccacctcctggtgaaaaaaagcccaagcctgagaaaagggagaagagggaccccggcgtgatcacatacgatcttcccaccccccctggtgaaaaaaaggatgtgtccggaccgatgccggatagctactcaccacgatacgtcgaggccgcctggtacccttggtgggagcaacaggggttcttcaaacctgagtacggacgcccgaacgtctcggccgccaaccccagaggagtctttatgatgtgcattccgccccctaatgtcactgggtccttgcacctcggccatgcccttaccaacgctatccaagactccctgactcggtggcacagaatgcgcggtgagacaacactttggaatcccgggtgcgaccatgccgggattgcgacacaggttgttgtggagaaaaaactgtggagagaacaagggctttcacggcaccagctggggagggaagcctttttacaggaagtgtggaagtggaaagaagaaaagggtgacaggatttaccatcagttaaaaaaactcgggagttctctggactgggatagagcatgtttcactatggaccccaaactgtctgctgctgtaacagaagcatttgtgaggcttcacgaggaagggatcatttatagatccactaggctggtgaattggagctgcactctgaattctgccatatctgacattgaggttgacaagaaggaactgacaggtcgaacactgctttctgtgcctggttacaaagagaaggtcgagttcggtgttctggtaagctttgcatacaaagtacagggcagcgactctgacgaagaagtggtagtagcaaccacgcggatcgagactatgcttggcgatgttgccgtggctgtgcaccccaaggatacaagataccagcatctaaaggggaagaacgtgattcaccctttcctgtcccggtccttgccgatcgtgtttgatgagttcgtggacatggattttgggaccggggcagtgaaaataacacccgctcacgatcagaatgattatgaagtcggtcagcggcatggactggaagctataagcatcatggactcccggggcgccttgattaacgttccccccccttttctgggtctgcctagattcgaagcccgcaaagccgtccttgtagccttaaaggaaaggggactgttccgcggaattgaagacaatcccatggttgtcccactgtgtaacagatctaaagacgttgtggaaccgttgctcagaccccagtggtatgtgcgctgtggtgaaatggcgcaggcagcctcagcagccgtgacaaggggggacctgcgtatcttacccgaggcacaccagaggacgtggcatgcctggatggataatatccgcgagtggtgtatatcccggcagctatggtggggtcaccgaatcccagcatattttgtcactgtttccgaccctgccgtgcctcctggagaagatccagatggacgttactgggttagtggacgtaatgaggccgaagctcgcgagaaagccgcgaaagaatttggagtgtcccctgataaaatatcactccaacaggatgaggacgtgctggacacatggttctccagcggcctcttcccgctcagcattcttggctggcctaaccagagcgaggatctgtcggtcttttaccccggcaccctcctggagactgggcacgacattctgttcttctgggttgcacggatggtgatgctcggtttaaaacttacaggccgattgcccttccgtgaagtctatctccatgcaatcgtgcgcgacgcccacggaaggaaaatgtcgaagagtttgggtaatgtgattgatcccttggatgtaatctatgggatctcactgcagggccttcataaccagctcctgaactctaatctggatccctctgaagtggagaaggcaaaggaaggccagaaagctgattttccagcgggaattcccgagtgcggcactgacgcattgaggtttggactgtgcgcatacatgtcacagggcagagacatcaatctcgatgttaaccggattctgggttacaggcacttctgcaacaagctttggaatgctactaaatttgcattacgtgggctcggtaaggggtttgtcccttcccctacgagccaacctggaggccacgaatccctggtggatcggtggataaggagtcgactgaccgaggcagttaggctctccaaccagggcttccaggcctatgacttcccggcagtgacgactgcacagtacagcttttggctttacgagctctgcgatgtctacttggaatgcttgaaaccagtactgaacggagtcgatcaagtggctgccgaatgtgcaaggcaaacactgtacacatgccttgatgtcggtctgcgtcttcttagtccttttatgccatttgttactgaagagctgttccagagattgcctagacggatgccacaggctcccccctcactgtgtgtgaccccctatcctgagcctagtgagtgtagttggaaggacccggaggccgaagccgcgctcgaactggcactgtcgattacgcgcgcggttaggtctttgcgtgcggattacaatctgactaggatccgccccgactgttttctggaggtcgccgacgaggctacaggagccctggccagtgcggttagtgggtacgtgcaggctttggccagtgcaggagttgtggcagtccttgctttgggcgccccagcacctcagggctgtgctgtcgctctggctagtgacaggtgcagcatccatctgcagctgcagggcctggtcgatcccgcccgggagctggggaagctccaggcgaagagggtagaagcccagaggcaggcacaaaggctcagagagagaagggccgcctcaggctaccctgtgaaagtgccattggaggttcaggaagcagacgaggccaagctgcagcagactgaagctgagctgcggaaggttgatgaggcaattgcattgtttcagaagatgttgtag

SEQ ID NO: 211122 - DNA, 1101 bp, synthetic construct
  misc_feature 1..1101: note = Description of Artificial Sequence: Synthetic coding sequence
  source 1..1101: mol_type = other DNA
atgagcaccctgtacgtgagcccccaccccgacgccttccccagccttagggctctaattgccgcaagatacggagaggcaggggaaggacccggctggggaggcgctcatcctcgaatctgtctccagccacctcctacctccagaacaccgtttccacctcctcgactgcctgccctcgagcaggggcctggaggactttgggtgtggggcgcaactgccgttgctcaactgctctggcccgccggactgggcggacccggagggagtcgcgccgctgtgctggttcaacagtgggtgtcctatgctgataccgagcttatccccgccgcctgcggggcgacactgccagccctaggtctgcggtctagtgcgcaggacccacaggcagtcctgggtgcacttgggcgcgccctgtcccccttagaggagtggctgaggctccacacttacctggctggagaggcccctactctggcagacctagctgcagttaccgccctgcttctgccttttcggtatgtgctggatccacctgccaggagaatttggaataatgtcacgcgatggtttgtgacctgtgttcgtcagcctgagttccgagccgtgcttggggaagtcgtgctgtacagcggagccaggcccctgagccaccagcccggccctgaggctcccgcactgcccaagaccgctgcccaactgaagaaggaggcaaagaaaagggagaagctcgaaaagttccagcagaaacagaaaatccaacagcagcagccaccacctggagagaaaaaaccaaaacccgagaagcgggagaaacgtgaccctggtgttatcacttacgatcttcctacaccacccggggaaaagaaagacgtttcaggtcccatgcccgatagttatagcccgcggtacgtggaggcagcctggtacccctggtgggagcaacaaggatttttcaagcccgaatatggccgccccaacgtctcagccgcaaatccaagaggagttttcatgatgtgtattcccccaccgaacgttacaggttcccttcacttaggccacgcactgacgaacgctattcaggatagcctaactcgctag

SEQ ID NO: 211123 - DNA, 525 bp, synthetic construct
  misc_feature 1..525: note = Description of Artificial Sequence: Synthetic coding sequence
  source 1..525: mol_type = other DNA
atgagcaccctgtacgtgagcccccaccccgacgccttccccagcctccgggcacttatcgccgcccgctacggcgaggccggcgaaggccccggctgggggggtgcacatccacggatctgcttacagccaccccctacatcccgcactccatttcccccccctcgactccctgccctggaacagggcccaggcgggctttgggtctggggggcaaccgctgtggcccagcttttatggcccgccggcctgggcgggccaggcggatctagagctgctgtattagttcaacaatgggtgagctatgcggacaccgagctgattcccgcggcttgcggcgctactcttcccgccctcggcctgcgcagcagcgcccaggatccgcaggcagtactgggcgcactgggacgagccctgtccccactggaagagtggctcagactccatacctacctggctggagaggccccgacactcgcggacctcgccgcagtcacggccttactgctccccttccggtactag

SEQ ID NO: 211124 - DNA, 3552 bp, synthetic construct
  misc_feature 1..3552: note = Description of Artificial Sequence: Synthetic coding sequence
  source 1..3552: mol_type = other DNA
tgaggcctgggcggccccggcggcagccgggccgccgtgctggtgcagcaatgggtgtcatatgccgataccgagctgataccagccgcttgtggcgctaccctgcccgcccttggattgcgttcctctgcacaggacccccaagccgtgcttggggccttgggaagagctctcagtccattagaggagtggctccggctacatacatacttggctggcgaggcacccacgcttgccgacctggctgccgtcacagcgttactgctgccattcagatatgttcttgacccccctgctcgccgtatatggaacaatgtgactcggtggttcgttacctgtgtccggcagccagagttccgcgccgtgctgggggaggtggtgctgtactctggcgcaaggccgctgtcacatcagccaggccccgaagcccccgctctgcctaaaaccgccgctcagctcaagaaagaggccaaaaagcgggagaaactggagaagtttcagcagaagcagaaaattcagcagcagcagccacctcccggggagaaaaagcctaagccagagaagagggagaagcgagacccaggagtgattacctatgatctcccaacaccgccaggcgagaaaaaggacgtgtccggaccaatgcccgactcctattccccacgctatgtcgaggctgcctggtacccatggtgggagcagcagggcttctttaagccagaatacgggaggccaaacgtgagcgcagcaaatccgcgaggcgtctttatgatgtgcattccgcctcctaatgtgactgggagcctgcatctgggacacgctctcacaaatgccatccaagattccctcacccgctggcatagaatgagaggcgagacaacactgtggaatccagggtgtgaccacgccggcattgccacccaggtagtggtcgagaaaaagctttggcgagagcagggcctctccaggcatcagttgggaagggaggcgttcctgcaggaagtgtggaaatggaaagaggaaaaaggtgacaggatttaccatcaactcaaaaagttaggctcgagcctggattgggacagggcctgtttcacaatggatccaaagttgtcagccgctgtaactgaagcttttgtgagactacatgaagagggcatcatctatcgctcaaccaggcttgttaactggtcgtgcactttgaattctgcaatcagcgacattgaggtcgataaaaaagagcttacagggagaaccttactatctgtccctggctacaaagaaaaggtggaatttggcgtcctggtgagctttgcttacaaagttcaaggctcagactctgacgaggaggtagtcgtggcgactactcggatcgaaacaatgctaggcgatgtcgctgtggccgtccaccccaaggatactagatatcagcacttaaaagggaaaaacgttattcacccatttcttagtcgctccctgccaatcgtttttgatgaattcgtcgatatggatttcgggacgggcgctgttaaaataaccccagcccacgaccagaacgattacgaagtgggccagaggcacggactcgaggcgatctcaatcatggacagccggggcgcccttataaacgttcctccaccctttctcggtctgccccgctttgaagcgagaaaggctgtgcttgtggcccttaaggaaagaggcctctttaggggaatagaagataaccccatggtggtgccattgtgtaatagatctaaggacgtcgtggagcctttgctgcggccacaatggtatgtccgctgtggcgaaatggcccaggccgcttctgcggccgtgacaagaggtgacctgcgcatcctcccagaagcgcatcaacgaacctggcatgcctggatggacaacatccgtgagtggtgtatttctcgccagctttggtggggccacagaatccccgcatattttgtgactgtgtctgaccccgctgtgccccccggcgaggaccccgatggtcgctactgggttagcggcagaaacgaagctgaggctagggagaaggccgcaaaggagtttggtgtctctcccgacaagatcagtctgcagcaggatgaggatgtgctggatacatggttttccagcgggctgttccccctgagcatactaggctggcccaatcagtcagaggacctctccgtgttttatcccggcactctcctggagactggccacgacatcttgtttttctgggtcgctagaatggttatgctcgggctgaaattgaccggccgacttccatttcgggaagtctatttgcatgcaatcgtgagggacgcccacgggcgtaagatgtcgaagagtttgggcaatgtaatcgatccacttgacgtgatttacgggataagccttcagggtttgcacaatcagctcctgaattctaatctagacccatctgaagttgaaaaggccaaggagggtcagaaggctgatttccctgcgggaattcccgaatgtgggacggacgccctgagatttggactgtgcgcttatatgtcccaggggagagacattaacctcgacgtgaacagaatacttggttaccgccacttttgtaacaaactgtggaacgccacaaagttcgctttacgggggctgggtaagggatttgtgccatctcctacaagccagccgggaggtcatgagagtctcgtggataggtggataaggtcccgcctgaccgaggccgtccgactgtccaaccagggatttcaggcatacgattttccagccgtgactactgcccagtactcgttctggttgtacgaactgtgcgacgtgtatcttgaatgcctcaaacctgtgctgaatggagtcgaccaggtggcagctgaatgtgcccgccagaccctgtacacatgcctcgatgtcggtctacgactgttgagccccttcatgccattcgtgacagaggagttattccaaagactaccacggcgtatgccccaagcccctccgagcctttgtgtgaccccctatcctgagccaagtgaatgtagttggaaggaccccgaggcagaggcagccttggagctggccctatccatcacaagagcagtccgcagcttgcgcgctgattacaacctgacaaggatccgccccgattgttttctggaggtggccgacgaggccactggcgccctggcaagtgcagtctccggctacgtgcaggcgttggccagcgccggagttgtagcagtgttggccctcggcgccccggcaccacagggctgcgccgtcgccctggcgtctgaccggtgctcgatacacctgcagctgcagggtttggtggaccctgctagggaactcggaaaattacaggccaagagagtcgaggcacagaggcaggctcagagactcagagagaggcgcgccgccagcggttatccagttaaagtccccctggaagtgcaggaggctgacgaggccaaactccaacagacagaggccgagttgcgcaaggttgatgaggcaatcgcactatttcagaaaatgctgtag

SEQ ID NO: 211125 - DNA, 525 bp, synthetic construct
  misc_feature 1..525: note = Description of Artificial Sequence: Synthetic coding sequence
  source 1..525: mol_type = other DNA
atgagcaccctgtacgtgagcccccaccccgacgccttccccagccttcgagccctaatcgccgctcgctacggggaggcaggtgaaggacctggatggggtggcgcacatccccgtatctgtcttcaacccccacccacatctcgcaccccttttcctccccccagactacctgccttggagcagggtcctgggggcctgtgggtgtggggcgccactgccgtcgcccagttgttgtggcccgcagggctcggaggacctggggggtctagagccgctgtactcgtgcagcagtgggtctcttatgctgatacagaactcatcccggccgcgtgtggcgccaccctgccagcactcgggctgcgctcatctgcccaagacccccaggctgtgctaggagcgttgggacgggcactgagcccattagaagagtggctcagacttcatacgtatctcgcgggagaagctcccactctcgcagatcttgctgcggtgactgcgctgctactcccgttcaggtactag

SEQ ID NO: 211126 - DNA, 867 bp, synthetic construct
  misc_feature 1..867: note = Description of Artificial Sequence: Synthetic coding sequence
  source 1..867: mol_type = other DNA
tgaaaggagcggggcctgttccggggcatcgaggacaaccccatggtcgtgcctctatgcaataggtcaaaggacgttgtcgaacccctactcagaccccagtgggagtggtgtatttcacggcagctgtggtggggacacaggattccagcctactttgtgacagttagtgacccagccgtcccccctggtgaggacccagacggtaggtactgggtgtcgggccggaacgaagctgaagcgagagagaaagccgcgaaagagttcggcgtctcccctgacaagatttccctgcaacaggatgaggatgtgctggacacttggttcagttccggcctgtttcctctctctatactggggtggcccaatcagtcggaggatctgagtgtgttttacccaggcaccctcctggaaactggacatgatatattatttttttgggtagccagaatggtaatgttgggcttaaagttgactggtcgtttgccattccgagaggtatatctgcatgccatcgtgagggacgcacacgggcggaaaatgtccaagtccctcgggaacgtgatcgatccactagacgtcatctatggtatatccttgcaagggctgcacaatcagctcctcaatagcaacctggatccgtccgaggtcgagaaggcaaaagaagggcagaaggcagacttcccagcagggattccagaatgtggcaccgatgccttgcgcttcgggctgtgcgcgtatatgtcacagggccgagatatcaatctggatgtgaaccgtatacttggctaccgtcacttctgcaataaactctggaatgctaccaaattcgcactcaggggactcggtaaaggctttgttccatag

SEQ ID NO: 211127 - DNA, 525 bp, synthetic construct
  misc_feature 1..525: note = Description of Artificial Sequence: Synthetic coding sequence
  source 1..525: mol_type = other DNA
atgagcaccctgtacgtgagcccccaccccgacgccttccccagcctgcgggctcttattgccgctcgctatggagaggctggcgaagggcccggctgggggggcgctcacccacgcatttgtcttcagccgcctcccacaagccggactccattccctcctcccaggcttcccgcactcgaacagggacctggaggtctgtgggtgtggggtgcaacggcggtggcacagctgctgtggccggcagggctgggtggccctggcggcagtagggctgccgtcttagtgcagcagtgggtgtcctacgccgatactgagctgatcccagctgcctgtggagccacacttcccgctctaggcctccggagtagtgcacaagacccgcaagcagtgctgggagccctgggtcgcgccctgagtcctttggaggaatggcttaggctccatacctacctggccggagaggcgccaacactggccgatttggcggcagtgacagcactactgttgccctttcgctactag

SEQ ID NO: 211128 - DNA, 867 bp, synthetic construct
  misc_feature 1..867: note = Description of Artificial Sequence: Synthetic coding sequence
  source 1..867: mol_type = other DNA
tgaaaggagcggggcctgttccggggcatcgaggacaaccccatggtggtcccgctctgcaatagatcaaaggatgtcgttgagcccttgctgcgccctcaatgggagtggtgcatcagtcgacagctgtggtggggccataggatccctgcatacttcgttaccgtgagcgatccagcggtgcctcccggcgaagaccctgacgggcgctattgggtgtctggccgcaacgaagctgaggctagagagaaagcggcaaaagagtttggggtgtctcctgacaaaataagcctccagcaggacgaggatgtcctagacacctggttcagcagcggcttgtttccactgagcattctgggttggcccaatcagagcgaagacctgagtgtcttctacccaggaactctgctggaaacagggcatgatatcctcttcttttgggtggccagaatggtaatgctgggcttgaagctgaccggtaggttgcctttcagggaggtttatttgcacgccattgtacgggatgcacatggcaggaagatgtcaaaatcactaggtaacgtcatcgaccctctggacgtgatatatggcatttccctgcaagggctccacaaccagctattgaacagcaacctggatccatccgaagtcgaaaaggctaaagaaggccagaaagcggattttcctgccggaatcccggagtgtgggacggacgcactgcgatttggactgtgcgcttatatgagccaggggagggatataaatcttgatgttaatcggatcctcggctacagacacttctgcaacaaactttggaacgcaacaaagttcgctctgcgggggctgggcaaaggttttgtgccgtag

SEQ ID NO: 211129 - DNA, 867 bp, synthetic construct
  misc_feature 1..867: note = Description of Artificial Sequence: Synthetic coding sequence
  source 1..867: mol_type = other DNA
tgaaaggagcggggcctgttccggggcatcgaggacaaccccatggtggtgcctctgtgtaatcgctcgaaggacgtggttgaacccctgctgcggccccagtgggaatggtgtataagccggcagctatggtggggccaccgcatccctgcttatttcgtgactgtgtccgatcctgccgtgcctcctggcgaggaccctgatgggcgctactgggtgtctggtcgcaacgaggccgaggcacgcgaaaaggcagccaaggaatttggagtttctcctgataaaatctcgctgcagcaggacgaagatgtactcgacacatggttttccagcgggctgtttccactaagtatcttaggatggccaaaccagtctgaggacctgtctgtgttctacccagggacactcctggaaacaggtcacgatatactcttcttctgggtggctcggatggtcatgctcgggctcaagttaacaggtaggctcccatttagagaagtgtatcttcacgcgatcgtaagggacgctcacgggcgcaagatgtcaaagagccttggaaatgtcatcgaccctcttgatgtgatctatggcatctcgctgcagggcttacacaaccagttgctcaactccaacctggacccctcagaggttgagaaggccaaggagggccagaaggccgatttccctgccggaattccagaatgtggcacagatgcgcttcgtttcgggctgtgtgcttacatgagccagggaagagacatcaaccttgatgttaaccgaattctcggctaccgccacttttgcaacaaactgtggaatgcaactaagttcgccctccgaggtctcgggaaggggttcgtgccttag

SEQ ID NO: 211130 - DNA, 3795 bp, synthetic construct
  misc_feature 1..3795: note = Description of Artificial Sequence: Synthetic coding sequence
  source 1..3795: mol_type = other DNA
atgagcaccctgtacgtgagcccccaccccgacgccttccccagcttaagagcacttatcgcagccagatatggggaagctggggaagggcccggatggggaggagcccacccgaggatttgcttgcagccccccccaacctcacgaacgtcttttccacccccaagactccccgccttggaacagggaccaggtggcctgtgggtctggggtgcaacggcagtggcgcagctgctttggccagctggactcggaggacccggaggctcaagggccgccgtgcttgtacaacagtgggtgtcatatgctgacaccgagctgattcccgcggcatgcggggctactctgcctgccctggggctgaggagctcggcacaggatcctcaggccgtcttgggcgccctcggtcgggcgctcagtccactcgaggaatggctgcggctgcatacctacttagccggggaagcgcccacccttgccgaccttgccgccgtgacggcactgctgctgcctttccgttacgtattggacccacccgcaagacgaatctggaataatgtgacacgctggttcgtgacttgtgtaaggcaaccagagtttcgtgcagttttgggcgaagtggttttgtacagtggcgccagacctctgtctcatcagcccggccctgaggcgccggccctccccaagacagccgctcagctgaaaaaagaagcaaagaaacgggaaaagctggagaagtttcagcagaaacagaaaatccagcagcagcagcctccccctggtgaaaaaaagcctaaaccagagaaacgggagaagcgtgacccaggtgtgataacatacgatttacccactcctcccggcgagaaaaaggacgtgtccggaccaatgcctgactcttattccccacggtatgttgaggccgcctggtatccttggtgggagcagcagggtttctttaagccagagtacggcagacccaacgtctcggccgcgaaccctcgaggcgtgtttatgatgtgcattcctcccccaaatgtgactggaagcctccacctgggacacgcactgaccaacgcgatccaagatagccttacccgctggcatcgaatgcgaggcgaaaccaccctatggaatccagggtgtgatcatgccggtatcgccactcaggtagttgttgagaagaaactttggcgggagcagggactgagcagacatcagctaggccgggaggcattcttgcaggaggtgtggaagtggaaggaagaaaagggggaccgaatttatcaccaactcaagaaactagggtctagcttggattgggaccgggcctgtttcaccatggatcctaagttatctgctgcagtgaccgaagctttcgttagactgcacgaggagggcatcatctaccgctcaaccagattagtgaactggtcatgcaccctgaattccgctataagcgacatagaggtcgacaagaaggaactgacaggaagaacgctgttaagcgttcccggttacaaagaaaaagttgaatttggtgtgcttgttagctttgcatataaagttcagggcagcgactctgatgaggaggtggttgttgccactactcgcattgaaaccatgctcggagacgtcgccgtggctgtccacccaaaagataccaggtaccagcatctgaagggcaagaacgtgatccaccccttcctgtcacgctccttacccattgtcttcgacgaattcgtggatatggatttcggtaccggggcagtgaaaataacacctgctcacgatcagaacgattacgaggtcggtcagaggcacggcctggaagctatctctataatggacagtcgaggagctcttatcaatgtgccaccaccattcctggggttgccccggtttgaagcccgcaaggctgtgctcgtggcattgaaggaacgggggcttttccgcggaatcgaagacaatcccatggttgtgcccctctgcaatcggtctaaggatgtggtggagcccctgctcaggcctcagtggtacgtgcggtgtggagaaatggcccaggcggcctcagcagctgtcactcggggcgatcttaggatcttgcccgaggcacaccagagaacttggcacgcgtggatggacaatataagggagtggtgtatatccagacagctatggtgggggcacaggatccccgcttattttgtcacagtcagtgatcctgccgttccccccggagaggacccagatggtcgctattgggtgtctggtcgaaatgaggcggaagcccgagaaaaggccgcaaaggaatttggagtctcccccgacaagataagcctgcaacaggatgaagacgttctggacacatggttttcctccgggttgtttcctctgtctattctagggtggccgaatcagagcgaagatctgtccgtgttctaccctggaactttgctcgaaaccgggcacgacatcttgtttttctgggttgcccgcatggtgatgctgggtctaaagttaaccggacgactaccctttagggaagtgtatcttcacgcaatcgtgagggacgctcatggccgaaagatgagcaaatccctgggcaacgtaattgatcctctggacgttatctacgggatttcactgcaggggctgcacaatcagctccttaactccaacctggacccatcagaagtggaaaaggccaaggagggtcaaaaagccgattttcccgctgggatcccagagtgcggaactgatgccttgagattcgggctctgcgcatatatgtcacaggggagggatatcaacctggatgtcaataggatcctgggctatagacatttttgcaacaagctgtggaacgcaaccaaattcgcccttagaggtctgggtaagggcttcgttccctcccccacgagccagcctggcggtcatgagtcgctagtggatagatggatacgctcccgactcaccgaagcagtgcgcttgtccaatcagggcttccaggcttacgactttccagcggttactacagcccaatacagcttctggctgtatgagctttgtgatgtgtaccttgagtgtctgaagccagtgctgaatggagttgatcaggtggcagcggagtgcgctcgccagaccctgtacacgtgcctggacgtgggactcaggcttctgagcccttttatgccttttgttacagaggagttgtttcagaggctgccaagacgaatgccacaagctccaccaagcctgtgcgtaactccataccctgagccaagcgagtgttcctggaaggatcccgaggccgaggcagctctggagcttgccctcagtattacaagggcagttaggagtctcagggcggattacaatctgacacggattcggcctgactgctttcttgaggtggccgatgaggccacaggcgcactcgcctctgccgtctccgggtatgtccaggctctggcctctgctggggtggtggcagttcttgcactgggagctccagccccacagggctgtgccgtcgctctggcttctgaccgctgtagcattcatttgcagcttcaagggcttgtggaccctgctcgagagctgggaaaactccaggccaaaagggtcgaggcccagcgccaggcgcagcgtctaagagagcgacgcgccgcaagcgggtacccagtaaaagtccctctggaagttcaagaggccgatgaggctaaactgcaacagacagaagcagagctccgcaaggtggatgaggcgatcgctttattccagaagatgctctag

SEQ ID NO: 211131 - DNA, 525 bp, synthetic construct
  misc_feature 1..525: note = Description of Artificial Sequence: Synthetic coding sequence
  source 1..525: mol_type = other DNA
atgagcaccctgtacgtgagcccccaccccgacgccttccccagcttgcgagctctgattgccgctagatatggagaagctggcgaggggcccggctggggcggtgcacaccctagaatttgtcttcagcccccgccaacgtcaaggactccttttcccccacccaggttgcccgcgctggagcaggggcctggcggtctctgggtgtggggagccactgccgtggcacaactgctttggccagccggtttgggcggtcccggtggatctcgtgctgcagtgctcgtgcaacagtgggttagctatgccgacaccgaactaatcccagcagcttgcggggccacgttgccggctctggggctgcgctcatctgcccaggatccacaggcagtgttgggcgccctcggccgggccctatcaccgctcgaagaatggctgagactccatacatacctcgccggcgaagctccaacccttgcggatctcgctgccgtgactgctctcctcctacccttccggtactag

SEQ ID NO: 211132 - DNA, 894 bp, synthetic construct
  misc_feature 1..894: note = Description of Artificial Sequence: Synthetic coding sequence
  source 1..894: mol_type = other DNA
atgcccgacagctacagcccccggtacgtggaggccgcctggtacccctggtgggaacagcagggtttctttaaaccagagtatggaaggcccaatgtgtcggccgccaacccacggggtgtgtttatgatgtgcatccctcctcccaatgtgactggtagccttcacctcggacatgccctcaccaatgccattcaggattcccttactagatggcaccgcatgcgcggcgaaacaaccttatggaatcccgggtgcgaccatgcgggaattgctacacaggttgttgtggaaaaaaagctgtggcgtgagcagggtctcagccgccatcagcttggccgggaagcgttcctgcaggaagtgtggaaatggaaggaggaaaaaggtgaccgcatctaccatcaactgaagaagctgggctcttcattagactgggatagggcgtgcttcacaatggaccccaagctgtctgctgcagtgactgaggctttcgtgcggttacacgaggaaggcatcatctaccgcagcacacgcctggtgaattggtcttgcactcttaactcagctatttctgacattgaggtggacaaaaaagagctgacaggtcgcaccctgctgtcggtgcccggctataaggaaaaagtggaattcggcgttctggtttcttttgcctataaggtgcaaggatcagattcagatgaggaggtcgtggtcgctaccacccgcatcgagaccatgttgggtgacgtagcagttgccgtgcacccaaaggacaccagataccaacatttgaaagggaagaatgtgattcatccattcttaagtagaagcttgccaattgtgttcgatgaattcgttgacatggactttgggacaggacccgcccaggtctag

SEQ ID NO: 211133 - DNA, 867 bp, synthetic construct
  misc_feature 1..867: note = Description of Artificial Sequence: Synthetic coding sequence
  source 1..867: mol_type = other DNA
tgaaaggagcggggcctgttccggggcatcgaggacaaccccatggttgtgcccctctgtaacagaagtaaagacgtagtggaaccgctcctgcgcccacagtgggagtggtgcatctctcggcagctctggtggggccataggattccggcttacttcgttaccgtctcagaccccgccgtgcctccgggcgaggaccctgacggcagatattgggtttccggtcgaaatgaggctgaggctcgcgaaaaggccgccaaagagtttggagtcagtcctgacaagattagtctgcagcaggacgaggacgtgttggatacttggtttagctctggactgttcccgcttagcatacttggatggccgaatcaatccgaggatctgtctgtgttctacccgggaacccttctcgagactggccatgatattctgttcttctgggtggcccgcatggtgatgctgggcctgaaactgaccggccgtttacctttcagggaggtctatctacatgcaattgtcagggacgcccatggccgaaaaatgtccaagagtctcggcaatgtcatcgaccctttagacgtgatatacggaatttctttgcagggattacacaaccaacttctgaacagcaatttagacccctcagaggttgagaaggccaaggaaggacagaaggcagactttccagcaggtatcccagagtgtggaacagacgcccttcgctttggcctttgcgcctacatgagccaggggcgcgatatcaacttggacgtaaacagaatactaggttataggcatttctgcaacaaactctggaatgctacaaaatttgcgctgcgcgggctgggaaaaggatttgtgccatag

SEQ ID NO: 211134 - DNA, 867 bp, synthetic construct
  misc_feature 1..867: note = Description of Artificial Sequence: Synthetic coding sequence
  source 1..867: mol_type = other DNA
tgaaaggagcggggcctgttccggggcatcgaggacaaccccatggtcgtacccctttgtaatcgcagcaaggacgtggtggagcctcttttgcggcctcaatgggagtggtgcatcagtcggcagctttggtggggccaccggattccggcttacttcgtaacggtgtctgatcctgctgtaccacctggggaagatccagacggacggtattgggtctcgggtaggaacgaagccgaggccagggagaaagccgcgaaggagttcggagtgtcccctgacaagatttcactccagcaggatgaggacgtattagatacatggttttcctctgggcttttccctctctcaatcctggggtggccaaatcagtccgaagatctctcggtattttaccccggaactctcttagagaccggtcatgacattctctttttttgggtcgcacggatggttatgctgggccttaaactgactggtcgtctgccatttcgcgaagtgtatctgcacgccatagtccgggatgcccacgggcgcaaaatgtctaagtctctgggcaacgttatcgacccacttgacgtcatatacggtatcagcttacagggcctacataatcaactgttgaacagcaacctcgaccctagtgaggtggagaaggcgaaggagggccagaaggctgatttcccagccggcatccccgagtgcggaacagatgccctcaggtttgggctgtgtgcctacatgtcgcaggggcgggatattaatctggacgtgaaccgcatcctagggtatcgacacttttgcaacaagttgtggaatgctaccaaatttgctctcagagggttaggcaaggggtttgtgccttag

SEQ ID NO: 211135 - DNA, 288 bp, synthetic construct
  misc_feature 1..288: note = Description of Artificial Sequence: Synthetic coding sequence
  source 1..288: mol_type = other DNA
tgacccgccggcctgggcggccccggcggcagccgggccgccgtgctggtccagcagtgggtgtcttatgcagacacagagctcattccagctgcctgtggagccactctgcccgctctggggcttcgttcgagcgcccaggatcctcaggctgttctcggagccttagggcgagctctttcacctctagaagaatggctacggctgcacacctatcttgccggggaggctcctacgcttgctgaccttgctgccgtaaccgccctgctcctcccgttcaggtattag

SEQ ID NO: 211136 - DNA, 3795 bp, synthetic construct
  misc_feature 1..3795: note = Description of Artificial Sequence: Synthetic coding sequence
  source 1..3795: mol_type = other DNA
atgagcaccctgtacgtgagcccccaccccgacgccttccccagcttaagggcgctgatcgcggcccggtacggggaggcgggcgaagggcctggatggggcggtgcccaccctcgaatttgtctacagccaccccccacctcccggacccctttcccccctccccggctgcccgctcttgagcaaggccctggaggtctctgggtatggggggcaacagctgtcgcccagttactgtggcccgcagggctgggcgggccgggtggctcacgggctgctgtcttagtacaacagtgggttagctatgccgataccgagttgattcccgctgcatgtggtgccacattaccagcactggggctcaggagcagcgcgcaggaccctcaggcggtgctgggggccttgggccgcgccctatcacccctggaggagtggctgcgcttacatacttatctggctggggaagccccaactctggcggacttggctgccgttactgctttactcctgcccttcagatacgtgttggaccctcccgctcgtaggatctggaataatgttacaagatggttcgttacatgtgttaggcagccagaattccgtgcagtgctgggggaagtggtgctatactcaggggctcgaccactctctcaccagcctggccctgaagcccctgccctgcccaagaccgccgcgcagctcaaaaaggaagcaaaaaaaagagagaagctggaaaagttccagcagaaacagaaaatccagcagcaacaaccccctcctggcgagaaaaaacccaaacccgagaaacgggagaagcgcgaccccggcgtcattacatatgacctcccaacaccacctggggaaaaaaaagacgtgagtgggccgatgcctgatagttacagtccgcgttacgttgaagccgcatggtatccatggtgggagcagcaagggttcttcaagcccgagtacggaagacccaatgttagcgccgccaacccgcgtggggtgttcatgatgtgcataccacctcctaacgtcaccgggtctctacatctgggacatgcattaaccaatgcaatccaggatagccttaccagatggcacaggatgaggggggaaaccacattgtggaatcccggatgtgaccacgctggcatcgccacacaggtggttgtggaaaagaagctctggcgggagcagggactgtctagacaccagctagggagggaagcttttctccaggaggtgtggaagtggaaggaagagaagggggaccggatatatcatcagctgaagaagctcggtagctcattggactgggaccgggcctgctttactatggatcccaagttgtcggcggcagtaactgaagcttttgttaggctccacgaggaagggatcatctataggtcaacacggttggtgaattggtcctgcacattgaacagcgccatttcagacatcgaagtggataagaaggaactgaccggacgcacacttcttagcgtgccaggatataaagagaaagtggaatttggagttctcgtgtcctttgcgtataaggtgcagggctcagacagtgacgaagaggtggttgttgccactacgcgcatagagaccatgctgggcgatgttgctgtcgctgtgcacccaaaggacaccaggtaccagcacttaaaaggtaaaaatgtgattcatcccttcctgtccagatccctgccaattgtgttcgatgagtttgttgatatggacttcgggaccggggccgtcaaaatcacaccagcccacgatcaaaatgactacgaagtaggtcagaggcacggcttggaagcgatttcaattatggacagccgtggggccctgattaatgtgccccccccatttctcggactccccaggttcgaagccagaaaagctgtgcttgtagcgctcaaggagagggggctcttcagagggattgaggacaatccaatggttgttccactctgcaaccggtctaaggacgttgttgagccgctactgagaccccagtggtacgtaaggtgcggggagatggcccaggcggcatctgcggctgtaacccgaggggatctcagaatcctgcccgaggctcaccagcggacatggcacgcttggatggacaacataagggagtggtgtatatcccgacaactctggtggggccaccggatcccggcttactttgtgactgtgtcggaccccgcagtcccccctggcgaggatccagatggaagatactgggtgtctggcaggaatgaagctgaggcacgagagaaggctgccaaggagtttggggtctcgcccgacaaaatatctcttcagcaagacgaagatgtcctggacacatggttttcaagcgggttgtttcccctctctattctggggtggcccaatcaaagcgaggacttaagcgtgttctatccagggaccttactggagactggccatgatatcctgtttttttgggtggcgagaatggtgatgttggggctgaaactgacaggtcggctcccatttagagaggtttacctgcacgccatagttagagacgcccatggacgcaagatgtcgaaaagcctgggaaacgtcatcgatcctctggacgtaatatatgggattagcctgcagggcctgcacaaccaactgctgaattccaacctcgacccctccgaagttgaaaaggctaaagagggccagaaggccgattttcctgctggcatacccgagtgtgggaccgatgccctaaggttcggcctctgcgcctacatgtcccaggggcgggatatcaatctggatgtgaacaggatactgggatatagacatttttgcaataaattgtggaatgcaaccaagtttgccttgaggggtctcggaaaggggtttgtgcctagcccaacaagccaacccggggggcatgaaagtcttgtagaccggtggatccgcagcagattaacagaagccgtgcgcttaagcaatcagggattccaggcatatgacttcccggccgtgaccaccgcccagtatagcttttggttatatgaactttgtgatgtttacttggaatgcttgaaacctgttctgaacggagttgatcaggttgccgccgaatgcgcacgacagacgctgtatacctgcctggacgtcgggttaagactgctgtctcctttcatgccgtttgtgacagaggagttgtttcagcggctgcctcgcagaatgcctcaggctcccccgagcctgtgcgtgacaccttaccccgagccttctgagtgttcctggaaagaccctgaggctgaggctgccctggagctagccttgtctattactagggcggtccgcagcctgagagctgattataatctgaccagaatacgtccggattgcttcctagaggtcgcagacgaagctactggcgcactggcttccgccgtgtcgggttatgtgcaggctctggcctccgctggggtggtggccgtgctggccttaggcgctcccgcgccgcagggttgcgccgtagctctggccagcgaccggtgcagcattcatctgcaactccagggactcgtcgacccagccagagagctcggcaagctgcaggcaaaacgggtggaggcacaacgacaggcacagagactgcgtgagcgacgcgctgcctctggctacccagttaaagttcctctcgaagtacaggaagctgatgaagccaaacttcaacagacagaggccgaactgagaaaagtggatgaagccattgccctgttccaaaaaatgctgtag

SEQ ID NO: 211137 - DNA, 2031 bp, synthetic construct
  misc_feature 1..2031: note = Description of Artificial Sequence: Synthetic coding sequence
  source 1..2031: mol_type = other DNA
atgagcaccctgtacgtgagcccccaccccgacgccttccccagcttgcgtgctctgatcgcggccaggtatggggaggccggggagggaccgggctggggcggagctcacccgcgcatttgcagactgcctcgttttgaagctaggaaagcagtgctcgtggctctgaaagaacgcggactgttcaggggaatagaagataaccccatggtggtcccactgtgcaatagatctaaagacgttgtagagcccttgctgagacctcaatggtatgtgaggtgcggggagatggcgcaggcggcaagcgccgccgttacaaggggggaccttaggatactacctgaagcgcatcagagaacttggcacgcttggatggataacatccgcgagtggtgtatttctcgccaactctggtgggggcatcggattcccgcatactttgtgaccgtcagcgacccagcagttcctcccggtgaggaccctgacgggagatactgggtgagcgggagaaatgaagcggaggccagagagaaagctgccaaggaattcggggtctcccccgataagatcagtctgcagcaagatgaggatgtgctcgatacatggttctcttccggccttttccccctgtccattctcggctggccgaaccaatctgaagacctaagtgtgttctatcccggtactttgttggagacagggcatgatatattgttcttttgggttgcccgaatggtcatgctgggactgaagctgaccggccggctccctttccgagaagtatatctgcacgctatcgtccgagacgcacacggcaggaaaatgagtaagtctcttggcaacgttatcgaccccctggatgtaatctacggcatttcccttcagggactccacaatcagctcctcaactccaatctggacccaagcgaagtcgaaaaggccaaggaaggtcagaaagccgatttccctgccgggattcccgaatgcgggactgatgcactgcggtttgggctctgcgcgtacatgagtcagggcagagacatcaacctcgacgtgaacagaatcctaggctacagacacttttgtaataaactgtggaacgctaccaaatttgctctgcggggattggggaagggattcgtcccctccccaacaagccagccaggcgggcatgagagcctagtggacagatggatcagaagtagactgaccgaagccgtcagactgtctaaccaaggatttcaggcctatgactttccagctgtcaccacagcccagtactccttttggttgtatgagctctgcgatgtgtatctggaatgcctgaagccagtgcttaatggagttgaccaggtagctgccgaatgtgcacgccaaactctgtacacctgtctggacgtcggcctccggctcctcagcccattcatgcccttcgtgacagaggagctgttccagcggctgccaaggcggatgccccaagcgcctccctctttgtgtgtgacaccataccccgagccctcagagtgctcatggaaggaccccgaggctgaagccgctctggagttggctttgtccattacgcgggctgtgcgctcactgagagctgactacaacttgacacgaatccgcccagactgttttctggaagttgcagacgaggccacgggagctctggcttccgccgtcagcggctatgtgcaggcactggctagcgccggagtcgtcgctgtgctcgcgttaggggccccagccccccagggatgcgccgttgctttggcaagcgaccggtgctcgatccacctacagctgcagggcctcgtggaccccgctcgggagttaggcaagcttcaggcaaagcgagtggaggctcagagacaggctcagcgtctacgggagcgacgcgcagcaagcgggtaccctgtgaaggtcccactggaagtccaggaggccgacgaggctaaactccagcagaccgaggcggagttaagaaaggtagacgaagccatcgccctatttcagaagatgctctag

SEQ ID NO: 211138 - DNA, 2031 bp, synthetic construct
  misc_feature 1..2031: note = Description of Artificial Sequence: Synthetic coding sequence
  source 1..2031: mol_type = other DNA
atgagcaccctgtacgtgagcccccaccccgacgccttccccagccttagagccttaattgcagcccggtatggcgaggctggagagggacccgggtgggggggggcccatcctcgcatctgtaggctgccgaggttcgaggcacgaaaagctgtgctggtggctctgaaagagcgcgggctgttccggggaattgaggataaccctatggtggtgccattgtgtaacaggagcaaagacgttgtcgaacccctcttacggccacagtggtatgtccggtgtggagagatggcccaggccgccagcgccgctgtgacacgaggtgacctacgcatcctccccgaggcacaccaacggacatggcatgcatggatggacaatatcagagagtggtgcatttcacgccaactctggtggggtcaccgcatcccagcctacttcgtaaccgtcagcgatcccgcagtgccccccggcgaagaccccgacggacgttactgggtgtccgggagaaatgaagcggaagctagagaaaaggcagctaaggaatttggggtgtcccctgacaagattagcttgcaacaggatgaagacgtgctagacacttggttcagttccggactgtttccattgtcaattcttggctggccaaaccaaagcgaagatctgagcgtgttctacccaggaacgctgctcgagactggtcacgatattctgtttttctgggttgctagaatggtgatgctcgggctgaagttaacaggcaggctgccatttcgcgaggtctacctccacgctatcgtgcgagatgcccatgggcgtaaaatgtccaaatccctggggaacgtgattgatcctcttgatgtgatttacgggatcagcctgcagggtctgcataaccagctcttgaactctaatttggacccttccgaagtagagaaagcaaaagaaggacagaaggccgacttccctgctggtatccccgaatgtgggacagacgcgcttaggtttgggttatgcgcctacatgagtcagggccgtgatatcaatctggatgtgaaccgaatcctcggctatcggcacttctgcaacaaactttggaatgctacgaagttcgctctgcgcggccttggtaaaggattcgtcccttcccctacatcgcagcccggtggacatgaatctctggtggataggtggatacgcagcaggctgaccgaggcagttcgtctgagtaaccagggatttcaggcctacgatttcccggcagtcaccacggcccaatattcgttctggttgtatgaactgtgcgatgtctacttagagtgcctcaagcctgtgcttaatggcgtcgatcaggtcgccgctgaatgtgctcggcagactctgtatacttgcctggacgtgggtcttcgcctactgagtccatttatgcccttcgtgactgaggagctgtttcagagactcccacggcgtatgccccaggccccgccctccttatgtgtgaccccctatcctgaaccttctgaatgcagctggaaggaccccgaagcagaggccgctttggaactggccctttcgatcacacgcgccgtccgcagcctgcgggccgactacaacctgactcgcattagacctgactgctttctcgaagtggcggatgaagcaaccggcgccttagcctcagctgtgagtgggtacgtgcaggccttggcaagcgccggagtggtcgccgttctggccctgggagctcccgcgcctcagggttgtgccgtggccctggcaagcgaccgatgcagcatacacctgcagctccagggtctggttgatccagctagggaactggggaaactccaggcaaagcgtgtcgaagcacagcggcaagcgcaaaggcttagagagcgaagggccgccagtgggtacccagtaaaagtgccacttgaagtgcaggaagcagacgaagcaaagctccagcaaactgaggcagagctcagaaaagtagacgaagcgatcgccctgttccagaagatgttatag

SEQ ID NO: 211139 - DNA, 894 bp, synthetic construct
  misc_feature 1..894: note = Description of Artificial Sequence: Synthetic coding sequence
  source 1..894: mol_type = other DNA
atgcccgacagctacagcccccggtacgtggaggccgcctggtacccttggtgggaacagcagggtttctttaagccagagtatggccgtcccaacgtaagtgccgctaaccctagaggtgtgtttatgatgtgtattccacctccaaacgtgactggatcactccatctaggccacgctctcacaaatgctattcaggacagcttgacaaggtggcacagaatgcgcggcgagactacgctttggaacccaggatgcgaccatgccggcatagccactcaagttgttgtggaaaagaaactgtggagggagcagggcctgtctagacatcagcttggacgcgaagccttcttgcaagaagtgtggaaatggaaagaagagaaaggcgacaggatctatcaccaactgaagaagctggggagctctttagactgggacagagcttgctttacaatggatcccaagctatcagctgcagtcactgaggcctttgtccgcctgcatgaggaggggatcatctacagatcaacacggctggtcaattggtcctgcacactaaactccgctatctctgatattgaagtcgacaaaaaagagctgaccggccgtaccctgctctccgtgcctggttataaagagaaggtggaatttggagtgctcgtatcttttgcttataaggtgcagggcagtgactccgacgaagaagttgtggtggctacgacacgcatcgaaacaatgcttggcgatgttgctgtcgccgtgcatccaaaggacacccgttatcagcatctcaaaggcaagaacgtgatccacccttttctttctaggtcactgccgattgtctttgatgaattcgtcgatatggacttcggaacgggtcctgcccaggtctag

SEQ ID NO: 211140 - DNA, 894 bp, synthetic construct
  misc_feature 1..894: note = Description of Artificial Sequence: Synthetic coding sequence
  source 1..894: mol_type = other DNA
atgcccgacagctacagcccccggtacgtggaggccgcctggtacccctggtgggagcagcagggattcttcaaacctgagtacggccgccctaacgtgtcagccgccaaccctcggggcgtctttatgatgtgcatcccgccgcccaacgtcacaggttcattacacctggggcacgccctgacaaatgccatccaagactcactcaccagatggcatcgcatgcgcggagaaacaactttgtggaacccgggttgcgaccatgcaggaatagccactcaggtcgtggtcgagaagaaactgtggcgggaacagggtcttagccgccaccagttaggccgagaagcatttctccaggaagtatggaagtggaaggaagagaagggcgatcggatctaccaccaacttaagaagctggggagcagcctggactgggatcgagcctgcttcactatggatccgaagctctctgccgccgtcacagaggcctttgtccgtctgcatgaagaaggaatcatttatagaagcacacgactagtcaactggtcatgtacccttaacagcgctatttctgacattgaggtggacaaaaaagaattaaccggccgcaccttgctctctgttcctgggtataaagagaaggtggagtttggcgtactggtgtcattcgcatataaggtccagggttcagattctgacgaggaggtggtcgtggcaaccacccgtatcgagactatgttgggcgacgttgccgttgctgtgcacccaaaggatactcgttatcaacatttaaaaggaaaaaatgtaattcacccattcctgtctagatctctgcccattgtattcgatgagttcgtggacatggattttggaacaggaccagctcaggtttag

SEQ ID NO: 211141 - DNA, 894 bp, synthetic construct
  misc_feature 1..894: note = Description of Artificial Sequence: Synthetic coding sequence
  source 1..894: mol_type = other DNA
atgcccgacagctacagcccccggtacgtggaggccgcctggtacccatggtgggagcaacaggggttctttaaacctgaatatggcagacctaatgtgtccgcagccaacccacgaggggtgttcatgatgtgtatccccccccccaacgtgaccggatccttacaccttggacacgctctgacaaacgcaatccaggactctctcaccagatggcatcggatgcggggcgagacgacattgtggaatccagggtgcgaccatgccggaattgcaactcaggttgtggttgagaaaaaattgtggcgggaacaggggctgagtcgacatcaactcgggcgcgaggcctttctccaagaggtgtggaaatggaaggaagagaaaggggacaggatttatcatcagctcaagaagttgggtagcagccttgattgggaccgggcttgttttactatggatcccaagctcagtgccgccgtgactgaagctttcgtgcggctgcacgaagaaggcatcatctatcgttcaactcggttggttaattggtcttgcacactaaattctgcgatttccgacattgaagtggataagaaggaattgacaggtagaacactgttaagtgttcccgggtataaagagaaagttgaattcggggtcctggttagcttcgcgtataaggttcaggggtccgacagcgacgaggaagtggtagtggcgacgacccgaattgagactatgctcggggatgtggccgtagccgtacaccccaaggatactcgataccagcacctgaaaggcaaaaatgtcattcatccctttctctcccgaagcctgcctatcgtattcgatgaattcgtcgacatggactttgggacaggacctgcccaggtgtag

SEQ ID NO: 211142 - DNA, 2031 bp, synthetic construct
  misc_feature 1..2031: note = Description of Artificial Sequence: Synthetic coding sequence
  source 1..2031: mol_type = other DNA
atgagcaccctgtacgtgagcccccaccccgacgccttccccagcctccgtgctctcatcgctgctcgttacggcgaagcgggggaggggcccggctggggtggcgcccacccgagaatatgtcgcctgcccaggtttgaggccagaaaagccgtgctggtcgccctgaaagagaggggtctctttcggggcatcgaggataatccaatggtcgttcctttgtgcaaccgatctaaagacgttgtcgagccattactgcggcctcagtggtacgtccgttgcggggaaatggcccaggccgcatctgcagccgtcacccgaggtgacttgagaatattgcccgaagctcaccagaggacctggcacgcctggatggataatatccgtgaatggtgtattagtcgacagctgtggtggggccacagaattccagcctatttcgtgaccgtttccgatccggcggtccctcccggggaggatccagatgggcgctattgggttagtggccggaatgaggccgaggctcgtgaaaaggccgcaaaagagtttggcgtgagtccagacaaaattagcttgcagcaggatgaggacgtgctcgacacgtggttctctagtggtctgtttcccctttcaatcctgggctggccaaaccaaagcgaggatctgtctgtgttctaccctggcactcttctggagaccggtcacgacatactgtttttttgggttgcccgaatggtcatgctgggcctgaagctgaccggccgacttccattccgagaggtgtacttgcatgctattgtcagagatgcccatggccggaaaatgtccaaaagcctcggcaatgtcatcgaccctcttgatgtgatttatggcatcagcctccagggcttgcacaaccagctgctcaacagtaacctggatcctagtgaggtcgaaaaagctaaggaaggacagaaggctgacttccccgccggcatccctgagtgcggaacagacgctctgcggtttgggttatgcgcctatatgtcccagggtcgagacattaatctagacgtgaaccggattctgggatacaggcatttttgcaacaagttatggaacgcaacaaagtttgctttacgaggattgggtaaaggctttgtgcccagccctaccagccagcctggcgggcatgaaagcctggtcgatcgttggatccggtcaagactcactgaggccgtgagactgtccaatcagggattccaggcatatgattttccggctgtaacaaccgcgcagtacagcttttggttgtatgaactgtgtgatgtctatctggagtgcctcaagccagtactcaacggggtggaccaggttgccgctgagtgcgcacgacagacactttatacatgtctcgacgtcggtttgcggctgctgtctccgtttatgccctttgttacagaagagctgtttcagcgcctccctcgaagaatgccgcaagcccctccgagtctgtgcgtgaccccttatcccgaacctagcgagtgcagctggaaggatcctgaggctgaagcagcgctggaactggccctgagtattactagggctgtacgctcactgcgcgctgactataatctgacacggatccggccagattgcttcctcgaagtcgctgatgaggccactggggcgctcgctagcgctgtttcaggctacgtgcaggccctcgccagtgcaggtgtggttgctgtgctcgcacttggcgcaccagccccccaagggtgcgccgtcgcactggcaagcgaccggtgctctatccatctgcagttgcagggactcgtagacccagctcgcgaattaggaaaactgcaggcaaaacgcgtggaagcccagcgccaggcccagcgtctcagggaacggcgcgccgcgagcggatatcctgtgaaagtgccgctggaggtccaagaagcggacgaggccaagctacagcagaccgaagctgagcttcgcaaggtggatgaagcaatagcactgttccagaagatgttatag

SEQ ID NO: 211143 - DNA, 2031 bp, synthetic construct
  misc_feature 1..2031: note = Description of Artificial Sequence: Synthetic coding sequence
  source 1..2031: mol_type = other DNA
atgagcaccctgtacgtgagcccccaccccgacgccttccccagcctgcgggccctgatcgctgctaggtatggagaggctggtgaggggcctggctggggtggagcccacccccggatttgcagactgccccggttcgaagcacgcaaagccgttctcgtcgcattgaaagagaggggtttattccgaggcatcgaggataatccaatggtggtacctctctgcaatcgatctaaggatgtggtcgaaccactgctccggccacagtggtatgtgaggtgcggagaaatggctcaagccgcgagcgccgctgtcacaagaggcgacttaagaatacttccagaagcccatcagaggacatggcacgcctggatggacaacattcgtgagtggtgcatctctcgccagctttggtggggccataggatcccagcctacttcgtaaccgtgtccgaccctgcagtgccacccggggaggatcctgatggacgctattgggtgtccggaaggaacgaggcggaagcaagagagaaggctgccaaggagttcggcgtgtctcctgacaagatcagcttacagcaagatgaggacgtgctcgatacctggttctccagcggcctgttccccctgtcaattctagggtggcctaaccagagcgaggacctgtcagtcttttaccccgggacactgcttgagaccggacacgatattctgtttttttgggttgcccgtatggtcatgctaggcctgaaactgaccggtcggctgccgttccgggaagtgtacttacacgctatagtcagagatgcccacggccgcaagatgtcgaaatctctgggaaatgtcatagaccccttggatgtcatttatgggatctcccttcagggactacacaaccagcttctgaattccaacctcgacccctcagaagttgaaaaagccaaagaggggcaaaaggccgacttccctgccggaatccctgagtgcggaaccgatgccctgcgcttcggcctttgcgcctacatgtctcagggtagggacataaacctggatgtgaatagaatcctcggatacagacatttctgtaacaagttgtggaatgccactaagttcgctctccgcgggctggggaaaggtttcgtgccttcaccaacatcacagccaggaggtcatgagtcactggttgacaggtggatccgttctaggctcacagaggccgttagattaagcaatcagggttttcaagcttacgactttcctgcagttacaaccgcccagtactccttctggctctatgaactgtgcgacgtctacctggaatgtttaaagcctgtcctgaacggtgtggatcaggttgccgccgaatgcgcaaggcagaccctatacacatgtttagatgttggcctgagattactgtcaccctttatgcccttcgtgacagaggagctgttccagcggcttcctcgtcgtatgccacaagcaccgccttcactgtgtgtgacgccatacccagagccttctgagtgctcatggaaggaccctgaggctgaagctgccttggagttggccctgagtatcacccgggctgtgcgttctctgcgtgccgactacaacctaacacgaattcggcctgattgcttcctggaagtcgccgatgaggcgactggtgccctggcttcagcagtttccggttacgttcaggccctggctagtgcaggtgtggtggccgtgttagccctaggcgctcctgccccacagggatgcgctgttgcgcttgcttcagacaggtgctcaattcacctccagctgcaagggctcgtggaccctgcgcgcgaactggggaaactgcaggccaaaagagtcgaagctcagagacaggctcagagactgcgcgagcgaagggctgcctcaggatacccagtgaaggttcctctggaagtgcaggaggctgacgaggctaaactccagcagacagaggcggagctccggaaagtagacgaagccatcgcactcttccagaaaatgctatag

SEQ ID NO: 211144 - DNA, 894 bp, synthetic construct
  misc_feature 1..894: note = Description of Artificial Sequence: Synthetic coding sequence
  source 1..894: mol_type = other DNA
atgcccgacagctacagcccccggtacgtggaggccgcctggtacccttggtgggaacagcagggattctttaagcccgagtacggcaggcccaacgttagcgccgcaaaccccaggggagtctttatgatgtgtatcccgccccccaatgtgaccgggtccctgcacttgggccacgccctgacaaacgccatccaggattctctcacccgttggcatcgaatgaggggagaaacaacgttgtggaaccccgggtgtgatcacgctggaattgccactcaggtcgtggtggaaaaaaaactctggagggaacagggtctgtcaaggcatcagctgggtcgcgaagccttcctgcaggaggtatggaagtggaaggaagagaaaggggaccgtatctaccaccagcttaagaaattaggctcatccctcgattgggaccgagcttgcttcaccatggatcctaaactgagtgcggcggttaccgaagcctttgtcagactgcacgaagaaggcattatctacagatccactaggcttgtgaactggtcatgtactcttaacagcgccatctcagatatcgaggtggataaaaaagagctgacaggccgaaccctgttaagcgtcccgggctataaagagaaggtggagtttggagtgctcgtatccttcgcctataaagtacagggatctgactcagacgaggaagtggtcgtagccacaacacggatcgaaacaatgttgggggacgtggcagtggcggtgcatcctaaagacacccgctatcagcacctgaagggtaagaacgtaattcacccattcctaagcaggagcttaccgatcgtgtttgatgagtttgtggatatggatttcgggaccggccccgcccaggtttag

SEQ ID NO: 211145 - DNA, 3192 bp, synthetic construct
  misc_feature 1..3192: note = Description of Artificial Sequence: Synthetic coding sequence
  source 1..3192: mol_type = other DNA
atgccccacctgcccctggccagcttccggccccccttctggggcctacgccactctcgcgggcttccacgatttcatagtgtgtcaacacagagcgaacctcacggaagtcctatcagtagaaggaaccgtgaggctaaacagaagagactgagggaaaagcaagctaccttggaagctgagatcgccggcgagtctaaatctcccgctgaaagcatcaaggcctggcgccccaaggagcttgtgttatacgaaattccgacgaaaccaggagagaaaaaggatgtcagcggccctttacccccagcgtattcccctcgctatgttgaagcagcctggtatccatggtgggttcgagaagggttcttcaagcctgagtaccaggccaggctacctcaggcaacaggggagaccttctccatgtgcatcccacctcccaatgtaacaggcagtctgcacattggccacgcacttaccgtcgccatccaggatgccctggtgcgatggcaccgaatgcgtggggatcaggtactctgggtacccggtagcgaccacgctgggatcgccacacaggctgtggtagagaagcaactgtggaaggaacggggcgtgagaaggcatgagctgagcagggaggcttttcttagagaggtctggcagtggaaggaggccaaggggggggagatttgcgagcagctgcgcgccctaggagccagtctcgattgggatagagagtgttttaccatggacgttggatccagcgtcgcggttacagaagccttcgtgcgcttgtataaggccggtttattatatcggaatcaccagcttgtgaactggtcatgtgccctgcgctctgctatctccgacatcgaggtggaaaacaggccgctgccaggccatacccagcttagacttcctgggtgcccaacacctgtgtccttcgggctcctgttttccgtggcatttcctgtggatggagaacccgacgctgaagtagtcgtgggtactacacggccagaaaccttgccgggcgacgtggcagtcgccgtccacccggacgactcgcgatacacccacctccatggacggcaactgcggcatcccctgatgggccagcctctgcctctgatcacagactatgctgtacagccccacgtgggcaccggtgccgtgaaggtcacccctgcacatagcccagccgatgcggagatgggtgctcggcacggtttgtcacctctcaacgtgattgcagaggacgggactatgactagcctgtgcggcgactggctgcaggggctgcatcgtttcgtcgcccgagaaaagatcatgtcagtgcttagtgaatggggtctgttcagaggacttcagaatcatcctatggtactgcccatctgtagtcgcagtggagatgttattgaatatcttttaaagaatcagtggttcgtccgctgccaggaaatgggtgctagggccgctaaggcggtagaaagcggggctcttgagctgagtccaagcttccaccagaagaactggcagcattggttctctcacattggggactggtgcgtgtctcgccagctgtggtggggacaccaaattccagcctaccttgtggtcgaagatcacgcccagggcgaagaggattgctgggtcgttgggagatccgaggcagaggcccgcgaagtggctgcagaactcacagggaggcccggcgcggagttgaccctggaaagagatcccgacgtcctcgatacctggttctcatcagccctgtttcctttctctgcactgggctggcctcaagaaactcccgaccttgccagattttatccgctgagcttgctcgagaccggctctgatctcctgctcttctgggttggaaggatggtgatgctgggaacgcaattgactgggcaattaccattttcaaaggtgttgctgcaccctatggtgcgggaccggcagggacggaaaatgtcaaagtcattggggaacgtcctggatccccgtgatataatcagcggtgtggaaatgcaggtgttgcaagagaaattgcggtcagggaatcttgatcctgctgaactggccatcgttgccgcagcccagaaaaaggattttccccacggcatcccagagtgcgggaccgacgccctccggtttactctgtgctctcacggagtgcaggcaggcgaccttcacctgagcgtgtctgaggttcagtcctgccgacatttctgtaataagatttggaacgctctgcgctttattctgaatgctctaggagagaagttcgtaccccagccagccgaggaacttagcccaagctcccctatggatgcttggattctgtctcggctcgccctggctgctcaggagtgtgagaggggcttcctgactagggaattatctcttgtcacacatgctctgcatcacttttggctccataacttgtgtgacgtctatctggaagccgtgaagcccgtgctgtggcattccccacgccctcttggaccccctcaagtcctgttctcttgcgccgatcttgggctgcgactactagcacctttaatgccatttcttgccgaagaattatggcaaaggctgcctccccgcccgggctgtccacctgcccccagtatctccgtggcaccttatcccagcgcatgctccctagagcactggagacagccagaactcgagcggcgttttagccgggtgcaggaagtggtacaggtacttcgcgcactacgagctacctatcagctgactaaggcacggccacgcgtactgctccaatccagtgaacccggtgatcagggattattcgaagcttttcttgagcctctggggaccctggggtactgcggagccgtgggcctgctacctccgggcgcagctgcacctagcggatgggctcaggctcctttaagcgacacagcccaagtgtacatggagctacaaggcctggtggatccacagattcagctgcctctacttgcagccagacgctataagctccagaagcagctggacagtctgacagcccggaccccaagcgagggagaagcagggacccagcggcagcagaagctgagctccctgcaacttgagctgtcaaagttggacaaagccgcctcccatctgagacaactcatggatgagccccctgccccgggatcccccgagctctag

SEQ ID NO: 211146 - DNA, 774 bp, synthetic construct
  misc_feature 1..774: note = Description of Artificial Sequence: Synthetic coding sequence
  source 1..774: mol_type = other DNA
atgccccacctgcccctggccagcttccggccccccttctggggcctgaggcactccaggggactgccaaggtttcattcagttagcacacagtctgagccccatggcagccccatctctcgcagaaacagggaggcaaaacagaaaaggctgcgggaaaaacaggcaacactcgaggccgagatcgctggggaatccaaatctcctgccgagtcgattaaggcctggcgacccaaggaacttgtcctctatgaaatcccaactaaacctggcgaaaagaaagacgtgtcaggcccactgccgcccgcctattccccacgctatgtggaagcagcttggtacccttggtgggtgagagaggggttttttaaacctgagtaccaggccagacttcctcaagcaactggcgaaactttcagcatgtgcatccccccacctaacgtgacagggagtttacatattggccacgcgctgaccgtagcaatacaggacgctctggtgcgttggcacagaatgcgcggcgaccaggtgctctgggtccccggttcagatcatgctggaatcgcgacgcaggctgttgtggaaaaacagttgtggaaagagcggggcgtgagaaggcacgagcttagccgagaagccttcctgagggaggtctggcagtggaaagaggccaagggcggggagatttgtgaacaactgcgcgctcttggagcaagtctggactgggaccgggtgttttaccacggttgctggttgctcagcggttgtgattag

SEQ ID NO: 211147 - DNA, 3192 bp, synthetic construct
  misc_feature 1..3192: note = Description of Artificial Sequence: Synthetic coding sequence
  source 1..3192: mol_type = other DNA
atgccccacctgcccctggccagcttccggccccccttctggggccttaggcactccagagggttgccgcgtttccacagcgtgtccactcagtctgagcctcatggtagcccaattagtcgccggaatcgagaggctaaacaaaaaagactgcgagagaaacaggccacccttgaggccgaaattgctggcgaatccaagagccccgcagagtccatcaaagcgtggcgtccaaaggagctggttctatacgaaatccctactaaaccaggtgagaaaaaggacgtgtcgggtccccttccacccgcttatagtccaaggtatgtagaagcagcttggtatccatggtgggtcagagagggtttcttcaaaccagagtaccaggcgcgtctgcctcaggccacgggcgagaccttcagcatgtgcatcccaccacccaatgtgacgggatcactgcacatcgggcacgcccttaccgtggctatccaggatgcattagtccgctggcataggatgcgaggcgaccaggtgctctgggtgccaggctctgatcatgccggcattgcaacccaagccgtcgtggagaagcagctgtggaaagagaggggagtcaggcgacacgagctgagtcgggaggcttttcttagagaggtgtggcagtggaaggaggccaagggcggtgagatctgcgagcagcttcgcgccctgggggcttccctagattgggaccgtgaatgtttcaccatggacgtgggctcctccgtggctgttacagaggcattcgttcggctatacaaggccggcttgttgtacaggaatcaccagctggtcaattggagttgcgctcttagaagtgccatctcagatatcgaggtggagaaccgcccattgcctggccacactcagctccgccttcccggatgtcctactcccgtgtcgtttggcctcctgttctcagtggcatttccagttgacggcgaacccgacgcagaagtcgtcgttggcaccactaggccagagacacttcctggcgacgttgccgtggccgttcaccccgatgactccagatacacgcatctacacgggcggcagttgagacacccactgatggggcaacctctccccctcattacagattatgctgtgcagccgcacgtcggtaccggagcagtgaaggtgaccccagcgcatagtccagctgatgccgagatgggggcccgccatggacttagccccctaaacgtcatcgcagaagacgggaccatgaccagcctgtgcggggactggctgcagggtctgcacaggttcgtggcccgggaaaagattatgtccgttctttcggaatggggactctttcggggtctgcagaaccatcccatggtactccccatctgctctcgctcaggagacgtgatagaatacctcctgaaaaaccagtggttcgtgcgttgccaggaaatgggcgccagggccgccaaggcagtcgaatcaggtgccttagaattgtcaccttcatttcatcagaaaaactggcagcactggtttagtcacatcggggattggtgcgtgagtcgccaactctggtggggacaccaaatcccagcttatctggtagtagaggatcatgctcagggcgaggaggattgttgggtggtgggccggtctgaggccgaggctcgggaagtggccgccgaattaacgggccggcccggggccgagctcactcttgagcgtgaccccgatgttctcgacacctggttttcctctgcgctatttccattttctgcactcgggtggccacaggagactccagacctggccaggttttaccccctgtcactgctggagacaggttccgacctcttattattttgggtgggccgcatggtgatgctaggtactcaactgacgggacagctccctttctccaaagtgttattgcatcccatggtgagggatcgccagggccgaaagatgagtaaaagcctgggaaacgttctcgatccaagagatatcatctccggagtagaaatgcaagtgctacaggagaaactgaggtccgggaatcttgatccggctgagctggcaatcgttgccgccgcccagaaaaaggatttccctcatggcatcccagaatgtggtactgatgcactcaggttcacgctatgctcccacggagttcaagctggggatttgcatctttcagttagcgaagtccaatcttgtcggcatttttgtaacaaaatttggaacgctttacgattcattctgaatgcactcggagagaagtttgtgccacagccagctgaggaactctctccatcttccccgatggacgcctggatactgagtcggctggctctagccgcccaggagtgcgaacgcggattcctgacacgggagctctcactggttactcatgccctacaccacttttggctgcataatctttgcgacgtctaccttgaggctgtgaagcctgtcttatggcactctcctagacccctcggacctccccaagtcctattctcatgcgcggaccttggcctacgcctgctggctccgctgatgccatttctggccgaagagttgtggcagcgtctccccccaagaccagggtgtcctccagccccatcaatcagcgtggcgccttacccttcagcttgcagtcttgaacactggagacagccggagttggaacgccgcttctccagagttcaggaggttgtgcaggtgctgcgagccttgcgcgccacataccaacttacaaaggcccgcccgcgcgtattgcttcaatcaagcgagcccggcgaccaagggctctttgaagcgtttctggaacccttgggaacactaggttactgcggggcagtaggacttcttccccctggagctgcagcacctagtgggtgggcacaggcacccctgtctgacacagcccaggtttacatggaactgcaaggcttagtggaccctcagatccagctgcctttgctggctgccaggcggtacaagctacagaaacagctggacagccttaccgcgcgtactcccagtgagggagaggccgggacacagaggcaacagaagctttcttcacttcagctggaactttccaaactggataaggccgcctcgcaccttcggcagctgatggacgaaccgcctgccccaggaagtcccgagctgtag

SEQ ID NO: 211148 - DNA, 348 bp, synthetic construct
  misc_feature 1..348: note = Description of Artificial Sequence: Synthetic coding sequence
  source 1..348: mol_type = other DNA
atgccccacctgcccctggccagcttccggccccccttctggggcttgaggcactcgagggggcttcccagattccactctgtcagtacccagagcgaaccccacggatcacccatcagccggaggaacagggaggctaagcagaagcggttgcgggagaagcaggccaccttggaggcggagatagcaggtgaatccaagagccccgcagaatcaatcaaggcatggaggcctaaagagctcgtgctctatgaaatccccactaagccgggcgagaagaaagacgtaagcggacccctccccccggcatattcccccaggtatgtggaagcggcctggtacccttag

SEQ ID NO: 211149 - DNA, 981 bp, synthetic construct
  misc_feature 1..981: note = Description of Artificial Sequence: Synthetic coding sequence
  source 1..981: mol_type = other DNA
atgccccacctgcccctggccagcttccggccccccttctggggccttcggcactctagaggactacctcgcttccactcagtgagtacccaatctgaaccccatggtagtcctatcagccgtagaaatcgagaagccaaacagaaacggcttcgcgagaaacaagcaactctcgaggccgagatcgccggggaatccaagagcccagcagagtcaatcaaagcttggcgacctaaagaactggtgctgtacgaaataccaactaagccaggcgagaaaaaagacgtttctggtcctctgccacccgcctattcaccccggtatgtcgaggccgcatggtacccttggtgggtccgggaaggctttttcaagcccgaatatcaggctcgtctaccccaggcaacgggtgagacattttcaatgtgcattcctcctcccaatgttacaggcagtttgcatattggccatgccctcactgtggccatacaggacgctctcgtaagatggcaccgaatgcgaggagaccaggtcctgtgggtgccgggatccgatcacgcaggcatagctacccaggccgtggtggagaagcaactgtggaaagaacgcggcgtgaggcgccacgaactcagtagagaagccttcttacgggaagtctggcagtggaaagaggccaaagggggcgagatatgcgagcagttgagggcccttggagcctccctcgattgggaccgtgagtgttttaccatggatgtgggcagttccgtggccgttacagaggcctttgtccggctgtataaggctggcctgctgtaccgaaatcatcagttagtcaactggtcctgcgccttgcgttctgctattagcgacatagaggtcgaaaaccgccccctgcctgggcacactcagttacggttgcccggctgtccgacacccgttagctttggacttctattttctgtggctttcccagtggatggatag

SEQ ID NO: 211150 - DNA, 3282 bp, synthetic construct
  misc_feature 1..3282: note = Description of Artificial Sequence: Synthetic coding sequence
  source 1..3282: mol_type = other DNA
atgggcggcaaggcctggccccggcgggccgtgggcaccgccggcggtccttgcgccgagcagatttctgccccattccaaaccctgctgatgccccatctgccgttagcttcatttaggcctccattctggggcctgagacattcccgaggcctgcctagatttcattctgtgtccacccaaagcgaaccccacggtagtcctatcagtcgcagaaatcgggaagctaaacagaagcggcttagagagaagcaggctacgcttgaggccgaaattgcaggcgagtctaagagcccagcagagtctatcaaggcctggagacccaaggaactggtcctgtacgaaatccccacaaaaccgggtgagaagaaagatgtctccggcccactgccgccagcctactctccccgctatgtagaagccgcgtggtatccatggtgggtgagggaaggcttttttaaaccagagtaccaggccaggctgcctcaggctacgggagagaccttcagtatgtgcatcccaccccccaacgtgactggttccctgcatataggacacgccctgaccgtagcgattcaggacgctctggtgcggtggcaccgcatgcggggcgaccaggtgctgtgggtccctgggtctgaccacgcaggaatagccactcaggccgtcgtggagaagcagctgtggaaagagcgcggagtccggaggcacgagctgtcccgagaggcctttcttagagaggtgtggcagtggaaggaggcgaaaggaggggagatttgcgaacaattgcgggccttgggggcaagcctggactgggaccgggagtgcttcaccatggacgttggatcaagtgtggccgtcacggaggccttcgtgcggctgtacaaagccggcctcctgtatagaaaccatcagttggtgaactggtcttgtgctctcagaagtgcaatttccgacatcgaggtcgagaatcgacccttacccggccacacacagctgagactcccgggatgccctacaccggtctcatttggactgctcttctccgttgccttccccgtggacggagagccagacgccgaggttgtagtgggaacaacaaggccagagaccctgccaggcgacgttgcagtagcagtgcaccccgatgattccagatacacacacctgcatggcagacagctgcggcatcctcttatgggccagcctctgccccttatcactgactatgccgtgcagccacacgtcgggacgggggctgtgaaagtgacccccgcgcactctccagcggatgccgaaatgggagcccggcacggactatcccccctcaatgttattgccgaagacggcacaatgacatctctttgtggggattggctccagggactgcacagatttgttgctcgggaaaagattatgtccgtcctgtccgaatggggactcttcagaggtcttcaaaatcatcctatggtactcccgatttgttcacggtccggagacgtgatagagtatctgctgaaaaatcaatggtttgttagatgtcaggaaatgggtgccagagcagccaaggctgttgaatccggtgcgctcgagcttagtccctcttttcatcagaagaattggcaacattggttctctcatatcggggattggtgtgtgtcccggcagctgtggtggggccatcagatcccagcctacctcgtcgttgaagatcatgctcagggcgaagaggactgttgggtggtgggccggtccgaggccgaggctcgcgaggttgcggcggaactgaccggtcggcccggtgccgagctgactttagagcgtgatcccgacgttctcgacacctggttttccagtgcactgtttccgttctctgcgctaggctggccccaggagacacctgatttggcaaggttttatcccctgagcctgctggaaactggcagcgacctgttattgttttgggttggccggatggtgatgctgggcacacagttaacgggtcagctgcctttctctaaggtactgcttcaccctatggttagagacagacagggccgaaaaatgagtaaaagcctgggcaatgtgctggacccgagagatatcataagcggagtcgagatgcaggtcctgcaggagaagctccgaagtggcaacctcgacccggccgaactggccatagtcgcggcagcccagaagaaagactttcctcacggaattcccgagtgtggaactgatgctcttcggttcactctctgctcccatggtgtacaggccggagatcttcatctgtccgtatcagaggtccagtcctgtcgacatttttgcaacaaaatttggaacgctctgaggttcattttgaatgcacttggcgaaaaatttgtgccccagccagcagaggaactctccccctcaagcccaatggacgcatggatcttgtcaaggcttgccctcgccgcccaagaatgtgaacgcggcttccttacaagggaacttagcttagttactcatgcacttcatcacttttggctccacaacttgtgcgatgtgtatcttgaagcggtgaagccagtgctgtggcactcgccccgcccactcggcccccctcaggtcttgttcagctgtgccgacctggggctacgcttactggccccccttatgcccttccttgccgaggagctttggcagaggctcccaccgagacccggctgccccccagccccttccattagtgtcgcaccctatccctctgcatgcagcctggagcactggcgtcagcctgaattggagcggcgatttagcagggtgcaagaggtcgtacaggtgctgagagcgcttcgtgccacgtaccagctgaccaaggcccgcccgcgggtccttctccagtcctcggagcctggggatcaaggactcttcgaagcttttctggagcccctaggaacattgggatactgtggcgccgtaggcttgctcccccctggggctgctgccccatctggatgggcacaagcccccttgagtgatactgctcaagtctatatggaactgcagggcttggtggatccacagattcagctgcctcttctggccgccaggcgatacaagctgcagaagcagctggactccctgacggctcgtacgccgtcagaaggcgaggccgggacccagaggcaacagaagctgagctcgttacaactggaactctcaaagctggacaaggcagccagccacctcagacaacttatggacgagcctccagctcctggatccccagagctttag

SEQ ID NO: 211151 - DNA, 2772 bp, synthetic construct
  misc_feature 1..2772: note = Description of Artificial Sequence: Synthetic coding sequence
  source 1..2772: mol_type = other DNA
atgtgcatccccccccccaacgtgaccggcagcctgcacatcggccacgccctcacagtggcgatacaggacgccctggtgcggtggcaccgaatgaggggagaccaagtgttatgggtgcccggcagtgatcatgccggcattgcgacgcaggcagtcgtggagaagcagttatggaaggaacggggcgttaggcgtcatgagctgagtcgcgaggcattcttaagagaggtgtggcagtggaaggaggcaaagggtggggaaatctgtgagcagctgcgggcattgggcgctagcctggactgggacagggagtgctttacaatggatgtgggaagttccgtggctgtgactgaagccttcgtgagactatacaaggcaggactgctatacagaaatcaccagctcgtcaactggagctgcgcactcaggtcagccatcagcgacattgaagtagaaaacagaccactccctgggcatacccagttgcgactgccaggctgcccaacacccgtgtctttcggtctcctcttcagtgtcgcttttcccgtggacggggagccagacgctgaggttgtggttggaaccaccaggcccgaaaccctcccgggggacgtcgccgtcgcagtccaccccgatgactctcggtatacccatttgcacggccggcaattaagacatcccttaatggggcagcctcttccgctgatcacagattatgcagtgcaaccccacgtgggaactggcgcagttaaagtgaccccagctcattctccggccgatgctgaaatgggtgcaagacacggcctcagtcccctgaacgtgatcgctgaggatggcacaatgacgagtctctgtggggattggctgcaagggttacatcggttcgtcgcgagggagaagattatgtccgttctgtctgaatggggcctgttccggggtcttcaaaaccatcctatggtcttaccaatttgcagcagaagtggtgacgtgattgagtatttgctcaagaaccaatggtttgtgcgatgccaggaaatgggggccagagctgccaaagcagtggaatccggggcattggaactctcaccatccttccatcagaaaaactggcaacattggttttcccacatcggcgattggtgtgtgagccggcagttatggtggggtcaccagatccctgcctatctggtggtggaagaccatgcgcagggcgaggaggattgttgggttgtgggaagatctgaggctgaagcccgcgaagtcgccgcggagctgactggcagacccggcgccgaactcaccctggaacgggaccccgacgtcctggatacatggttctcatctgctctgtttccgttcagcgctctgggctggcctcaggagacacctgacttagctcgtttttaccctctgagcctgctagaaacaggaagtgacctccttttgttctgggtgggcagaatggtgatgctaggcactcagcttaccgggcaactgccctttagtaaagtgctgctgcatcctatggtcagagatcgccaggggcgaaaaatgtccaagagcctgggtaacgttctggatccccgtgatataattagcggcgtagaaatgcaggtgcttcaggagaagctgcggagcggcaacctcgacccagcagagctggccatagtggctgcagctcagaagaaggatttcccacacggcattcccgaatgcggcaccgatgcgctacgcttcactctgtgttcacacggcgtgcaggccggggatctccacctcagcgtctcagaggttcagagttgtcggcatttttgtaacaagatatggaatgcactgagattcatattgaatgcgttaggagagaagtttgtcccacaacccgccgaggagctctcaccctcatcccccatggatgcttggattctgagccggctggcactggccgcccaggaatgcgagcgcggattcctcacacgcgagctgagcctcgttacccatgccttacaccatttctggcttcacaatctttgcgacgtctacctcgaggccgtaaagcctgttctctggcatagcccccgacctctggggcctcctcaggtcctgttctcttgtgcagacctgggcctgcggctcttagcacccctcatgcctttcctcgctgaggagctgtggcagcgcctgcccccgaggccaggatgcccccccgccccgtcgatttcagtggctccctatccgtccgcctgcagcttagagcactggcgtcagccagaacttgagaggcggtttagcagggtgcaagaggttgtgcaggtgctgcgagcacttagagctacttatcaactcacgaaggcccgtccacgtgtgttgctccaaagcagcgaaccaggcgaccaaggactgtttgaggcttttctcgaacctctcggcaccttgggctactgcggggcggttggtttactgccgcctggtgctgctgccccctcgggatgggctcaggcccctctctctgatacagcacaggtgtatatggagcttcaggggttagtggatccccaaattcagctgcctctactggcggcgcgtagatacaagcttcagaagcagctggactccctgacagctagaacacctagcgaaggcgaagcaggtacccagaggcagcagaagctgtcttcattgcagctggaactgtcaaaactggacaaggcagccagccatcttcggcagctaatggacgagccccccgcaccagggtcaccggagctgtag

SEQ ID NO: 211152 - DNA, 885 bp, synthetic construct
  misc_feature 1..885: note = Description of Artificial Sequence: Synthetic coding sequence
  source 1..885: mol_type = other DNA
atggccagcgccagcggcgccatggccaagcacgagcagatcctggtgctggatcccccgaccgatttgaagttcaaaggccccttcactgatgtggttactacaaatttgaagctccgtaacccttcggacaggaaggtctgttttaaggtgaaaacgacagcacctagacggtattgcgtcagaccaaactcaggtatcattgacccgggatccaccgtgaccgtctcagtgatgttgcagccttttgattacgaccctaatgagaagtccaagcacaaattcatggtgcaaacaatctttgcgcccccaaatactagtgacatggaggcagtgtggaaagaagcaaagccggatgaactgatggacagcaagttaagatgcgtattcgaaatgccaaacgaaaacgataaacttgggataactcccccggggaacgctccgaccgtgacttctatgtccagcataaataacactgttgcaacacctgcatcctaccacaccaaggatgaccctagaggcctctccgtcctgaagcaagagaagcagaagaacgatatggagccatctaaagcagtgccattgaatgcctccaagcaggacggtccaatgcccaagccgcactccgtttcattgaatgatactgaaactagaaaactcatggaagagtgcaaaaggttgcagggcgagatgatgaaattatcggaagaaaatcgacatcttcgggacgagggtttacggctccgaaaggtcgcgcactccgataagcccggttcaacgtctacagcaagcttcagagacaacgtcacttcccctctaccctccctgcttgttgttattgccgcaattttcatcggctttttcctggggaagtttattctctag

SEQ ID NO: 211153 - DNA, 750 bp, synthetic construct
  misc_feature 1..750: note = Description of Artificial Sequence: Synthetic coding sequence
  source 1..750: mol_type = other DNA
atggccagcgccagcggcgccatggccaagcacgagcagatcctggtcctggatccccctacagaccttaagtttaaaggcccgttcaccgacgtcgttactacaaacctgaagctccgaaaccctagtgacaggaaggtgtgttttaaggttaaaacaacggcgccgaggagatattgcgtgcgacccaacagtggaatcatcgacccagggtcgactgtgactgtaagcgttatgcttcagccgttcgattatgatcctaacgagaagtccaaacacaagtttatggtccaaacgattttcgccccgccaaatactagcgacatggaagccgtgtggaaagaagccaagcccgatgagctaatggactccaaactcagatgcgttttcgagatgcccaacgagaacgataagctgaatgatatggagccaagcaaggcggttccactgaacgcctctaaacaggatggccccatgccaaagcctcacagcgtttcactcaacgacaccgagacccgcaaactaatggaggagtgcaaacgattgcagggcgaaatgatgaaactcagcgaggagaatcggcacttgcgggacgagggcctgaggctcagaaaggtggcgcattccgacaaacctggttctaccagcacagcctccttcagagacaatgttacaagcccactgccatccctgctcgtagtgattgcagccatcttcattggtttctttctggggaaattcatactgtag

SEQ ID NO: 211154 - DNA, 300 bp, synthetic construct
  misc_feature 1..300: note = Description of Artificial Sequence: Synthetic coding sequence
  source 1..300: mol_type = other DNA
atggccaaggtggagcaggtgctgagcctggagccccagcacgagctcaaattccgagggcccttcaccgatgtggttaccaccaacttaaagctgggaaaccctaccgatagaaacgtgtgcttcaaggtgaagaccacagccccaaggcggtactgcgtgcggcctaattccggtatcatcgatgcgggtgcctccattaacgtgagtggccggcggtggactgctgatgaagaagacagcgctgaacagcagcctcattttagcatctcccccaattgggaagggaggcgaccttag

SEQ ID NO: 211155 - DNA, 732 bp, synthetic construct
  misc_feature 1..732: note = Description of Artificial Sequence: Synthetic coding sequence
  source 1..732: mol_type = other DNA
atggccaaggtggagcaggtgctgagcctggagccccagcacgagcttaaatttcggggaccattcacagatgtagtaactactaatctgaaactcggaaatccaacggataggaatgtctgcttcaaggtgaaaacgacagccccgaggagatactgtgtccgaccaaacagcggtattatcgacgctggtgcttcaataaatgtatccgtgatgctgcagccatttgactatgatcccaatgagaagtcaaaacataaattcatggtgcagtctatgttcgcccccaccgacaccagcgatatggaagcagtgtggaaggaggctaagccagaggacctgatggattctaaactacgttgtgtgttcgagctcccagccgaaaacgataagccccacgatgtcgaaatcaataaaattatatcgacgaccgcttccaagacagagacacctatcgttagtaagtcactttcttcttcactggatgacaccgaggtgaaaaaggtaatggaggaatgtaaaagactgcagggggaggtgcagcggctgcgcgaggaaaacaaacagtttaaggaggaggacggtctaaggatgcggaagaccgtgcagagcaatagccctatttccgccttggctcctaccgggaaggaagaaggactcagtactcgacttctcgcattggtggttctcttttttattgtcggcgtcataattgggaaaatcgcactgtag

SEQ ID NO: 211156 - DNA, 1575 bp, synthetic construct
  misc_feature 1..1575: note = Description of Artificial Sequence: Synthetic coding sequence
  source 1..1575: mol_type = other DNA
atggacaccgagagcacctacagcggctacagctactacagcagccacagcaaaaaatcacatagacagggagaacggacccgtgagagacacaagagtcctcgtaacaaagacgggaggggcagtgagaagagtgtgacaatccagcctcccacgggagagccattgcttggaaacgattcaactcggaccgaagaggttcaggacgataattggggcgagacaactacagcgatcactggtacatccgaacattccatctctcaggaggacatcgcgcgcatctctaaagatatggaagacagtgttggcttagattgtaagcgctatctgggtttgaccgtggcatcttttctcgggcttttggtcttcctgacccctattgccttcattctgttgcctcctatcctgtggagagacgaactggagccctgtggaacaatttgtgagggcttattcatatctatggcctttaaactgctaatcctcctcatcgggacctgggccttgttttttcgcaaacggcgggccgatatgccccgggttttcgtgttcagggcattgctgcttgtccttatcttcctgttcgtcgtttcctactggctgttttatggggtgagaatccttgacagcagggatcgcaattatcaaggaatcgtacagtacgctgtctccttagtcgatgcacttctgttcatccattatttggccatagtgctcctcgagctccgacagttgcagcctatgttcaccttacaagtggtgcggagcacagacggcgagagtcgtttctattctttaggccatttgtccattcagagggctgcattagtcgttctagagaactactataaggatttcaccatctacaaccccaaccttctgaccgcctcgaagttccgcgcggcaaaacatatggccggcctcaaagtgtataatgttgacggcccatcaaataatgctaccggccagtctcgagccatgatcgctgccgccgcccggcggcgcgacagttctcacaatgagctttactatgaggaggccgagcacgagcgacgcgtgaagaaaagaaaggcgaggctcgtagtcgccgtggaagaggcatttatccacattcagaggctacaggccgaggagcagcagaaggcacctggggaggtcatggatcctcgagaagctgcgcaggccatcttcccgtccatggccagggccctccagaaatatctccgcattacgagacagcaaaactatcatagcatggagtcaattctccaacacctcgctttctgcatcaccaatggcatgactccgaaggccttcttagagcgctatctgagtgcaggcccaaccctccaatacgacaaagacaggtggttgtctactcaatggaggctggtctccgacgaggccgttaccaatggtttgcgtgacggaattgtcttcgtactcaaatgcctcgacttctccctggtggtgaatgtgaaaaagataccattcattatattaagcgaagagtttatcgaccctaaatcccacaaattcgtgcttcggctccaatctgagacctccgtgtag

SEQ ID NO: 211157 - DNA, 1575 bp, synthetic construct
  misc_feature 1..1575: note = Description of Artificial Sequence: Synthetic coding sequence
  source 1..1575: mol_type = other DNA
atggacaccgagagcacctacagcggctacagctactacagcagccactccaaaaagtctcataggcagggtgagagaactcgagaaagacataaatccccccgcaataaggacggaagaggttcagagaagtccgttaccatccagccacctactggtgaacctttgttgggcaatgactccaccaggaccgaggaagtacaggacgacaattggggggagacaacaacggccattacggggacctccgaacacagcatctcacaggaggatattgcccgaatcagcaaggatatggaggactccgtgggccttgattgcaaacgctatcttggcctcaccgtagctagctttctggggctcctcgtcttccttacacctatcgcctttatccttcttcctccgattctgtggcgagacgaattggagccctgcggcaccatctgcgaggggcttttcatatcgatggcctttaagctgctgattctgcttatcgggacctgggcactgttcttccgcaaaaggcgcgccgacatgcctcgtgtgttcgtcttccgggccttgctgctggtacttatttttctgtttgtggtatcttactggctgttctacggagtgcgcatcctggactcacgcgacagaaattatcagggcatagttcaatatgctgtctccctggtggacgccctcctctttatccactatctggctatagtgctgctcgaactgcgccagcttcaacccatgtttaccctgcaggtggtgcgaagtactgatggagaatcccgattttattccttggggcaccttagcatccagcgggccgcactggttgtactggagaattactataaggatttcaccatctataacccaaatctgctgaccgcttcgaaattcagagccgctaagcatatggccggattaaaagtgtacaatgttgatgggccttccaacaacgctactggacagtctagagcaatgattgccgccgccgcgcggcgacgggattcgtctcacaatgagctgtactatgaagaggccgagcacgagcggcgcgtcaagaagaggaaggcacgcctggtggtggcagtcgaggaagcctttatacatatccagaggctgcaggccgaagagcagcagaaagcccctggagaggtgatggaccctcgcgaagctgcccaggcaatttttccctctatggccagggccctccagaaatacctgcgtattacccgccaacaaaactaccacagcatggaatctatactgcagcacctggccttttgcattacaaatgggatgactcccaaggcttttcttgaaaggtaccttagcgccggccctacattgcagtatgacaaggaccgctggctttccacgcagtggcgactggtcagtgacgaggccgttacaaacgggctgcgagatggcatcgtgtttgtgctcaaatgtctagatttctctctggttgtgaacgtcaaaaaaatcccttttataattcttagcgaggagttcatcgatcctaagagtcataagttcgtgctccgtcttcaaagcgaaacatcagtgtag

SEQ ID NO: 211158 - DNA, 1575 bp, synthetic construct
  misc_feature 1..1575: note = Description of Artificial Sequence: Synthetic coding sequence
  source 1..1575: mol_type = other DNA
atggacaccgagagcacctacagcggctacagctactacagcagccacagtaaaaaaagccaccgacagggggaacgaacccgagagcgccacaagagccctcgtaacaaggacggaagaggctcagagaaatccgtgaccatccagccacctacaggcgaaccccttctgggcaacgactccacacgtactgaggaggtccaggatgacaattggggagaaaccacaactgcaatcacaggcacgtctgagcactctatctcacaggaagatatcgctcgtattagcaaagatatggaagatagcgtgggcctggactgcaagcgctacctgggcctcaccgtcgcctccttcctcggtcttttggtcttcctcactcctatcgctttcattctgctacccccaattctgtggcgtgacgagttagagccgtgcggtacgatctgcgaaggactctttatcagcatggctttcaagctgctgatccttttgatcggcacctgggctctgttcttccgcaaacgccgggcagacatgccccgtgtctttgtctttagagcccttttgttggtcctcatctttctgtttgtcgtcagctattggctgttctatggggtccgaatcctagactccagggaccggaactaccagggcatcgtgcagtacgccgttagtctcgtcgacgccttactattcattcactatctggctatcgttctgctggaacttaggcagcttcaacctatgtttacattacaagtggtgcggagtacggatggagagagtcggttctattcgctgggacatctgtctattcaaagagccgcgcttgtggtgctcgagaactactacaaagacttcaccatctataacccaaacctgctgacagcgtccaaattccgggcagctaagcacatggcggggctgaaagtgtataacgtagacggcccctccaacaatgcgacaggccagtccagagcaatgatcgccgctgctgcacggagacgggactcatctcacaatgagttgtactacgaagaagccgaacatgagaggcgggtgaaaaaaagaaaagcccgtctggtagtggcagtcgaggaggcatttattcacatacagaggcttcaggctgaagagcagcaaaaggcacccggggaggtcatggatcctcgcgaggctgctcaggctatctttccaagcatggccagagcgttacagaaatatcttagaattacaagacaacaaaactatcactcaatggaatccatcctgcagcatctggctttctgcatcactaatgggatgactcccaaagccttcctcgagcgctacctctcagccggtcctactctgcagtacgacaaggaccgttggctatctacccagtggagactcgtgagtgacgaagcagttaccaatggcctgagggatggcattgtattcgtcctcaaatgtcttgacttctcgctggtagtaaatgtgaagaaaatcccttttataatcctgagtgaagagttcatcgacccaaaatcccacaagtttgtgctccgccttcagagcgagacaagtgtgtag

SEQ ID NO: 211159 - DNA, 1569 bp, synthetic construct
  misc_feature 1..1569: note = Description of Artificial Sequence: Synthetic coding sequence
  source 1..1569: mol_type = other DNA
atggacaccgagagcacctacagcggctacagctactacagcagccactccaaaaaatctcacagacagggcgagcggacccgcgaacgacacaagtctccccggaacaaggacggtagaggatccgagaagagcgtcacaatccagccacccactggcgagccgctgcttggcaacgacagtactaggaccgaggaggacgacaattggggggagactacaacagctatcacaggcacatccgagcactccatttcacaggaagacattgcccgtattagcaaggacatggaagattcagtcgggcttgattgtaaacggtacctgggactcaccgtggcgagctttctaggattgctggtgtttttgactcccatcgcattcatcttactgccccccattctgtggagagacgagctggaaccttgcggtacaatctgtgaagggttattcatttcaatggccttcaagctactgattctgttgatcggaacctgggctctatttttcaggaagagaagagccgacatgcccagagtcttcgtgtttagagcgctcctactggtgctgatttttttgttcgttgtctcttattggttgttttacggagtgcggattctcgactctagggaccgtaactatcaaggcatcgttcagtatgctgtgtccctggtggatgccctgctcttcattcattacctggcaatcgtcctactggaattgcggcagctgcaacccatgtttacgctgcaggttgtccgcagtactgacggagagtctcgattctactccctcggccacttaagtatccagcgggctgctctcgtggtgttagagaattactacaaggattttaccatctacaacccaaacctgctgaccgcttcaaaatttcgagccgccaagcatatggctgggctgaaagtgtataacgttgatggaccgagcaataatgctacaggacagtcccgggccatgatcgctgccgcagcgcgaagacgtgattctagccacaacgagctgtattacgaggaggctgagcatgaaagacgagtcaaaaaacgcaaggcacgattagttgtagcggtggaagaggcctttatccacatccagcgcttgcaggccgaagagcagcaaaaagccccaggagaagtgatggaccctagggaggcagcacaggctatttttcccagtatggcccgggcactgcagaaatacttacgcatcaccaggcagcagaactatcatagcatggaatcaatactccagcacctcgcgttttgcatcacaaacggcatgacacccaaagcattccttgaaaggtatctgagtgctggacctactctgcaatatgataaagacaggtggctgagcacccaatggcggttggtgtccgacgaagctgttaccaacggcctgagagacggcattgtctttgtgctgaagtgcctggacttcagtctggtcgtgaatgtcaaaaagattcccttcatcatactgagcgaagagtttattgaccccaaatcacataagtttgtgcttcgtctacagagcgagaccagcgtgtag

SEQ ID NO: 211160 - DNA, 1566 bp, synthetic construct
  misc_feature 1..1566: note = Description of Artificial Sequence: Synthetic coding sequence
  source 1..1566: mol_type = other DNA
atggacaccgagagccagtacagcggctacagctacaagagcggccattcccggagctctcgaaaacaccgagatcgtagggaccggcacagatcgaaatcacgtgacggaggcagaggcgacaagagcgttacaatccaagctccaggtgagccactcctggataacgagagcactagaggagacgagagagacgacaattggggggagacaactacggtggtaacagggacatcggagcattcaatttctcatgatgacttaacacgaatcgcaaaggatatggaagattctgtgcccctcgattgctctcgtcacctcggggtcgctgcgggggctactctcgctttgttgagcttcctgactccgctggccttccttttgttgcccccactgttgtggcgcgaggagctcgagccatgcggtacagcatgcgagggtctctttatttccgtggcattcaagctgttaatactgcttctgggaagctgggcgcttttctttcgacgaccgaaggccagtctccctcgtgtgttcgtcctcagggcccttctgatggtgttagtcttcctcctcgtagttagctattggctgttctatggtgttcgcattttggatgctagagagcgctcctatcaaggcgtcgtgcagttcgccgtctcactggttgacgctctgctctttgttcattatctggccgtcgttctcttggagttaaggcaactgcagcctcaattcacattgaaggtcgtccgctccaccgatggcgctagcaggttttacaatgttggacacctgagcatccaaagagtagccgtgtggattctcgagaagtattatcacgatttccctgtctataacccagctttgctaaacctgcccaagtctgtcttggccaaaaaggtatcagggtttaaggtgtactcactaggcgaagagaattccaccaataattcaacaggccagtctagagccgtgattgcagctgccgcacgtagaagggataactcccacaacgaatattactacgaggaggccgagcacgagcgcagagttcgtaaacggcgcgccaggttggttgtagctgttgaggaggcctttacacacattaaacgactccaggaagaagagcagaagaatccacgtgaagtcatggacccccgggaagctgcacaggccatattcgcgtccatggctcgagctatgcagaagtatctccggacaaccaaacagcagccatatcacaccatggagagcatactgcagcatctggaattctgtatcacgcacgacatgacaccgaaggctttcctcgaacgatacctcgccgctggccccactatccagtatcacaaggagcggtggctcgccaagcagtggacgctcgtgagcgaggagcccgtaactaatggccttaaggacggcattgtattcctacttaagaggcaggacttctccctagtcgtctccacaaagaaggttcccttctttaaactctctgaggagttcgtggaccccaaaagccacaagttcgtgatgaggctgcagtctgaaactagcgtttag

SEQ ID NO: 211161 - DNA, 1542 bp, synthetic construct
  misc_feature 1..1542: note = Description of Artificial Sequence: Synthetic coding sequence
  source 1..1542: mol_type = other DNA
atgaccacccagctgcccgcctacgtggccatcctgctgttctacgtgagccgcgcgtcctgtcaagacacattcactgctgccgtttacgaacatgcagcgatcctgccaaacgctaccttgactccagtcagccgggaagaagcactagcactgatgaaccgcaacttggatatactggagggcgctattacatctgccgctgaccagggcgctcacatcatcgttaccccagaggacgcaatttatgggtggaattttaatagggactcactttatccatatttggaggatatccctgacccagaagtaaactggattccgtgcaacaatcggaaccggttcggacagacacctgttcaagagcgattgtcctgcctggcaaaaaacaattctatatatgtggtggccaacatcggggacaaaaagccttgcgatacttctgatccccaatgtccaccagacgggcgctatcagtacaacaccgacgtggtctttgacagtcagggaaaacttgtcgctagataccacaaacagaatctgttcatgggcgaaaatcagttcaacgtccctaaggagcctgagatcgttaccttcaatactacattcggctcattcggaatttttacctgctttgatattctgttccacgatcctgccgtgacgcttgtcaaggatttccacgttgacactatcgtgttcccaactgcctggatgaatgtcttaccacatctcagtgcagtggaattccactctgcctgggccatgggcatgagggttaactttctggctagtaacatccattatccatccaagaaaatgaccggttccgggatctatgcacccaattctagtcgggccttccactacgatatgaaaactgaggaaggtaaacttttgctttcgcagctggacagccacccatctcattcagccgtcgtgaattggacatcctacgcgtcctcaattgaggccctgtcatccggcaataaggagtttaaaggcaccgttttttttgatgaattcaccttcgtgaaactgacgggtgtggcggggaattacactgtgtgtcaaaaagatctctgttgccatctgtcatataaaatgtctgagaacattccaaatgaggtgtacgccctcggcgccttcgatgggttacatacagttgaggggcgatattatctgcagatctgcactcttctgaagtgtaaaacaacaaaccttaacacctgtggcgatagcgccgagacagctagtacacggttcgaaatgttcagcttgtcaggcacatttggcacacaatatgtgtttcctgaagttcttctctcggagaaccagctggccccaggggagttccaggtgagcacagatgggcggcttttctccctcaaacctacaagtggacctgtgttgaccgttacgctattcggaaggctctacgaaaaagattgggcaagtaacgcctcttctggcctaaccgctcaagccagaatcatcatgctgattgtaatcgctccgatcgtgtgttccctgagttggtag

SEQ ID NO: 211162 - DNA, 1563 bp, synthetic construct
  misc_feature 1..1563: note = Description of Artificial Sequence: Synthetic coding sequence
  source 1..1563: mol_type = other DNA
atggtgaccagcagcttccccatcagcgtggccgtgttcgccctgataaccctgcaggtggggacccaggactcctttatcgctgcagtttacgaacatgctgtgatactgcccaacaaaaccgaaacccctgtcagccaggaggacgccctgaatctcatgaatgaaaatattgatatactcgaaactgcaataaagcaggccgctgagcagggcgcacggatcatcgtgacaccagaagacgcactgtacggttggaaatttacacgggaaactgtattcccctacctggaggatatccctgacccgcaggtcaattggatcccttgtcaggacccccaccgttttggccatactcccgtgcaagcccggttgagttgcctcgcgaaagacaattcaatctatgtcctcgctaatcttggggacaagaaaccttgtaattcaagagattccacctgcccccctaacggatacttccagtacaacacaaacgtcgtttacaacaccgaaggcaagctcgtcgcgcgctaccataagtaccatctgtattcagaacctcagttcaacgtgcctgagaaacctgagctggtgaccttcaataccgccttcggccgatttgggatttttacttgctttgatatcttcttttatgaccccggagtgaccctggtgaaggatttccacgtggatactatcctgtttcccaccgcctggatgaacgtattacctctcttgactgctattgagtttcactccgcctgggcaatgggcatgggagttaatctgctggtggcaaacacccatcacgtcagcctcaacatgaccgggagcgggatatatgcaccaaacggaccaaaggtgtaccactacgatatgaagacggagctgggcaagttgcttctctctgaggtggactcccaccccctgtccagtttagcctacccgaccgccgtgaattggaatgcatatgccaccaccataaagccgttcccagtccaaaaaaacacctttagagggtttatttccagggacggtttcaatttcactgagctgtttgagaacgctggcaatctaacagtctgccaaaaggagctgtgctgtcacctgtcatacaggatgttacaaaaagaagaaaatgaggtgtacgtgctgggtgcgttcactggcctgcatggtcggcggcggagggaatattggcaggtctgcactctcctcaagtgtaaaaccacgaaccttacaacatgcggccgaccggttgaaaccgcttctactcgatttgaaatgttctccctctctggtacttttggcactgagtatgtgttccccgaagtgttgcttacagagatccacctgtctcccggcaagtttgaagttctgaaggatggccgcctcgtgaataaaaatgggtcaagcggtcccattctgacagtgtcgcttttcgggcgctggtacaccaaggatagcctatatagtagctgcggtacttcaaacagtgcgatcacgtacttactcatattcatcctgttgatgattatcgcactgcaaaatatagtcatgctctag

SEQ ID NO: 211163 - DNA, 501 bp, synthetic construct
  misc_feature 1..501: note = Description of Artificial Sequence: Synthetic coding sequence
  source 1..501: mol_type = other DNA
atggtgaccagcagcttccccatcagcgtggccgtgttcgccctgataaccctgcaagtcggtacccaggactctttcatagccgcagtgtacgaacacgccgtgatcctgcctaacaaaacagagacacccgttagtcaggaggatgcacttaatctcatgaatgagaacatagatatcctggagactgccatcaagcaagcggcagaacagggagctagaatcatcgtaacccccgaggacgcactctacggctggaagtttactcgcgaaactgtgttcccctatcttgaggatatccccgaccctcaagtgaattggatcccctgccaggatcctcatcggttcggccatacacccgtgcaggctaggttatcctgcctagccaaggataattcaatctacgtcctggctaacctgggcgataaaaaaccctgcaactcacgagacagtacttgtccccccaacggctatttccagtacaatactaatgtggtttag

SEQ ID NO: 211164 - DNA, 1404 bp, synthetic construct
  misc_feature 1..1404: note = Description of Artificial Sequence: Synthetic coding sequence
  source 1..1404: mol_type = other DNA
atgaacgagaacatcgacatcctggagaccgccatcaagcaggccgcagagcagggcgctcggattatcgtaactccagaggacgccctgtatgggtggaaattcactagggaaactgtgtttccgtatctcgaggatatcccggatcctcaggtcaactggattccatgtcaggacccgcaccgattcggacacacgcccgtccaggcacggctctcctgcttggccaaggacaactcaatctatgtacttgccaatctcggcgataaaaagccttgtaactctagagattcgacctgtcctcctaacggctacttccaatataatactaatgtggtgtacaacactgaggggaagttagtcgcccgctaccacaagtatcacctctacagcgaaccccagttcaatgttccagaaaagcccgagctcgtgacattcaacaccgcgttcggccgttttgggatttttacttgtttcgacattttcttctacgatcctggtgttactctggtgaaagattttcacgtcgacaccatcttgttccccacggcctggatgaacgtcctgcccctgctgacggcaattgagttccactcggcctgggcaatgggtatgggcgtaaatttgctggtggcaaacacgcaccacgtgagcctaaatatgactggatccggcatatacgctccaaacgggcccaaagtctatcactacgacatgaaaaccgagctcggaaagctcttactgagtgaagtggactcccaccccctctcgtccttagcttatcccacagcagtcaattggaatgcttatgccaccaccatcaagccttttcctgtccagaagaacacttttaggggttttataagtagagatggctttaacttcaccgagctgttcgagaacgccggtaaccttactgtctgccaaaaagaattgtgctgtcatctgagttaccggatgttgcagaaggaagaaaacgaagtgtacgtgctgggcgcattcaccggtctgcatggacggcgaaggcgggagtactggcaagtgtgcacccttctcaagtgtaaaaccactaatctgacgacctgtggcagaccagtggagacggccagtaccagattcgaaatgttttctctctcagggacatttggcaccgaatatgtgtttccagaggttcttctcacagagatccatctgtcaccaggaaagtttgaggttctgaaagacgggcgtctcgtcaataagaacggatcgagcggacctatcctgacggttagcttgttcggcaggtggtacactaaggattccctctacagctcctgcggaacctcaaacagcgcgatcacatatctgttgatcttcatcttgctcatgatcatcgcactgcagaatatcgtgatgctgtag

SEQ ID NO: 211165 - DNA, 309 bp, synthetic construct
  misc_feature 1..309: note = Description of Artificial Sequence: Synthetic coding sequence
  source 1..309: mol_type = other DNA
atgaacgagaacatcgacatcctggagaccgccatcaagcaggccgctgagcaaggggcacggatcattgtgacgccggaagacgcactgtatgggtggaagtttactcgggaaaccgtattcccctatctggaggacatcccggatccacaggtcaactggattccgtgtcaggaccctcataggttcgggcatactcctgtgcaagcaaggctttcgtgtttggccaaggataatagtatttatgttcttgccaacctgggtgataagaagccatgtaattcacgcgattccacctgcccgccctag

SEQ ID NO: 211166 - DNA, 306 bp, synthetic construct
  misc_feature 1..306: note = Description of Artificial Sequence: Synthetic coding sequence
  source 1..306: mol_type = other DNA
atggtgaccagcagcttccccatcagcgtggccgtgttcgccctgataacgctgcaggtagggacccaggactcattcattgccgccgtttacgagcacgccgtaattctgcctaacaaaaccgaaacacccgtgtcacaggaggatgccctgaacctgatgaacgaaaacattgacatcttggaaacagccatcaagcaagcggcagagcaaggtgccagaatcattgtgacccccgaggacgctctgtatggctggaagttcacgagagagacggttttcccttatctggaggacatcccctag

SEQ ID NO: 211167 - DNA, 2931 bp, synthetic construct
  misc_feature 1..2931: note = Description of Artificial Sequence: Synthetic coding sequence
  source 1..2931: mol_type = other DNA
atggaggagcggaagcacgagaccatgaaccccgcccacgtgctgtttgaccgctttgtgcaggcaacgacttgcaaaggtactcttaaggcttttcaagagctgtgcgaccatcttgagctcaagccaaaggactaccgctccttttatcacaaactcaagtctaagctgaattactggaaggccaaagctttatgggctaagctggacaagagaggatcacacaaggattacaaaaaaggcaaagcttgcacaaacacaaaatgcctgataataggagccggcccctgtgggttgcgaacagctatcgacctatcactgttgggagctaaggtggtggtcatcgagaaacgagacgcattctccaggaacaatgtgctgcatctctggccattcactatccatgatctgcggggcctgggtgctaagaaattctatgggaagttttgtgctggcgcaatcgaccatattagtatccgccagctgcagctaattctcctgaaagtggccctcattctagggatcgagatacacgtgaacgtagaatttcaggggctcattcagccccctgaggaccaggagaatgaacggatagggtggcgagccctcgtgcaccctaagacacatccagtaagcgaatacgaattcgaggtgattattggaggcgatggccgccgtaatacactagagggctttcgcaggaaagagtttcgcggcaagcttgcgattgctattacagctaattttattaatcgaaacacaaccgccgaggccaaagtcgaggaaatttccggcgtcgcttttatctttaatcaaaaattttttcaggaactcagagaggctaccgggatcgacctggagaacatcgtttactacaaagacgatacccactactttgtaatgactgccaagaaacagagtctgctagacaagggagtaattctgcatgattatgctgacaccgaattgctcttgagtcgggaaaacgtggaccaggaggccctgctatcttatgcacgcgaagccgccgatttttctacacagcagcagctgcctagtttggacttcgccatcaaccattacggccaacccgacgttgccatgttcgactttacgtgtatgtacgcctccgagaatgcggccctggttcgtgagcagaatggccatcagctgcttgtagcgctggtgggtgacagtttgctggagcctttttggcccatgggcaccggcattgcccgcggctttttggcagccatggattctgcttggatggttcggtcttggagccttgggacctctcccttggaggttctggctgagagggagagtatttaccgcctattgccccaaacgacccccgaaaatgtttccaagaacttcagccaatattccatcgatcccgttacccggtacccaaacattaacgtaaacttccttcgcccatcccaggtgagacatctgtacgatactggtgaaaccaaggatatccaccttgaaatggagtccctggtaaattccaggacaaccccaaagcttacacgcaacgagtccgtggccagatccagcaagttactggggtggtgccaacgtcagactgacggatacgccggcgtcaatgtgaccgacctgactatgagctggaaatcggggctcgcactgtgtgccattatccatcgatatcgtcccgatcttatcgacttcgatagtctggatgaacagaacgtggagaagaacaatcagttagcttttgacattgcagaaaaggaactgggcatatccccaatcatgacgggaaaggagatggctagcgtcggtgagccagataaattgtcgatggtgatgtatctcacgcaattctatgagatgtttaaagattctctgccttcctctgacaccctggacctgaacgctgaggagaaggctgttcttattgctagtacccggtctccaattagctttttgagcaaattagggcagacgatctctagaaagcgcagcccaaaggacaaaaaggaaaaggatttagacggcgctggaaaaagacggaagacctcccaatctgaagaggaagaggctccacgcggacatcggggagaacgccccactcttgttagcactctgaccgacaggcgaatggacgtagctgtagggaatcagaataaagttaagtatatggctacacaactgctggccaagttcgaagagaatgcacccgctcagagtattggaataagacgccagttgacccaagaaagaggggctagccagccaagctgctgcctgcccggtcaagtgaggcctgcccccactcccagatggaaacaggggtccatgaagaaggagttccctcagaatttgggggggtccgacacatgttacttttgccagaagagagtgtatgttatggaaaggttatctgccgagggcaagttcttccaccgcagctgctttaaatgcgaatactgcgcaacaacacttcgcctgtccgcctatgcttatgacattgaggacggcaaattttactgtaagccacattactgctaccgcttgtccggatacgcccagcggaagcgacctgcagtggcgcctttgagtggaaaagaggctaaaggacccctgcaggatggagccactaccgatgctaacggaagggctaatgcagttgcatcatccactgagcgaacccctggttctggcgttaatgggctggaagaaccctccattgccaagagactaagagggaccccggagcggattgagctagagaactaccggctctccctccgacaggctgaagccctgcaggaagtgccagaagaaactcaggccgagcacaatctcagttccgttctagatacaggagcagaggaagacgtggccagtagatcagctaggagggccgccggacggccacccgcaactaggccttag

SEQ ID NO: 211168 - DNA, 825 bp, synthetic construct
  misc_feature 1..825: note = Description of Artificial Sequence: Synthetic coding sequence
  source 1..825: mol_type = other DNA
atgatcatcagccacttccccaagtgcgtggccgtgttcgccctgttagcactgtccgtcggcgcgctcgataccttcattgcggccgtgtatgaacacgctgtgatcctgccgaaccgtacagaaactcctgtgagtaaggaggaagctcttctgctgatgaacaagaacattgatgtgctagaaaaggcggtcaaactggctgctaagcagggggctcatattatcgtgaccccagaggatggtatctacgggtggatctttacccgcgaatcaatttatccttacctcgaggacataccagatcctggcgtgaattggattccctgccgggacccatggcggtttggcaatacccctgtgcagcagcgactgtcttgtctggccaaggataactcaatatacgttgtggccaacatcggagacaagaagccgtgcaacgccagcgatagccagtgtccacctgatggaaggtaccagtacaacacagacgtggtgttcgattcccaggggaagttactagccagataccacaagtataacctgttcgcccccgagattcagtttgacttccccaaggatagcgagctagtgaccttcgacacacccttcggcaaattcggtattttcacatgcttcgatatctttagtcacgacccagccgtcgtcgtggtggacgaatttcaactaacagcattctcgaccccccagcatggcaccactcgttgtccctccagccgactgtttccctccatccagcacggtccacgcccttgggagtccatatatctactgcagatcccaaccactccggcttgcacctag

SEQ ID NO: 211169 - DNA, 444 bp, synthetic construct
  misc_feature 1..444: note = Description of Artificial Sequence: Synthetic coding sequence
  source 1..444: mol_type = other DNA
atgatcatcagccacttccccaagtgcgtggccgtgttcgccctgctggctttatccgtgggagctctggacacatttatagcagcagtatacgagcacgccgtcattcttcctaacaggaccgagacacccgttagtaaagaagaggccctgcttctgatgaataaaaacatcgatgtcctcgagaaagcagttaaactcgcagccaaacagggagcccatatcattgtaacccccgaggatggcatttatggctggattttcaccagagagtccatctacccttacctcgaggacatccctgaccctggggtaaattggataccctgtcgcgacccttggcgcaagtcaaaaaagatgaatgaaccagtttcaaaagagctttgttaccattgccattctgagtgcaatcaatacgggcagtggaaactgtatagaacttag

SEQ ID NO: 211170 - DNA, 624 bp, synthetic construct
  misc_feature 1..624: note = Description of Artificial Sequence: Synthetic coding sequence
  source 1..624: mol_type = other DNA
atgatcatcagccacttccccaagtgcgtggccgtgttcgccctgctcgccctttccgtgggggcactggacactttcatcgctgctgtatacgagcatgctgtgatcttgccaaatagaacagaaacaccagtgtccaaggaagaagcactactcctaatgaacaaaaacatcgatgtcctggaaaaagctgtaaagctggcggctaagcaaggggcccacatcatagtcacccccgaggacggcatatacggctggatcttcacgcgtgaatcaatttacccctatctggaggacatcccggatccaggggttaactggatcccatgcagagatccatggaggttcggcaacactcccgtccagcagcggctgagctgcctggcaaaagataatagcatctatgttgtagccaatattggcgataagaaaccctgtaacgcaagcgacagtcagtgccctccagacggaaggtaccagtataataccgatgtggtgtttgatagccaggggaagctgctcgctagataccacaagggggtagaatctacaccccagaaacagtctaggtgcaccaccatgacgtggaaacaaagggtggtgtcttgttgctatcaaaattag

SEQ ID NO: 211171 - DNA, 561 bp, synthetic construct
  misc_feature 1..561: note = Description of Artificial Sequence: Synthetic coding sequence
  source 1..561: mol_type = other DNA
atgagccccaagccccgggccagcggcccccccgccaaggccaccgaagctgggaagaggaagagcagcagccagccatcccccagcgatcctaagaaaaaaactactaaggttgcgaagaagggtaaggcagtgaggcgtggaaggcgggggaaaaagggtgccgctacaaagatggcggcggtcactgcccccgaagcagaatctgcgcctgccgcgccagggccatccgaccagccctcccaggaacttcctcagcacgaactgccaccggaggagcccgtgagcgaaggaacccagcatgatcccctgagccaagaggctgagctcgaggaacccctgtctcaggagtctgaagtggaggagcctctcagccaggaaagtcaagtggaggagcctctgagtcaagagtcggaagtggaggagcccctcagtcaggaatcacaggttgaggagcccctctctcaagaatctgagatggaagagcccttgtcacaggaatcacaagttgaggaaccacctagtcaggaatctgagatggaagagttgccgtccgtgtag

SEQ ID NO: 211172 - DNA, 621 bp, synthetic construct
  misc_feature 1..621: note = Description of Artificial Sequence: Synthetic coding sequence
  source 1..621: mol_type = other DNA
atgagccccaagccccgggccagcggcccccccgccaaggccaccgaggcgggcaagcgtaaatctagctctcagccatccccaagcgatccaaaaaagaaaactacgaaggtggctaaaaagggtaaagccgtgagacgcggtcggagaggcaagaagggtgccgccactaaaatggccgctgtgacagcccccgaagctgagtctgcccctgcagccccgggcccttcagaccaaccttctcaggaactacctcagcacgagctgccccctgaggagcctgtgtctgaaggcacccagcacgatcccctgagccaagaggcggaactggaggaacctctttcacaagagtcggaggttgaagaacctctgtcacaggaatcacaggttgaagagccgttgtcccaggagtctgaggtggaggagcccctaagtcaagagtcccaagtcgaagagcccctgtctcaggaaagtgaggtagaagagcctctcagccaggagtctcaagtagaggagcccctaagccaagagagtgagatggaagagcccctctcccaggagtcacaagtggaggagcccccgagccaggaatccgagatggaggagctgcccagcgtatag

SEQ ID NO: 211173 - DNA, 420 bp, synthetic construct
  misc_feature 1..420: note = Description of Artificial Sequence: Synthetic coding sequence
  source 1..420: mol_type = other DNA
atgagccccaagccccgggccagcggcccccccgccaaggccaccgaggcagggaaacgcaagtctagtagtcaacccagtccctctgaccctaaaaagaaaaccaccaaagtcgcaaaaaagggtaaagccgtgagaaggggtcggaggggaaaaaagggagccgcaacgaagatggctgccgtgacggcaccagaagccgaaagtgcccccgccgcccccggaccctcggaccagcccagtcaagagctgccgcagcacgaactgcccccagaggagccagtatcagaaggtactcaacacgaccccctgtcccaggaaagcgaagtcgaggaacccctgtcacaagaatccgaggtggaagagccgctgacggtctggatggcttcattctccccagtgtcagaaagcactgactag

SEQ ID NO: 211174 - DNA, 561 bp, synthetic construct
  misc_feature 1..561: note = Description of Artificial Sequence: Synthetic coding sequence
  source 1..561: mol_type = other DNA
atgagccccaagccccgggccagcggcccccccgccaaggccaccgaggctggcaaaagaaagagcagtagccaacctagcccatcggatcctaaaaagaaaacgaccaaagtcgccaagaaaggtaaggctgttagacgagggagaaggggcaaaaaaggcgccgctaccaagatggctgcagtaacagcgcccgaagccgaaagtgggcctgccgctcctggtcccagcgatcaaccctcgcaggaacttccacagcacgagctgccccccgaagaacccgtgtctgaaggaactcagcacgaccctctgagccaagagtctgaactggaagaacctctctctcaagagtctgaggtggaggagccccttagccaggaaagccaagtcgaagaacccctctcccaagagtccgaagttgaagagcccctctcccaggaaagccaagtggaagaaccactgtcacaagaaagcgaggtcgaggagccattgagccaggaatcacaggtagaagaacccctgtctcaggaatctgagatggaggaactccccagcgtttag

SEQ ID NO: 211175 - DNA, 501 bp, synthetic construct
  misc_feature 1..501: note = Description of Artificial Sequence: Synthetic coding sequence
  source 1..501: mol_type = other DNA
atgagccccaagccccgggccagcggcccccccgccaaggccaccgaagcaggcaaacggaaatccagctcccaaccaagcccctcagaccctaaaaaaaagacgacaaaggttgctaagaaggggaaggctgtgagacgcggccgaagaggaaaaaaaggagctgctacgaagatggctgcagtgacagcccctgaagcagagagcggcccggccgcacccgggcctagtgatcagccaagccaagagctgccccaacacgagctgccccctgaagaacctgtttctgaggggactcaacacgaccccctcagccaagagtctgaacttgaggagccccttagccaagaaagtgaagtggaggagccactcagtcaggaatcgcaggttgaggaaccgttaagccaagagtctgaagtggaggagccgctttctcaagagtcccaggtggaagaacctctatctcaagagagtgagatggaggaactgccttcagtttag

SEQ ID NO: 211176 - DNA, 378 bp, synthetic construct
  misc_feature 1..378: note = Description of Artificial Sequence: Synthetic coding sequence
  source 1..378: mol_type = other DNA
atgagccccaagccccgggccagcggcccccccgccaaggccaccgaagctgggaagcgaaagagctctagccagccctctcccagcgatccaaagaagaagactactaaggtggctaaaaaaggcaaggccgtgcgtagagggcgaagaggtaagaagggcgcagccaccaagatggccgccgtgacggccccagaagctgagtccggacccgccgccccgggaccctcagatcaacctagtcaggagctgcctcagcacgagttaccccctgaagaaccggtcagtgaagggacccagcacgacccccttagccaggagtccgagctcgaagagccattgagccaagagcgtccagccacccccctgagcccatag

SEQ ID NO: 211177 - DNA, 378 bp, synthetic construct
  misc_feature 1..378: note = Description of Artificial Sequence: Synthetic coding sequence
  source 1..378: mol_type = other DNA
atgagccccaagccccgggccagcggcccccccgccaaggccaaggaaacaggaaaacgtaaatcaagttcacagcccagtccaagtggcccaaagaaaaagaccactaaagtggccgaaaagggtgaggccgtgcgtggaggcaggcggggcaaaaagggtgccgccactaaaatggcagcagtcaccgcccctgaggcggaaagtggccctgcagcacctggaccatctgaccagcctagtcaggaacttccacagcacgagctaccacctgaggagcctgtctcagaagggacccagcacgatcccctgtcgcaggagtccgaattagaggaacccctttcaaagggaaggccatcaactcctctgtctccttag

SEQ ID NO: 211178 - DNA, 2220 bp, synthetic construct
  misc_feature 1..2220: note = Description of Artificial Sequence: Synthetic coding sequence
  source 1..2220: mol_type = other DNA
atgcccggcaagatggtggtgatcctgggcgccagcaacatcctgtggattatgttcgccgcatcccaagccttcaagattgaaacaactccagaatccaggtatttggcccaaattggcgattctgtttccctcacatgctccactacaggatgcgagagccccttcttttcctggcgaacgcaaatcgatagtccccttaatggtaaagtgactaatgagggcacaacctctacattgaccatgaaccctgtgtcattcggaaatgagcattcatacttgtgcacagccacttgcgagagccgtaagttagaaaaaggcattcaagtcgaaatctattcatttcctaaagaccctgagatccatctgtctgggcctctggaggctggcaagcccatcaccgtgaaatgctccgtggccgacgtatatcctttcgacagactggagatcgatcttctgaaaggtgatcacttgatgaagtcccaggagtttctggaagacgctgatcggaagtccctcgagacaaaaagcctggaagtgacttttacgccagtgatagaagacattggcaaggttctcgtgtgtagggcaaagctccatatcgacgagatggactccgtgcccacagtcagacaggcggtgaaggaactacaggtgtacatctcacccaagaacaccgtaatttctgtcaatccttccaccaaacttcaggagggcggatcggtaacgatgacttgttcaagcgagggactgcccgcccccgaaatcttctggtccaagaaactggacaatggaaacctgcaacatctctccggcaacgctacgctcactctgatcgcaatgcggatggaagactccgggatctacgtctgtgaaggcgttaatctgatcggcaagaaccgaaaggaggtagagctgattgttcaagagaagccgttcaccgtggaaatttcacctggcccccggattgcagcgcaaatcggcgactcagttatgttgacctgtagtgtgatgggttgcgaatccccgtccttctcttggaggacccagatcgacagtccgctgagtggcaaggtccgcagcgaagggacaaactctactctgactcttagtccagtgtcattcgaaaacgagcactcctacctttgtaccgtcacttgtgggcacaagaaactggagaaggggatccaagtagagctgtattcatttccccgcgatcctgaaattgaaatgtcagggggactggtcaacgggagcagcgtgaccgtgagctgcaaagtgccctccgtttaccctttggacagactcgagattgagctgctgaagggcgaaaccatactggagaacattgagttcctcgaagatacggacatgaagagcctagagaacaaatccctggagatgacctttatcccgacaatcgaagacaccgggaaggccctggtgtgtcaggcaaagcttcacatcgacgacatggagtttgagcctaagcagcggcagagcacacagacattgtatgtgaacgtggctcctagggataccaccgttttagtgagccctagcagtatcctagaggaaggctccagcgtgaatatgacctgcttgtcacagggtttcccagccccaaagattctttggtccaggcagctccctaacggagagctgcaaccattgtccgagaacgccacactaactttaatatccactaaaatggaagatagtggtgtctatctttgtgaaggcatcaaccaggcgggacgttctaggaaagaagtggaattgataatccaagtcaccccgaaggatattaagctgaccgcctttccttctgagtccgtgaaggagggcgacacagttatcatctcatgtacatgtggcaatgttcctgagacatggatcattctgaaaaagaaggccgaaaccggggacaccgtacttaaatcgatcgacggagcctacacaatccgcaaagctcagctaaaagacgcaggcgtgtacgagtgtgaatctaagaataaggttggcagtcagctgcgttccttaactctcgacgtccaggggagagagaataacaaggattacttcagcccagaattgctggtcctctactttgccagttcgctgatcatacctgccatcgggatgatcatctacttcgctcggaaggccaacatgaaaggaagttattctttggtggaagcacagaagtccaaagtctag

SEQ ID NO: 211179 - DNA, 1944 bp, synthetic construct
  misc_feature 1..1944: note = Description of Artificial Sequence: Synthetic coding sequence
  source 1..1944: mol_type = other DNA
atgcccggcaagatggtggtgatcctgggcgccagcaacatcctgtggatcatgttcgccgcaagtcaggcctttaagatcgagactacccccgagagtcgatacctagcccagataggcgattccgtgtctttgacctgctccacaaccggatgcgagtcccccttcttttcctggagaacccagatcgattcaccgctgaatggcaaggtcactaatgaaggtaccaccagtaccctgaccatgaacccagtcagcttcgggaacgaacactcttacctgtgcaccgcaacttgcgagtctaggaaactggagaaaggaatccaagttgagatctactcattccctaaggatcctgagatccacctgagtggcccacttgaagctggaaagcccatcacagtcaagtgctcagtggccgacgtctaccccttcgatagactcgagatcgacctcctcaaaggtgatcacttgatgaagagccaagagttcttggaagacgctgatagaaaatccctcgaaactaaaagtctggaggttacattcacccctgtgatagaggacattggcaaggtcctggtgtgcagggctaagctgcacattgacgagatggactccgttcccacagtgcgccaggcagtgaaagaactgcaggtgtacattagccctaaaaacaccgttatctctgtgaatccatccaccaaacttcaggaaggaggctctgtcactatgacgtgtagcagcgaaggccttcccgctccagagatcttctggtcaaagaaattggataatggcaacctccagcacctatcaggcaatgccacactcaccctgatcgccatgagaatggaagattctgggatctacgtttgtgagggagttaatctgatagggaagaatcggaaagaggtagagctcattgtgcaggctttccccagggacccagagatcgagatgtccggcggcttggttaacgggtcaagcgtgactgtgagctgtaaggtgccatctgtgtatccattggataggctggagattgaacttctgaagggcgaaaccattttggagaatatcgagttcctagaggatacagatatgaaatcacttgaaaacaagtcacttgagatgaccttcatccccactatcgaagacaccggaaaggctctcgtttgccaggcaaaactccatatcgacgatatggagtttgagcctaaacagcggcaaagcacacagacactctatgtgaacgtggcaccccgtgacacaacggtgctcgtttctccatctagcatccttgaggagggtagcagcgtcaacatgacctgtttgtctcaaggatttcccgcccctaagatcctgtggagtaggcagctgcctaatggggaactgcaacccctaagcgaaaacgccaccctgaccctaatctcgacaaaaatggaggattcaggagtctacttatgcgagggcataaaccaagctgggaggtccaggaaagaggtcgagttaattattcaagtcaccccgaaggatataaagctgaccgcctttccaagcgagtcagtgaaagagggtgatacagttattatctcttgcacttgcggcaatgtgcctgagacctggatcatactgaaaaaaaaggccgagacaggagatacagtgctgaaaagcattgacggggcctacaccatcagaaaggcccagctaaaagacgctggagtgtatgaatgcgagagcaagaataaggttggttcccaactgcgaagtttgacattagatgtccagggacgagagaacaacaaggactacttttcacctgagttgctcgtcctgtactttgcctccagcctgattatcccagctatcggtatgatcatttactttgcaagaaaagctaatatgaaggggtcctatagtctggtcgaagcccagaaatcaaaggtgtag

SEQ ID NO: 211180 - DNA, 1623 bp, synthetic construct
  misc_feature 1..1623: note = Description of Artificial Sequence: Synthetic coding sequence
  source 1..1623: mol_type = other DNA
atgcccggcaagatggtggtgatcctgggcgccagcaacatcctgtggatcatgtttgcagcttcacaagcttttaagattgaaacaacccccgagtcaaggtatctcgcacagataggtgactctgtctcactgacgtgttccactacaggctgtgagtccccttttttctcatggagaactcagatcgattcgccactgaatggcaaagttaccaatgagggcacaacatctactctcaccatgaatcctgtgtcttttggaaatgagcactcatacctctgtacagctacttgtgagagtaggaaactggagaaggggatacaggtggagatctactctttcccaaaagaccccgagatacacctgtctggtccgttggaggcaggaaagcccatcacagtaaaatgctctgttgcagatgtctatccattcgaccgactggagatcgaccttctgaagggcgatcacctgatgaagtctcaggagtttttagaggacgccgatcgcaagtctcttgagactaagtctctggaggtgacctttacccccgtgatagaagacatcggaaaggtgcttgtgtgtcgggccaagctgcatatagacgagatggactccgtccccactgtgcggcaagcagttaaagaactgcaggtttacatatcacccaagaacactgttatatctgtaaatccaagcaccaaattgcaggaagggggctcagtgaccatgacgtgctcgagcgaagggctaccggccccagagattttctggtccaaaaagttggacaatggcaatctgcaacacttatccgggaacgccaccctgacattaatcgcaatgcggatggaagatagtggcatttatgtctgcgaaggtgtgaatcttataggtaaaaatcggaaagaggtagagcttattgtgcaggtcgcaccacgggacacaaccgtgctggtctccccgtcttcaattcttgaggaaggctcaagtgtaaacatgacgtgcctgtcacaagggttcccagcacccaagattctgtggtcaaggcagctgcccaacggcgaacttcagcccctgtcggagaacgcgacacttaccctaatttctacaaaaatggaggactctggtgtgtacttgtgtgagggcattaatcaagccggacgctcaagaaaggaggtggaactgataattcaggtgacgcccaaggatatcaaattgactgctttcccttctgaatcagtgaaagaaggagataccgtcatcatatcatgcacctgtgggaatgtgccagaaacctggatcatcctgaaaaaaaaagcagaaaccggtgatactgtcctcaagtctatagatggcgcttacacaattagaaaagcccagcttaaggacgctggagtgtacgaatgcgaatccaagaataaggttggctcccaattgagaagcctgactctcgatgtccaaggcagagagaataacaaggactactttagtcccgaactgttagtcctgtacttcgcctcttctcttattattcctgcgatcggcatgataatatattttgcacgtaaggccaacatgaagggttcctacagcttagtcgaagcccagaagtccaaggtgtag

SEQ ID NO: 211181 - DNA, 2034 bp, synthetic construct
  misc_feature 1..2034: note = Description of Artificial Sequence: Synthetic coding sequence
  source 1..2034: mol_type = other DNA
atgcccggcaagatggtggtgatcctgggcgccagcaacatcctgtggatcatgtttgcggcctcccaggcatttaagatcgagactaccccagagtccagatatctcgcccagatcggtgattctgtcagcctcacctgttctaccactggctcttttccgaaagacccagagattcatcttagcggccctcttgaagccggaaaacccatcaccgtcaagtgtagcgttgctgatgtgtacccattcgatcgcctggagatcgacttgcttaaaggagaccatttgatgaaatcacaagagtttctagaagatgcagataggaagtcgttagagacaaaatccctggaggtcacatttactcctgtcatcgaggatataggtaaggtcctcgtgtgcagagccaagcttcatattgacgaaatggattccgtcccgacggtaagacaggcagtgaaggagcttcaagtttacatctctccgaaaaacacagttataagcgtgaatccgagcaccaaattgcaggaaggtggtagtgtaaccatgacttgttcgtccgagggactgcccgctcccgaaatcttttggagcaaaaaactcgacaatggtaaccttcagcacctgtctggcaacgctacattgacacttatagctatgcgtatggaagactccggcatctacgtatgcgaaggcgtgaacctgatcgggaagaaccggaaggaggttgaacttattgtacaggagaagcctttcactgtggaaatcagcccaggtccccggatcgcggctcagatcggcgacagtgttatgctgacctgcagcgtgatgggctgcgagtcaccctcattttcttggcgcacgcaaatagactcacccctctccgggaaggtaaggtctgagggaacaaatagcacattgaccttatccccggtgtctttcgagaacgagcactcatacctgtgtactgttacctgcggccataagaagcttgagaaaggcatccaggtcgagctttatagctttcctagagacccagagattgagatgagtggggggcttgtaaatggctccagcgttaccgtaagctgtaaggttccctcggtgtatccactcgaccgactcgaaattgagctgctcaagggggagaccattctggaaaatattgaattcttagaggatacagatatgaagagcttagaaaacaaatctcttgagatgacttttatacctaccatagaggacaccgggaaagctcttgtgtgtcaagcaaagctgcacatcgatgatatggaattcgagccaaaacagaggcagagcacacagactttgtatgttaatgtcgcaccccgggataccactgtattagtgagtccatcaagtattctggaggagggatcctcggtcaacatgacctgtttgagccaaggattccccgctcccaaaattttatggagccgacagttgcccaatggagagctgcaaccgcttagtgaaaacgccaccttaacacttattagtaccaagatggaggattctggggtgtacttatgcgaaggcatcaaccaggccggacgaagcaggaaggaagtggagctcatcattcaggtgacccccaaagacatcaagcttactgcttttccctccgaaagtgtgaaggagggcgacacagtcattatctcttgtacttgcggcaatgtgcccgaaacatggattatcctgaaaaagaaggcagaaactggagacaccgttctgaaaagcatcgatggggcttataccattaggaaggcgcagctgaaggacgctggtgtctatgagtgtgagtctaaaaataaggtgggatcacaactccgatcattgaccctggatgtgcaggggcgtgagaacaataaagattacttcagccctgagctgctggtcctgtacttcgccagttcactgatcatccccgccatcggtatgataatctacttcgctcgaaaggctaatatgaagggatcttacagtctggtggaggctcagaagagcaaggtctag

SEQ ID NO: 211182 - DNA, 1566 bp, synthetic construct
  misc_feature 1..1566: note = Description of Artificial Sequence: Synthetic coding sequence
  source 1..1566: mol_type = other DNA
atggaggccaactggaccgccttcctgttccaggcccacgaggcctctcatcaccagcagcaggctgctcaaaactctctcctcccattgctgtcttccgcagtggagccacctgaccagaagcctctgctcccaatccctatcactcaaaagccccagggggccccagagactctcaaggacgccatagggattaaaaaagaaaagccgaagacgtcatttgtgtgtacatactgtagcaaagcctttcgggacagctatcatttaaggcgacatgaaagctgtcacacagggataaaattggtctcccgtcccaagaaaacacccaccactgtggtgccactgatatccaccatcgccggtgacagcagccgcacgtctctcgtgagcaccattgcaggtatcctcagcactgtcactacatcctcttccggaaccaacccaagcagttcagcttccactacagctatgccagtcactcagtccgtgaagaagcccagcaagccagtgaagaagaatcatgcttgtgaaatgtgtggcaaggctttccgagatgtgtaccacctcaacaggcataaactcagccacagcgatgaaaagccctttgaatgccctatttgcaaccagcgattcaaacgaaaggataggatgacctatcacgtccgaagccacgagggtggaattaccaaaccctacacctgctctgtgtgcggcaagggtttttcacgaccggaccatctgtcatgccacgtcaagcatgtccactctacagagcgacccttcaagtgtcagacctgtacagcagcctttgccactaaggacagacttaggacacacatggtgcggcacgagggaaaagtttcctgtaacatctgtggaaagctgctgtccgctgcctatattacgagtcacctcaaaacacacggtcaaagccagtccataaattgcaacacatgcaaacagggaatttcaaagacttgtatgtcagaagaaacttcaaatcagaaacaacagcagcagcagcaacagcagcagcagcagcagcagcagcagcaacagcaacatgttacgtcttggccgggaaagcaggttgaaactctgcgactgtgggaagaagcagtgaaagccaggaaaaaggaagccgccaatctgtgtcaaacctcgactgccgcaaccacccctgttactttgactacaccattcagcattacatccagcgtatcatccggaacgatgagtaacccagtcacggtggcagccgcaatgagcatgaggagtcctgtgaacgtgtcatcagctgttaatatcacgtcgcctatgaatattggacaccccgttacaattacctcacccctgagtatgacctcccccttaacactgaccacccccgtgaatctaccaaccccggtcactgctcccgtgaacatagcccatcctgtgacaatcacatcgcccatgaacctaccgacgccaatgaccttagcagccccactgaacattgctatgcgccccgttgagagcatgccatttcttccacaggctctgcctacgagccccccctggtag

SEQ ID NO: 211183 - DNA, 1566 bp, synthetic construct
  misc_feature 1..1566: note = Description of Artificial Sequence: Synthetic coding sequence
  source 1..1566: mol_type = other DNA
atggaggccaactggaccgccttcctgttccaggcccacgaggccagtcaccaccagcagcaggcggcacagaatagcctgctaccactgctctcttctgccgtggagcccccggatcagaagcctctcttgccaatccctatcactcaaaaaccccagggcgctccggaaacgctgaaggacgccatcgggatcaagaaggagaagccaaagacttccttcgtctgtacctactgctcaaaggcttttcgtgattcgtaccacctgaggcggcacgagagctgccacacaggaatcaaactggtctcaaggccaaagaagacccccacgacggtagtccctcttatctctaccatcgccggtgatagtagcaggaccagtctagttagcaccatcgcaggcattctgagcaccgtgactacaagttcatctggaacaaatcccagctcatctgccagcactacggcgatgcctgtcacacagtctgtgaaaaaaccaagcaagcccgttaaaaaaaaccacgcctgcgagatgtgtggaaaggctttccgcgatgtgtatcatctgaaccgccacaaactctcccactctgacgagaagccttttgagtgccccatctgcaatcagcgttttaagagaaaggatcgtatgacgtatcacgtccggagtcatgaggggggtatcactaagccctacacctgctccgtttgcggcaagggattcagccggcctgaccacctctcctgtcacgtcaaacacgttcattctacagagcgacccttcaaatgccagacatgcacggccgctttcgcgaccaaggatcgcctaaggactcacatggtgcggcacgaggggaaggtgagctgtaatatttgcgggaagcttctcagtgcagcgtacatcacgtcccacctcaagacccacggccagagccagagcataaactgtaacacctgtaagcaggggattagcaaaacctgcatgtccgaagagacctcaaatcaaaagcaacaacagcaacagcagcagcagcagcagcagcagcaacaacaacagcagcagcacgtgactagctggcctggaaagcaagtagaaacactgcgcctgtgggaggaggcagtgaaagcaagaaaaaaggaagccgctaacctatgtcaaacctctacggctgctacaacacctgtgacactcaccactccgtttagtatcaccagctccgtaagctctggcacaatgagcaatcctgtcacagtcgcagccgcaatgtccatgcgatcaccagtgaacgtgtccagtgccgtaaacatcacgtctcccatgaacattgggcacccagttaccatcaccagccctctctctatgacatcgccactgacactgactacacctgtgaatttgcctactcccgtgaccgctcccgtgaatattgctcatcccgtaactattacttctcctatgaacctccccacgcctatgacgctggctgcacccttgaatatcgccatgcgaccagtggagtctatgccgtttctcccacaggccctcccaacatctccgccatggtag

SEQ ID NO: 211184 - DNA, 1374 bp, synthetic construct
  misc_feature 1..1374: note = Description of Artificial Sequence: Synthetic coding sequence
  source 1..1374: mol_type = other DNA
atgcggccccccagccccctgcccgcccggtggctgtgcgtgctggctggagcattggcatgggctctgggcccagccggcgggcaagctgcgaggctacaggaagagtgcgattacgtgcagatgatagaggttcagcacaagcagtgtctcgaggaggcccagctggagaacgagaccatcggttgttctaaaatgtgggacaatctgacatgttggccggctacccctagaggacaggtggtggtgctggcctgccctcttatctttaaactgttcagcagtattcaaggccgcaacgtgtcccgctcctgtacagatgaaggatggacccatttagaacccgggccctaccctatcgcgtgtgggctggatgacaaggccgcctctctagatgagcagcagacgatgttctatggctctgtgaagaccggctacacgattgggtacgggttgtctctcgctactctcctggtggctacagcgatcttgagtctgtttaggaagctccattgtacccgaaattacattcacatgcacctgtttatatccttcattctcagggccgctgccgttttcattaaggatctggccctgtttgactcaggagaatcagatcagtgcagcgagggatcagtggggtgcaaggcagccatggtgttttttcaatactgtgtaatggccaatttcttctggctgctggtggaagggttatatctctacacgcttctggcagtctcttttttttcggagcggaaatacttctgggggtacattctcattgggtggggagtcccatctaccttcaccatggtgtggacgattgcaagaatccatttcgaggattatggatgctgggacacgatcaactcgagcctctggtggatcattaaaggaccaattcttaccagcatcttagttaatttcatacttttcatttgcatcatccgtatattgctgcagaagctgcggcctccagatatacgaaaatcagacagctctccgtattcacggttggctcggagtaccctactcctcattcccctcttcggcgtgcattacatcatgtttgccttcttccccgacaacttcaagccagaggtcaaaatggtcttcgaacttgtggttgggtcctttcagggattcgtggtagcaattttatactgtttcctcaatggagaagttcaggccgagctcaggcgtaagtggcgtcgctggcaccttcaaggggtattgggctggaaccctaagtacaggcacccaagtggtggttccaacggggctacttgtagcacccaggtttctatgttaaccagggtttcacccggagcccgccgatcatcctcatttcaggctgaggtctcactggtctag

SEQ ID NO: 211185 - DNA, 1251 bp, synthetic construct
  misc_feature 1..1251: note = Description of Artificial Sequence: Synthetic coding sequence
  source 1..1251: mol_type = other DNA
atgatcgaggtgcagcacaagcagtgcctggaggaggcccagctggaaaatgagaccatcggatgttcgaagatgtgggataatcttacctgttggcccgccaccccgcgaggacaggtggtggtactcgcttgccccttgatctttaagcttttctcatccatccaaggtcgtaacgtcagtaggagctgcaccgacgaggggtggacccatcttgagccagggccctatcccatcgcttgcggactggacgataaagcggcttcactggatgaacagcagactatgttttatgggagcgtaaagacggggtacactatcggctatggactgagtttggcgaccttgctggttgctacagctattctgtctctcttccgaaaactacattgcactcggaactacatccatatgcatctcttcatcagtttcattctgagagccgcagcagttttcataaaggacctcgcgttatttgattccggagaatctgatcaatgttctgaagggagtgtgggctgcaaggctgccatggtcttttttcagtattgcgtgatggctaacttcttttggttgctcgtggagggcttgtatctctacacacttctcgctgtctccttttttagcgaaaggaaatacttttgggggtatatacttattgggtggggcgttccttctaccttcacaatggtctggaccatagcgagaatacactttgaggattacggctgttgggacaccattaattcaagtctctggtggatcattaaagggccaattctcaccagcatcctggttaatttcatcctctttatctgcattatccgaattctacttcaaaagctgcgcccacccgacatccggaagtccgatagcagcccatacagtagacttgcacgatctaccctgcttctcattcctcttttcggtgtgcattatatcatgtttgctttctttccagataatttcaagcccgaggtgaaaatggtgttcgaactggttgttggtagtttccagggcttcgtggtggccattctatactgcttcctgaacggagaggtccaggcagaactgcgacgaaaatggcgaagatggcatctgcagggagtcttgggctggaatcccaagtaccgtcacccttctggcgggtctaatggagcaacctgttccacccaggtgtccatgctgactcgggtgtctcccggtgcaaggcggtccagctccttccaggcggaagtgtctctggtgtag

SEQ ID NO: 211186 - DNA, 744 bp, synthetic construct
  misc_feature 1..744: note = Description of Artificial Sequence: Synthetic coding sequence
  source 1..744: mol_type = other DNA
atgacccggcagcgggtgtggatgcggtgggccgtgcggcagccctggtcatttagtaacatcgtttcttggctaacaagttcaggttgttggtggcgcgccagtacatgtacaccctgtctcccttcaccctcttctctgagcgggtccaccagtggcggtgtgcctagcacattcaccatggtctggaccatcgctaggatacactttgaagactacggttgctgggatactatcaactcatctttatggtggattattaaaggccccatcttgacctctatcttggttaacttcattctgtttatttgtataatccggatcttgttacagaaacttcgcccgcctgatatccgtaagagcgactcctcgccctattcccgcctcgccagatccacacttctgttgatacctctattcggcgtccactatatcatgttcgctttctttcctgacaattttaagcccgaagtgaaaatggttttcgagttggtggtagggtccttccaggggttcgtcgtggcaatcctgtactgctttcttaatggcgaggttcaagccgagctgcgcaggaagtggcgcagatggcacctccagggtgtgctagggtggaaccctaagtatagacatccaagtggcggcagcaatggcgccacttgctccacccaggtgtcgatgctgactagggtgtcccctggggcccgaagatcttcctcatttcaggcagaggtgtcactggtgtag

SEQ ID NO: 211187 - DNA, 1230 bp, synthetic construct
  misc_feature 1..1230: note = Description of Artificial Sequence: Synthetic coding sequence
  source 1..1230: mol_type = other DNA
atgcgggccggccggcggccccggctgggcccctgggccggcggctgctccaaaatgtgggataatctcacgtgctggcccgctacgccccgtggccaggtggtcgtgctggcctgccctctcatatttaagcttttcagctcaattcagggaaggaacgtgtctagaagttgcaccgatgaggggtggactcatttggaaccaggcccctacccgatcgcttgcggactcgacgacaaggccgcaagcctggatgaacagactatgttttacggaagcgtcaaaacaggttatactatcgggtatgggctgtcactcgcgactctactcgttgccacagcgatcttgtctctcttccggaaactgcattgcactagaaattatatacacatgcacctgtttatcagttttatactaagggccgctgctgtcttcattaaagatcttgccctcttcgacagcggcgaatcagatcaatgctctgaagggagtgttgggtgcaaggcagcaatggtgttttttcagtattgtgtgatggccaacttcttttggttgttagtggaagggctgtatctgtataccctgttggctgtcagttttttcagtgaacgcaagtatttctggggttacatcttaatcggctggggggttccctcgaccttcacaatggtgtggaccatagcccgcatacattttgaggactatggctgctgggataccataaacagcagtctgtggtggatcatcaaaggtccgatccttacttctatcctggtgaacttcatcttatttatttgtattatcagaattctgttgcagaagctccgaccaccagatatccggaagtctgatagctccccatactctagacttgcacgatccacattgctgcttatccctttgttcggcgtgcactatattatgtttgcgttcttccctgataatttcaagcccgaagtaaagatggtttttgagttggttgtgggttcttttcaggggttcgtcgtggcaattttatattgtttcctaaacggagaagtgcaggcagaattacgaaggaaatggcgacggtggcacctccagggagtgctcggctggaatcctaaatatcgccatccgtccggcgggtctaatggcgccacatgctccacgcaggtatctatgctgacgcgcgtgagtcccggagcccgccggagctcttcttttcaggccgaagtgtcacttgtgtag

SEQ ID NO: 211188 - DNA, 1317 bp, synthetic construct
  misc_feature 1..1317: note = Description of Artificial Sequence: Synthetic coding sequence
  source 1..1317: mol_type = other DNA
atgcggaccctgctgccccccgccctgctgacctgctggctgctggcgccagtgaactcaatccaccccgaatgtaggttccatctcgagatacaagaggaggaaacaaagtgcgctgaactgctgcgctcgcagactgaaaagcataaggcgtgtagtggcgtatgggataacatcacctgttggaggcctgccaacgtgggggaaacagtgacggtaccatgtcccaaggtgttttcgaacttttactctaaagctggcaatatctccaagaattgcacgtcagacggctggtccgaaaccttcccagattttgtcgacgcctgcggatacagcgaccccgaggatgaaagcaaaattaccttttacattctggtgaaggccatatacacactgggctactctgtctcactgatgagtctcgctaccggttctattatcctgtgcctgttccgcaaactgcattgtacccgtaattacatacatttgaacttgtttctgtcatttatactgagggccatcagtgttctggtgaaggacgacgttttgtacagcagctccggcaccctccactgtcccgaccaacccagctcttgggtggggtgtaaactttccctggtattcctgcaatactgcattatggctaacttcttctggctgctggtggaagggctctacctacacacgctgttggtagcaatgttacccccaagacgctgctttctggcctatctgctcatcggctggggactccctacagtgtgcataggagcctggacggctgcgcggctttacctcgaggataccggttgttgggataccaacgatcacagtgtgccttggtgggtgatcaggattcctatcctgatatccataatcgtgaacttcgtgttattcatttcaatcatccgtattctcttgcagaagctcacctctccagacgtgggcggtaacgatcagtcccagtataaaaggttagccaaatcaaccctccttttaatccctttattcggggtgcattacatggtttttgcagtctttcctatctcaatttcttcgaagtaccagattctgtttgagttgtgcctcggctcatttcaaggattagttgtcgctgtgctgtattgcttcctcaactcagaggtccagtgtgagctcaagaggaagtggcgcagtcggtgtcctacacccagtgcttcaagggactacagggtttgtgggagcagcttttcacgcaatggttccgagggagcacttcagtttcaccgggggtcccgggctcaatcctttctccaaacagaaacctcagtgatatag

SEQ ID NO: 211189 - DNA, 1269 bp, synthetic construct
  misc_feature 1..1269: note = Description of Artificial Sequence: Synthetic coding sequence
  source 1..1269: mol_type = other DNA
atgcccctgtgggaggcccccagcgaccaccccgccaacccccccgcgacactgcagggacataccagtctgccggggtgccaggaagaacctgctagggatccacagtcaggactgcctcaaattactagcgaaagctcatccttttccgagggttcgctcccctcttggtcatctggccctgcaggtgctaagctgaacgcttcacacgaagggataggttccagttccgacggcaatggggactcaaaggccgcaaccgagcgcgttgtgagcgccatggataccgtgcggcgcaaacatccagagattacattctacatccttgtgaaggccatctatacattaggttactccgtgagcctgatgagcctcgccaccggaagcattattctctgtctgtttcgcaaattgcactgcacacggaattatatacatctgaacctgtttctgagcttcattctcagggctattagcgtcctagttaaggacgacgtgctctatagcagctctggcacattgcactgtcctgatcagcctagcagctgggtgggatgcaagttgagcttggtgtttcttcagtattgcatcatggcaaacttcttctggctccttgttgaaggactctatctccacactctgctggtcgcaatgcttcctccacgcaggtgtttcctggcctacctcttgataggctggggtcttccgactgtctgtattggcgcctggacagccgccagactctatctggaagacaccggatgctgggacacaaatgaccacagtgtaccatggtgggtcatccggatcccgatcctaatcagcataattgtgaacttcgtcttattcattagcatcattcggattcttctgcagaagctgaccagtcccgatgttgggggcaatgaccagagccagtacaaaagattagcaaagtctactctgctgctaattccactgtttggggtgcactacatggtgtttgctgtttttcccatctcaatttcttccaaatatcagatcctgttcgagttatgtctggggagctttcaaggactggttgtggcggtcctatactgtttccttaattcggaagttcagtgtgaactaaagaggaagtggcgttcccggtgtcctacaccaagtgccagcagagactaccgggtgtgcggcagtagtttctcgagaaatggatccgagggggctcttcagttccaccgcggaagcagggctcagtcgttcctgcagaccgagaccagcgtgatttag

SEQ ID NO: 211190 - DNA, 234 bp, synthetic construct
  misc_feature 1..234: note = Description of Artificial Sequence: Synthetic coding sequence
  source 1..234: mol_type = other DNA
atgcggaccctgctgccccccgccctgctgacctgctggctgctggccccagtgaactcgatccatccggagtgcaggtttcatcttgagatccaggaagaggagaccaagtgtgctgagcttctgcgcagccagactgaaaagcataagggccatacgaaagggtttattctaattcacgctgggggcttgaagcgaatcctcgatccccatacgtaccccctggctccttag

SEQ ID NO: 211191 - DNA, 2022 bp, synthetic construct
  misc_feature 1..2022: note = Description of Artificial Sequence: Synthetic coding sequence
  source 1..2022: mol_type = other DNA
atgtgcagccgggtgcccctgctgctgcccctgctgctgctgctggctctggggccaggagtccagggctgcccatccggttgtcagtgttctcagccccagaccgttttttgtacagccaggcaggggaccacagttcccagggatgtgccccctgacactgtagggctgtacgtttttgagaacgggattaccatgttggacgccggatcattcgcaggtttaccaggtttgcaactactcgacttatctcagaaccaaatcgccagcctgccctccggtgtcttccagccactggctaacctaagtaacctcgacctaacggctaatcggctgcacgagatcactaatgagacctttcgtgggctccgaagactggaacgcctgtatcttggaaagaaccgcatacgccatatacaaccaggagcattcgacacccttgacaggctcctggagctgaaactgcaggacaacgagctgcgggcattgccaccactccgattaccccgtctcctgcttctcgacctatctcacaacagtctgctggcgctcgaaccaggcattttagacactgctaacgttgaggcactgaggctcgccgggttgggcctgcagcaattggatgagggcctgttcagcagactgagaaatctgcacgatttggacgtgagcgacaaccaacttgagcgcgtcccccccgtgatcagaggtctaagaggcctgaccaggttacggttggccggcaatactcggatcgcccagctgaggccagaggatctagctggactagcagctctgcaggagctcgatgtatctaatctcagtctgcaagccctgcctggcgacctcagcggactcttcccacggctgcggctgttagctgctgctcgcaatccgtttaattgtgtgtgccctcttagctggtttggtccctgggttcgagagtctcacgtgaccctggcaagtcccgaagagacaagatgtcattttcctcccaaaaacgcaggacgcttactactggagttagattatgctgattttggctgtccggccacgaccaccactgcaacggtgcccactacgagacccgtggtgcgtgaaccaaccgccctatcctcttcactagcaccaacctggttgagccctacagaaccagcaactgaggccccctctcctccctcaacagcccctccaaccgtgggtcccgtgccccagccccaggattgtcccccatccacatgtcttaatgggggcacctgccacttaggtacacggcaccatctagcatgcctctgtcctgaggggttcaccggtctctactgtgaatctcagatgggacaggggacaagaccatcgcctacacctgtcactcctaggcctcctcggagcttgaccctgggcattgaacctgtgagtcctacatccctgcgtgttggtctgcagaggtacctccagggctcgagcgtgcagctgcggtcactgcgcttgacttacaggaatctttcaggcccagacaaacgcttggtgactctgcggctgccagcctcactggcagagtataccgtaacccaactgagaccgaatgccacttatagcgtgtgtgtcatgccgctgggtcccggtcgagtccctgaaggtgaggaagcttgcggcgaggcacacacaccacccgctgttcacagcaatcacgcgcccgtaacacaggcgcgtgaaggtaaccttcccctcttgattgcccccgcacttgctgcagtcctgctcgctgccctggctgccgtgggcgcagcttattgtgtgagaaggggacgtgccatggctgcagccgcccaggacaaggggcaggttggccctggcgcagggccgcttgagctggaaggggtgaaggtcccacttgagccaggacctaaggccaccgagggagggggcgaagctttgccctctggctctgaatgtgaggttccattgatgggctttcccgggcccggcctacaatcacccctccacgccaaaccttatatatag

SEQ ID NO: 211192 - DNA, 2538 bp, synthetic construct
  misc_feature 1..2538: note = Description of Artificial Sequence: Synthetic coding sequence
  source 1..2538: mol_type = other DNA
atggagctgtggcggcagtgcacccactggctgatccagtgccgggttctccctcccagtcaccgtgtgacttgggatggggcccaagtgtgcgaactcgcacaggcactgcgggatggagtcctgctttgtcagttactgaataacctcctccctcatgcgatcaacctgagggaggtcaatctgcggccccaaatgagccagttcttgtgtttgaagaatatccgcacattcctgagcacctgttgtgaaaagttcgggctaaagaggagtgagctgttcgaggcctttgacctgttcgatgtacaagacttcggaaaggtgatctacaccctctccgccctgagctggactcccatcgcccagaataggggaattatgccattccccacagaggaggagagcgttggagacgaagatatctattcaggattatcagatcaaatcgacgacaccgtagaggaggacgaagacttgtacgactgcgtcgaaaacgaggaggcggagggggacgagatctacgaggatctcatgagatcagaaccggtcagcatgccgccaaaaatgacagagtacgacaagcggtgctgctgtctgagagaaatacagcagactgaagagaaatacacagacactctcgggagcattcagcaacacttcctgaaacctctgcagcgttttctgaaacctcaggatattgaaatcattttcattaacattgaggaccttctgagagtacatacacactttctgaaggagatgaaggaagccctagggaccccaggggccgccaacttgtaccaggtgttcattaaatataaagagcgcttcctcgtctatggcagatattgctcccaagtcgagagcgcctccaaacacctcgacagagtggccgcggcacgcgaagacgtgcaaatgaaactggaagagtgcagccagagagcaaataacgggagatttacactgcgcgacttgctgatggtccccatgcagcgagtgcttaagtaccacctgctgctacaagagctcgtgaaacacacacaggaggcgatggagaaagagaatctcagactggccctcgacgctatgcgggacctggcccagtgcgtcaacgaagtcaagagagataacgagacactcaggcagatcactaattttcaactaagtatcgaaaatctggatcaatccctggctcattacggtcggccaaaaatcgacggcgaacttaagatcacttccgtggagcgaagaagcaagatggatagatatgcttttttgctagataaagccttgttgatctgcaaaaggcgtggcgacagctatgacctgaaagatttcgtgaaccttcactcctttcaggtgcgcgatgattccagtggagacagggacaataaaaaatggtcccatatgttcctgctaatcgaggatcaaggggctcagggatacgagctgttctttaagacgcgtgagctgaaaaaaaagtggatggaacagtttgaaatggcaatcagtaacatctaccccgagaacgcaactgcaaatggacatgacttccagatgttcagcttcgaggagacgacttcctgtaaagcctgtcagatgctacttagggggaccttttaccaaggatacagatgtcaccggtgcagagcaagcgcccataaagagtgtcttggcagggtgcctccctgcggccgacacgggcaggacttcccaggcactatgaaaaaagataagcttcacaggcgagcacaggacaaaaagcggaacgagcttggtttgcccaagatggaagttttccaggagtactacggtttgcctccgccgccaggtgccattggaccctttttgaggctgaatccaggagatatcgtagagctgaccaaagccgaggcagagcaaaattggtgggaggggcggaatacatcaaccaacgagatcggatggtttccatgtaacagagtgaagccttatgttcacgggcctccccaggatttgtcagtgcacctctggtacgcaggacctatggaaagggcgggggcagagagcatactcgcaaacagatcagatgggaccttcctggtgaggcagcgcgtaaaggacgccgcagaattcgccatctccattaaatataacgtggaggtaaagcacatcaagattatgacagctgaagggctttatcggattaccgaaaagaaagccttcagaggacttaccgaactcgttgagttctaccagcagaactctctcaaggactgctttaagagtctcgacacaactctccagtttccatttaaggagccagagaagcgcaccatttctcgacctgctgtcgggtccacaaaatattttggaacagccaaagcccgttatgacttttgcgcaagggacaggtccgaattgtccctcaaagagggagacatcataaaaatactgaataaaaaagggcagcagggttggtggcggggtgaaatttatggccgagtaggctggtttcctgcaaattacgtcgaggaggactattcagaatactgctag

SEQ ID NO: 211193 - DNA, 2247 bp, synthetic construct
  misc_feature 1..2247: note = Description of Artificial Sequence: Synthetic coding sequence
  source 1..2247: mol_type = other DNA
atgagccagttcctgtgcctgaagaacatccggaccttcctgagcacgtgttgtgaaaaatttggcctaaaacgttctgagcttttcgaggcgttcgatttattcgacgtccaggattttggcaaggtgatctatacactgagcgcactaagctggacacccatagctcaaaatcgcggaatcatgccgttccctacagaggaagagtctgtaggagatgaggacatctattccggcctgtccgatcagattgatgacaccgttgaagaagacgaggatttgtatgactgtgtggaaaacgaggaggctgagggcgatgagatctacgaagatcttatgcgaagcgagccagtgtcaatgcctcactttctcaaacctcttcagcgcttcctgaagccacaggacattgaaattatttttatcaatatcgaagatctgctacgagtgcacacgcattttttaaaggagatgaaggaggccctcggcaccccgggcgccgcaaacctctaccaggtgttcatcaaatacaaagaacgatttctggtgtacggacgatattgcagtcaggtggagtccgcctctaagcacctggaccgggttgccgctgcccgcgaggatgtacagatgaaactggaggaatgtagtcagcgtgccaataacgggcgatttactctacgggacttgctgatggtacccatgcagagagtactgaaataccatctgctccttcaggagctggtgaaacatacccaagaagctatggaaaaagagaatctcagactggctttggacgccatgagggatctggcccagtgtgtaaatgaagtcaaaagagacaacgagactctccgccagatcacaaattttcagttgtcaattgaaaatttggaccaatccctggcccactatggaagaccaaaaattgacggcgaactcaagataacgagtgtagagaggcgcagcaagatggacaggtacgcgtttctgcttgataaggccctcctcatttgcaaaaggagaggtgactcatatgaccttaaagatttcgttaacctccattcttttcaggttcgggatgatagcagcggcgatagggacaacaagaaatggagccatatgtttctgctgattgaggatcagggcgcgcaagggtatgaacttttctttaagaccagagagttgaaaaaaaagtggatggagcagtttgagatggccatcagtaatatatatcctgaaaacgccactgccaacggtcacgacttccagatgttctcttttgaagaaacaacgtcctgcaaagcttgtcaaatgctgctccgcggtacattctatcaggggtacagatgccacaggtgcagagcctccgcgcataaagaatgcttggggcgggttccaccatgtggacggcacgggcaggactttcctgggacgatgaagaaagataaattacaccggcgagcccaggacaaaaagcgcaacgagttgggactgcctaagatggaagtgttccaagagtactatgggctgccaccacctcctggagccattggaccattcttacggctgaaccccggcgacatcgtcgagttaacaaaggccgaagccgagcagaattggtgggaaggccgaaatacctctacaaatgaaatcggatggttcccttgcaatagagtgaaaccctatgtccacgggcctccacaagatctgtctgtgcatctctggtatgccggacctatggagcgagccggggctgagtcgatcctagctaaccggagcgacgggaccttcctcgtacggcagagagtgaaggatgccgctgagttcgccatatctataaagtacaacgtagaggtcaagcacataaaaattatgactgctgagggcttgtaccgaataacagagaaaaaagctttcagaggactgacagagttggtagaattctaccagcagaacagtcttaaagactgcttcaaatctctggacactactttgcagtttccgttcaaagagccagaaaagcgcactatctcgaggcccgcagtcggctccaccaaatattttggaacagcaaaagccaggtatgatttttgtgcccgtgacagatctgaactgtcacttaaggagggagacatcataaaaattctgaataaaaaaggacagcagggctggtggaggggggagatttacggcagggtcggatggtttccagccaactacgtagaggaagactacagtgaatactgttag

SEQ ID NO: 211194 - DNA, 2442 bp, synthetic construct
  misc_feature 1..2442: note = Description of Artificial Sequence: Synthetic coding sequence
  source 1..2442: mol_type = other DNA
atggagctgtggcggcagtgcacccactggctgatccagtgccgggtgctgcctccaagccatagagtcacctgggacggcgcccaggtctgcgagttggcccaagcactgagagatggcgtgctcttatgtcagctgctcaataacctgctgccccacgctatcaatttacgtgaggtcaatcttcggccccaaatgtctcagttcttatgcctgaaaaatatccgcactttcctgtccacttgttgcgagaaatttggtcttaaacgtagcgaattatttgaggctttcgacctgttcgacgtgcaggactttggcaaggttatttatacactctctgctctgagctggacaccaattgcccaaaatagaggcatcatgccgttcccgaccgaagaggaatcagtgggagacgaggacatttactctggcctcagcgatcagattgacgacacggtggaagaagatgaagatttgtatgactgtgtggaaaatgaagaagctgaaggagacgagatctacgaggacttaatgcgctcagagcctgtgtccatgccacattttttaaaacctctccagcgtttcctcaaaccacaggatatcgaaatcatctttattaacatcgaggatcttttgcgggtacacacacactttctgaaagagatgaaggaggctttaggcacgcctggcgcagctaatctgtaccaggttttcataaagtataaggagcgctttctggtttacggaagatactgttctcaggttgaaagcgcttcgaagcatctggacagggtagccgcagctcgtgaagacgtccaaatgaaactggaggagtgttctcagcgggctaacaacgggagattcacgctccgcgacctcctgatggttccaatgcagagagtcctgaaataccatttgctccttcaggaactcgttaaacatacacaggaagcaatggagaaggagaacttgaggctggcgctagacgctatgcgtgatcttgcacagtgcgttaatgaggtgaaacgcgacaatgagactctaagacagataactaacttccagctatcaatcgagaaccttgaccaaagtttagctcactacggaagacctaagatcgacggggaactgaagatcactagcgtggagagaaggtccaaaatggaccggtatgcctttttgttggacaaagctctgctgatctgcaagcggcgcggtgattcctacgatctgaaggacttcgtcaacctgcatagcttccaggtccgcgatgatagttcgggggatagagataacaaaaaatggtctcacatgtttctactcatagaggaccagggggcacaaggctacgagctattctttaagacaagagagctgaaaaagaaatggatggagcagttcgaaatggctatcagtaacatctatcccgaaaatgctacagcaaatggtcatgactttcagatgttttcatttgaggagactacaagttgcaaggcctgtcaaatgctgctaagaggtactttttatcagggctacaggtgccataggtgccgcgcctctgcacacaaagagtgcctcgggcgggttccaccatgcggccgacatggccaggacttcccaggaacaatgaagaaggacaagttgcaccgcagagctcaggataagaagcggaatgaacttggattgccgaagatggaggtgttccaggagtattatggactgccaccacctcctggcgcgatcggaccctttctgagactcaaccctggcgacattgtggaactgacgaaggccgaagcagagcaaaattggtgggagggccggaatacttctaccaatgagattggttggttcccttgcaatcgcgtaaagccgtatgtccacggccctccgcaggatctgtctgtgcacctttggtatgccggtcccatggagagggccggcgccgagtccattctcgcaaaccggagcgacggtacctttctggtgcgacagcgggttaaagacgccgccgagtttgccatcagtatcaaatataacgtggaagtaaaacacattaaaattatgacagccgagggactgtacaggataaccgaaaaaaaggccttccgaggcctgacggagctggtggagttctaccagcagaatagcctcaaggattgctttaagagcctagacactacactccaattccccttcaaggagcctgagaagagaacgatatcaagaccggccgtagggtccaccaagtattttggaactgcgaaggcacgctatgatttctgcgctcgagatcgcagcgagttgtctcttaaagaaggggacatcattaagattttgaataaaaagggccagcaaggttggtggagaggggagatctacggtagggtcggctggtttccggcaaactacgttgaggaggactactctgagtattgttag

SEQ ID NO: 211195 - DNA, 2538 bp, synthetic construct
  misc_feature 1..2538: note = Description of Artificial Sequence: Synthetic coding sequence
  source 1..2538: mol_type = other DNA
atggagctgtggcggcagtgcacccactggctgatccagtgccgggttttgccaccttcacaccgggtgacttgggatggggcacaggtatgtgagctggcgcaggctctgcgcgacggggtgttgttatgtcaattgcttaataacttacttccacacgctataaatctgcgagaggtgaatctgcgaccccagatgagccagttcctgtgtctgaagaacatccgcaccttcctgtcaacttgctgtgagaaatttgggctgaaaaggagcgagttgtttgaagcctttgatttatttgacgtgcaggacttcggcaaggtgatttacaccctctctgctttgagctggacaccgatagcccagaaccgaggaatcatgccattcccaactgaggaggagtccgtgggagatgaagatatatactctggcctttctgatcagatcgatgacaccgttgaggaagatgaggatttatacgattgcgtcgagaacgaagaagccgaaggagacgaaatttacgaggacttgatgaggtcagagcctgtctccatgccacccaagatgactgagtatgataaacgatgttgttgcctgagagagattcagcagaccgaggaaaagtacacagataccttgggctccatccaacaacattttctgaaaccgttacaacgatttttaaagccacaggatattgagatcattttcattaacatcgaggatctgctgagggtgcacacccacttcctgaaagagatgaaggaggccctcggtaccccaggggccgcgaacctataccaagtgttcataaaatataaagagcggttcctggtatacgggcgctattgttctcaggtcgaaagtgcttctaagcatctggacagagtggccgccgcccgcgaggatgtccagatgaagctcgaagaatgcagccaaagggcaaataatggaagatttacccttagagacttactcatggtgcctatgcaaagggtgcttaagtaccacctactcttacaggaattggtcaagcacactcaggaagccatggagaaggagaatctacggcttgctttagacgctatgagggatctggcgcagtgtgtgaacgaagtaaaaagagacaatgagacccttcgccagatcactaatttccagctaagcatagaaaatctcgaccagtctcttgcccactatggccgcccaaagatcgatggcgagctgaagatcacgagtgttgagaggcggagcaaaatggataggtatgcattcctcctcgataaggcattgctcatctgcaagagaagaggcgacagctacgaccttaaggactttgtcaacctgcactcatttcaggtccgagatgactccagtggtgatagggacaacaaaaagtggagtcatatgttcctactgatcgaggaccagggggcgcaggggtacgagttattcttcaagacccgcgaactcaaaaagaagtggatggaacagttcgagatggctatctctaatatctatccggaaaacgctactgcaaacgggcatgatttccagatgttctcttttgaggagaccaccagttgtaaggcctgccaaatgctgctgcggggcacattctatcagggatacaggtgccaccgatgccgagcctccgcccacaaggaatgtcttggacgtgtgcccccttgtggacgtcatggacaagatttcccaggcacaatgaagaaggataaactgcaccgccgagcacaggataagaaacgtaatgaactggggctgccaaaaatggaggtgttccaggaatattatggcctgccccccccccccggagctattggaccctttctgaggctcaacccaggcgatatcgtggaactgacaaaggccgaggctgagcaaaactggtgggagggaagaaatacctccaccaacgagatcggctggttcccctgtaatagggtcaagccctatgttcacggaccgccacaggacctgtcagtgcatctttggtacgccgggcctatggaacgagcaggggctgagtctatacttgccaatcgctcagatggtacattcctcgttaggcagcgggtgaaggatgccgcagagtttgctatttctattaaatataatgttgaggtgaagcacatcaagataatgactgctgagggactctatagaatcaccgagaagaaagctttccgcggcctgacagagctggtcgaattctatcagcaaaacagcttgaaggactgcttcaaatccttagatactactctacagtttccctttaaggagcccgagaaaaggaccatatctcggcccgccgtgggttccactaagtattttggtactgcaaaggctaggtacgatttttgtgctagagaccggtctgaactctccctgaaggagggcgacatcatcaaaattttaaataagaaaggtcaacaggggtggtggcgtggggagatatacggtcgcgtgggctggtttccagctaattacgtcgaagaggactactcagagtattgttag

SEQ ID NO: 211196 - DNA, 2607 bp, synthetic construct
  misc_feature 1..2607: note = Description of Artificial Sequence: Synthetic coding sequence
  source 1..2607: mol_type = other DNA
atggagcagtggcggcagtgcggccggtggctgatcgactgcaaggtcctaccccccaatcatcgtgtggtgtggccaagtgctgtcgtatttgacctggcacaggccctgcgggacggcgtgctcttgtgccaactgctgcataatctgagccccggatctattgacctaaaagatattaactttcgtccgcagatgagtcagtttctatgtcttaaaaacatccgaaccttcctcaaggtgtgtcacgacaagttcgggctgcgaaacagtgaactgttcgatccctttgacctcttcgacgtgcgagacttcggtaaggtaattagtgcagtgtcccgactgtccctgcactccatcgcacagaataaaggcattcggccttttccatccgaggagactacagagaatgatgacgatgtgtatagaagcctggaggaattagcagatgaacacgatctcggtgaagacatatacgattgcgtcccatgcgaggatgggggagatgatatctacgaagacattattaaggtggaggtgcaacagcccatgaaaatgggaatgaccgaggatgacaagaggaactgttgtctgttggagatacaggaaacagaggcgaagtattatcgcaccctcgaagatattgagaagaattacatgtctccgttgagactggtgttgagccccgccgacatggctgccgttttcataaatcttgaagacctgatcaaagtgcaccactcattcctgcgggccattgatgtgagtgtgatggtcgggggcagcaccttggccaaagtttttctggatttcaaggaaagactgcttatttatggcgaatattgctcccatatggagcacgctcagaatactttaaatcagctcctcgcatccagagaagattttcgccagaaagtagaggaatgtaccctaaaagttcaagacggtaaattcaaattgcaggatcttctcgtggtcccaatgcagagggtgcttaaatatcacctgctgctgaaggagctcctgtctcactcggctgagcggcccgagaggcagcagctgaaagaggccttggaggcaatgcaggatttggccatgtacatcaacgaagtaaaacgggacaaggagacgttgcgtaagatttctgagtttcagagttctatcgagaatctgcaggtgaagctggaggaatttggcaggcctaaaatcgacggtgagctgaaggtcaggtcaatcgtcaaccatacaaaacaggatagatacctctttctgtttgataaggtggtgatcgtttgcaaacgcaaaggttactcctacgagctgaaggaaatcattgaactactgtttcataaaatgaccgatgatccaatgaacaacaaggatgtgaagaaatggtcatacggcttttacctcattcatctccaggggaagcaggggttccagtttttctgcaaaacggaagacatgaagcgcaaatggatggagcagtttgagatggctatgtcaaatatcaagcctgataaggccaacgcaaatcaccactccttccagatgtataccttcgataagaccactaactgcaaggcctgcaagatgttcctgcgcgggacattctatcagggctatatgtgtactaaatgcggcgtgggcgcccacaaggagtgtcttgaagtgatacccccatgcaaattccggacatcaggtgatagggacgcctccggagcaggacccggccctaagatggtggctatgcagaactaccatggcaacccagcacccccgggcaaacctgtgctgacttttcaaactggagatgtcctagagctgttacgaggagatcctgaatctccttggtgggagggcaggctggtccagactcggaaatctggttacttccctagcagcagcgtaaagccatgccccgtggacggccggcctcctattagccgtccaccttcaagagagattgattacactgcctatccttggttcgctgggaatatggaacggcagcagacggacaacttgctcaaatcacatgccagtggcacatacctcatccgagaaagaccggctgaggcggaacggttcgcaatctccattaagtttaacgacgaggtgaagcatataaaagtggtggaaaaggacaattggattcatataacagaggcaaagaagttcgattcacttctggagctggttgaatattaccaatgccattctttgaaggaaagctttaagcagctggatactaccctaaaatacccatacaaatctcgtgagagaagtgcatctagggcgtcctcgaggtcgcctgcctcctgtgccagctataatttttctttcctgtctccacagggactgagcttcgcctcccaaggacccagcgctccattctggtccgtgttcactcctagggtcataggtacagccgtggctcggtacaatttcgctgcccgcgacatgagagagctgagcctacgagaaggggacgtagtgagaatctacagtagaatcggaggcgatcagggatggtggaagggcgaaacaaacggtaggatcggctggtttccctcaacctatgtggaggaagaggggatacagtag

SEQ ID NO: 211197 - DNA, 2637 bp, synthetic construct
  misc_feature 1..2637: note = Description of Artificial Sequence: Synthetic coding sequence
  source 1..2637: mol_type = other DNA
atggagcagtggcggcagtgcggccggtggctgatcgactgcaaggtgttaccccctaaccatcgtgtggtgtggccctctgctgtggtgttcgacttggcccaggccttacgggatggggtgcttctgtgccaattattgcacaacctgagtcctggatctattgatctgaaagatatcaattttaggccccagatgagccagtttctttgcctgaagaatatacggacttttctgaaagtgtgtcacgacaaatttggactcagaaattccgaactgttcgatccgttcgacctttttgatgtgcgagatttcggcaaggtcatatccgctgtctcacgattgtccctccactctatcgcacaaaacaaagggattcggccatttccgtctgaggaaaccaccgagaacgatgacgatgtgtaccgctccctggaggagctggcagacgagcacgacctgggcgaggatatatacgactgtgtgccctgcgaagatggcggggatgacatatacgaggacatcatcaaggttgaggttcagcagcccatgatccgctatatgcagaaaatggggatgacggaagacgataaacggaattgttgcctgctcgaaattcaggagaccgaagccaagtactatcgtacactggaggatatcgagaaaaactacatgagtcctcttcgattagtactgtcacctgccgatatggccgcagtctttattaacctcgaggatttaattaaggtgcaccactccttcctccgggctattgacgtctcagtcatggttggagggtccaccctagcaaaagtgttcttagattttaaagaaaggttgctgatctacggtgagtattgcagccacatggaacatgcacagaacacgttgaatcagctcctggccagtcgtgaagatttccggcagaaggtcgaagagtgtacccttaaggtgcaggacggtaaatttaagctacaggatctgctagtcgtcccaatgcaacgcgtgcttaagtatcacttgctgctcaaagaactccttagccattctgccgagaggccagagcgtcagcaattgaaagaggctctcgaagcaatgcaggacttagctatgtacatcaacgaagtgaagagggacaaggaaacactgcgaaagatttcggaatttcagtcctccatcgagaacctgcaggtgaaactcgaagaattcggtcgccctaaaatagatggcgagctgaaggttaggtcaattgtcaaccacacaaaacaggatagatatctcttcctttttgacaaagtggtgattgtgtgtaaacggaagggatactcatatgaactcaaggaaattatagagctactttttcacaagatgacagatgatcccatgaacaataaagatgtgaaaaagtcccatggcaagatgtggtcgtacgggttttatctgattcacctgcagggcaagcaagggttccagtttttctgcaagacagaagatatgaagagaaagtggatggagcagttcgagatggcaatgtcaaatatcaaacctgataaggctaatgctaaccaccatagtttccagatgtatacatttgataagactacaaactgcaaagcttgtaagatgttcctccgtggaactttctatcagggatatatgtgtactaagtgtggcgtcggcgcccacaaggaatgtctcgaagtgatcccaccctgtaagttcacttccccggctgacctggatgcttctggcgctgggccaggcccaaagatggtggctatgcagaattaccatggtaatccggccccgcccggtaagcccgtcctgacatttcagactggggacgtcttagaactgctgcggggagatccagaatcaccgtggtgggaaggaaggttggtacagacacgcaagtctggctatttcccaagctcttctgtgaaaccttgtcctgtggacggccgtcctccaatttctaggcccccttcacgggagatcgactacacagcatacccttggttcgctgggaacatggaacgacagcaaactgacaacttactgaagtctcatgccagcggtacctatttgatccgtgagaggcctgctgaagcggaacggtttgctatatccatcaagttcaatgatgaggtgaaacacataaaagtcgtagagaaagacaattggatccacattaccgaggctaagaaattcgacagcctactcgagctggtggaatactatcaatgtcactccctgaaagaatctttcaagcagctggatacgacgctcaagtatccatacaagtctcgggagcggtccgcgagccgagccagcagccgctcccccgcaagttgtgcctcatataatttcagctttctgtctccacagggtctttcctttgcctcccagggcccatctgctcccttctggagcgtcttcactccacgtgttataggcacagctgtagctcggtataacttcgctgcaagagatatgagggagctctcactaagggagggcgacgtggtaagaatctatagccggatcgggggcgatcaaggctggtggaagggggagaccaacggcagaatcgggtggttcccatctacatacgtggaagaggagggcatccaatag

SEQ ID NO: 211198 - DNA, 2607 bp, synthetic construct
  misc_feature 1..2607: note = Description of Artificial Sequence: Synthetic coding sequence
  source 1..2607: mol_type = other DNA
atggagcagtggcggcagtgcggccggtggctgatcgactgcaaggtgctgccccccaatcaccgggtggtgtggccatccgcagtggtgttcgacttggcacaggctctaagagacggtgtgttactgtgtcagctgctgcacaatcttagtccaggaagcattgacctgaaggacatcaatttccggccccaaatgagtcagttcctctgtctaaagaatatccgcacatttctgaaggtgtgccatgataaattcggtctgaggaattcggagctgttcgatccctttgacctgttcgatgtaagagacttcgggaaggttatttctgccgtatcccgcctttcgctgcactccattgcccagaataaaggcattcgccccttcccttcggaggagacaacagagaacgacgacgacgtctatcggtcgctggaggaattggcagacgagcacgatctcggtgaggatatctacgactgcgtgccttgtgaagatggaggggacgatatctatgaggatataatcaaagtggaagtgcagcagcctatgaagatgggcatgacggaggatgacaagcggaattgttgcttgttggagatacaggagactgaggcgaaatactaccgaacgttagaggacatcgaaaaaaattacatgtcccccctccggctggtgctgtcccctgctgacatggcggccgtcttcatcaatctcgaggaccttatcaaggtccaccattcgttcctgagagccatcgacgtatctgtgatggtggggggctccaccctggccaaggtatttctggacttcaaggagcgcctcttgatatatggagaatattgtagccatatggaacatgcccagaacacgttgaatcaactccttgcatccagagaagattttcgtcagaaagtggaggagtgtaccctaaaggtgcaggatggcaaattcaaactgcaggatctgctcgtcgtgcccatgcagcgggttctgaaatatcacctactgctgaaagagctgttgtcccattcagctgagcgccctgaacgtcagcagttgaaagaagcactggaggctatgcaggatcttgctatgtacatcaacgaagtgaaacgcgacaaggagacattacgcaaaatcagcgagtttcaaagcagcattgaaaatctgcaggtaaaactcgaagaattcggacggccaaagattgatggagaacttaaggtaagatcgattgtgaaccacaccaagcaggaccgatacttgttcctgttcgataaagtcgttatcgtgtgtaaacggaagggatactcctacgagttgaaggagattatagagctgctgtttcacaaaatgaccgatgatcccatgaacaataaggatgtgaagaagtggagctacggcttctatcttattcacctccagggaaaacaaggattccaattcttctgtaagactgaagacatgaaaagaaagtggatggaacagttcgaaatggccatgtccaatattaaacccgacaaagcaaacgccaatcatcactcctttcaaatgtacaccttcgacaagaccacaaactgcaaggcatgcaagatgtttcttcggggaaccttctaccagggctatatgtgtactaaatgcggcgtgggggcgcataaagagtgtctcgaagtcatccctccttgtaagttcactagcccagctgacttggatgcaagtggcgccggcccgggacctaagatggtcgccatgcagaactaccacggaaaccccgcgccaccaggaaagccggtcttaacattccagaccggggatgtccttgaactccttagaggcgatcctgagtcaccttggtgggaggggaggctcgtgcagacgcggaaatccggctacttcccttcttcttccgttaagccttgccccgtcgatgggaggccgcctatctctcgacccccatctcgggaaatcgactacacagcctacccttggttcgccggaaatatggagaggcaacagactgacaacctccttaagtcccacgccagcgggacatacctgatcagggagcgcccagccgaggctgaaaggtttgcaatctccattaagttcaatgatgaggttaagcacatcaaggtagtggaaaaggataactggattcacatcactgaagcaaagaaattcgactccctgttggaactggttgagtattatcagtgccattccctgaaggagtccttcaagcagctcgataccaccctgaagtacccttataagagccgtgaacgaagtgcttctcgcgcatcttcacgcagcccagcctcatgcgctagttacaacttctccttcctctcccctcagggcctttcatttgcaagccagggccctagcgccccattctggtccgtgtttactcctagagtgatcggaacagctgtggccagatataatttcgccgcgcgggacatgcgcgagttgagtctgcgggagggggatgtggtacgcatctactcgcgcatagggggggatcaaggatggtggaaaggtgaaacaaacggacgcatagggtggtttccctccacatacgtcgaggaggagggcatacaatag

SEQ ID NO: 211199 - DNA, 2520 bp, synthetic construct
  misc_feature 1..2520: note = Description of Artificial Sequence: Synthetic coding sequence
  source 1..2520: mol_type = other DNA
atggagcagtggcggcagtgcggccggtggctgatcgactgcaaggtcttgccacccaatcatagagtcgtatggccatccgccgtggtcttcgacctggcccaggccctgcgggatggtgttctgctgtgccagcttctgcacaatctgtcccctggctctatcgatttgaaggatatcaattttcgccctcaaatgagtcagttcctgtgcctaaagaacatccgtactttcctgaaagtgtgtcatgacaagtttggcctccgcaattcagagctgttcgatcctttcgacttgttcgacgtgagagactttggtaaagttatttcagcagtatcccgcttaagtctacacagtatcgcccagaataagggcataaggccatttccttctgaagaaacgacagagaacgacgacgacgtttaccgatcactggaggagcttgctgatgagcatgacttgggcgaagacatctacgattgcgttccctgtgaggacgggggcgatgatatatatgaagacataatcaaggttgaggtgcaacagccaatgaagatgggaatgactgaggacgataagcggaactgttgcttacttgagattcaggagactgaggccaagtattacagaaccctggaagatatcgagaagaactatatgtcacctcttagattagtgttatcaccagctgatatggccgctgtctttatcaacctggaggatctaatcaaggtgcaccacagtttccttagagccattgatgtctctgtgatggtggggggcagtacattggccaaggtgttcttggattttaaagagaggctcttgatctatggcgagtattgctcgcatatggagcatgcacaaaacacattaaaccagctcctggctagccgagaggattttaggcaaaaagtcgaagaatgcactttgaaggtgcaagatgggaaattcaaactacaggatctgttagtcgtcccaatgcagcgggtcctgaagtaccatttgctgttgaaggaacttctatcccattcagcagagaggcccgaacgacagcaactaaaagaggcattggaagctatgcaggatctcgctatgtatattaacgaggttaagagggacaaagaaaccctcagaaaaattagcgaattccaatcttccattgaaaatcttcaggtgaagctggaagaattcggtcgccctaagattgatggagaactcaaggtgaggtccattgtaaatcacacaaagcaggatagatacctgttcttgttcgataaggtcgttattgtgtgtaagcggaagggttattcatacgaactaaaagagatcatagagctgctgttccacaagatgaccgacgatcccatgaacaacaaggatgtgaagaaatggagttatggcttctacctgatccacttacaaggcaagcagggcttccagtttttctgcaagaccgaagatatgaagcggaagtggatggagcaatttgagatggccatgtcaaacatcaagcccgataaagctaacgctaaccatcactcgtttcagatgtacactttcgacaaaacaactaattgtaaggcttgcaagatgtttctgagaggtaccttttatcagggctacatgtgcaccaaatgcggagtcggcgcacacaaggaatgcctggaggtgatcccgccgtgcaaatttacctcccctgctgacctggacgcttctggtgcagggcccggccctaaaatggtggctatgcagaattatcatggaaacccggcccccccagggaagcctgtgcttaccttccagaccggagatgtactagagttactaagaggcgaccctgagagcccttggtgggagggacgcctcgtccagacaaggaaaagcggctattttccctcctcaagcgtaaagccttgtcccgtggacggacgaccccccatctccaggccccctagcagagaaatcgattacaccgcctatccgtggttcgctggcaacatggagaggcaacaaacggacaacttactgaaaagccatgccagcggtacttatctcatcagggagcgtcccgcagaggccgagcgcttcgccatcagcatcaaattcaatgacgaggtgaagcacattaaggtcgtagagaaggacaactggatccacattactgaggcaaaaaaattcgactcactgctcgagctggtcgagtactaccagtgtcactccctgaaggagagctttaaacagttggatactactctgaagtatccttacaaaagtagggagcggtccgcctcccgcgcttccagcagatcccccgtgttcacacccagggtgatcgggacggctgtggcgaggtataacttcgctgctagggatatgcgagaactatcgctacgggagggggatgtcgtgagaatctactccagaatcggtggtgatcagggctggtggaagggcgagaccaacgggagaatcggatggtttccaagtacttatgtcgaggaagagggcatccagtag

SEQ ID NO: 211200 - DNA, 2544 bp, synthetic construct
  misc_feature 1..2544: note = Description of Artificial Sequence: Synthetic coding sequence
  source 1..2544: mol_type = other DNA
atggagccctggaagcagtgcgcccagtggctgatccactgcaaggttctcccgaccaatcatcgcgtgacatgggactctgcccaagtcttcgatctggcccagacactgcgtgacggcgttctcctgtgtcagctgttaaacaacttgagggcccactcaattaatctgaaagaaattaacctgaggcctcagatgagtcagttcctttgcctgaagaatataaggaccttcctgaccgcctgttgtgagacttttggtatgcgaaagagcgaacttttcgaagcttttgatttgttcgacgtgcgggacttcggcaaggtgattgaaacacttagtaggcttagtaggactcccattgctctggcaacgggcatccgtccttttcctactgaagaatcgattaatgacgaagatatttacaaaggtctccccgatctgatagacgagacgctggtcgaggacgaggaggatctgtacgattgtgtgtacggcgaggacgaagggggtgaggtgtatgaagacctaatgaaggctgaggaggcccatcaacccaaatgcccagagaacgatattcgctcatgctgtctcgccgagattaagcagaccgaggagaagtatactgaaaccctggagtcaatcgagaagtatttcatggctcccctcaaacggttcttgacagccgccgagttcgacagcgtgtttattaacatccccgagctggttaagctccaccgaaacttgatgcaagagatacatgattcaatagtgaacaagaacgatcagaacctgtaccaggtcttcatcaactacaaggagcgactggtaatctacggacaatattgcagtggtgtggagtcagccatctcctcgctcgattatatttctaaaaccaaggaggacgttaagctgaagctggaagagtgcagcaaaagagccaataatggtaagtttacactgagagatctgctcgtggttccaatgcagagagtccttaaataccatctgctcctgcaggagctggttaaacacaccacagatcccaccgagaaagccaacttaaaattggcattggacgcgatgaaggatcttgcccagtatgtaaacgaagtgaaacgggataatgagacgttgcgtgagataaaacagttccagttaagtattgagaatctgaaccagcctgtgctgctgtttggaaggcctcagggcgacggcgagatccggataaccactcttgacaaacacaccaaacaagaaaggcacattttcctgtttgacctcgcagttatcgtgtgtaagcgaaaaggggacaattacgagatgaaggagattatcgacctgcagcagtacaagatcgccaacaacccaaccacagataaagaaaataaaaagtggtcctacggcttctatcttatccatacacagggacagaacggactcgagttctactgcaaaaccaaggacctgaagaagaagtggttggagcagttcgaaatggccctatccaatatccgacccgattatgcagatagcaattttcacgacttcaaaatgcacacatttacacgcgtgactagttgtaaggtttgccagatgctgcttagaggcaccttctaccaggggtacttatgtttcaagtgcggcgcccgagcgcacaaggaatgtcttgggcgggtcgataactgcgggcgtgtcaacagcggcgagcagggcacactgaagctgccggaaaaacgaactaatggactgagaaggacccccaaacaggtggatcctggcctgcccaagatgcaggtgatcagaaattactcgggaacgccgcctccggccctccacgagggcccccctctccagctgcaggccggggacaccgtcgaacttttaaagggagatgcacacagtctgttctggcaagggcgcaacctcgctagcggggaagtgggcttctttcctagcgatgcagtgaagccctgcccttgtgtgccaaaaccagtggattatagctgccagccctggtatgccggggcgatggagaggctccaggccgagaccgagttgatcaaccgcgttaatagcacttacctggtaagacatagaacgaaagagagcggtgagtatgctatctctatcaaatacaacaacgaagccaaacatataaaaatcttgactcgggacggttttttccacatcgccgagaacagaaagtttaagagtctgatggaacttgtggagtactacaaacaccactccctgaaggaaggtttcaggacactggacaccactttgcagttcccctataaagagccggagcattcagccggtcagcgtggtaacagggctggtaacagccttttgtctccaaaagttctgggcattgcaatcgctagatatgacttctgtgctcgggacatgcgggagctctccttactgaagggggacgtagttaaaatttacacaaaaatgagcgcaaacggatggtggagaggcgaagtgaatggacgggtggggtggtttcccagcacgtacgtcgaagaggacgaatag

SEQ ID NO: 211201 - DNA, 1671 bp, synthetic construct
  misc_feature 1..1671: note = Description of Artificial Sequence: Synthetic coding sequence
  source 1..1671: mol_type = other DNA
atgagccagttcctgtgcctgaagaacatccggaccttcctgaccgcatgttgtgaaacttttggaatgcgcaaatccgaactgttcgaagcgttcgacctattcgacgtgcgggatttcggcaaggttatcgaaactctgagcagactgtctaggacgccgatcgctttggctacaggtattcggcccttccctactgaagagtcaataaacgatgaggatatatataaaggacttccagacctgatcgatgagacactggtcgaggatgaagaagatctgtatgattgcgtgtatggtgaggatgaaggcggtgaggtgtacgaagatctcatgaaggccgaagaagctcatcagcctaagtgtcctgagaatgacattagatcctgctgcctcgcagagattaagcagaccgaagagaaatatactgagaccctggaatcaattgagaagtatttcatggccccactcaagcgattcctcactgctgcagaattcgattccgtgttcatcaatattcctgagctggtaaaactgcatcgcaatctgatgcaggaaatccatgactcaatcgtcaataagaatgaccagaacctgtatcaggtgtttatcaattacaaagagagactggtgatttacggtcaatattgttcaggagtcgaaagcgctatatcttccttagactatattagcaaaactaaagaggacgtcaagctgaagctggaagagtgtagtaagcgggcgaataacgggaagtttactctgagagacctactcgtcgtacctatgcagagagtcttgaaataccacctgctccttcaggagctggtgaaacataccactgatccgactgagaaagcaaacctcaaactggcccttgacgcaatgaaagacctcgcccagtacgtaaacgaggtgaaacgggataatgaaaccctgagggagatcaagcagttccagctctccatcgaaaacctgaaccagcccgtgctgctgttcgggcgcccgcagggcgatggtgagattcggattaccactctcgataaacatactaagcaggagaggcatatctttctatttgatcttgccgtgatcgtctgcaaacgcaaaggcgataactatgaaatgaaggagatcattgatctgcagcaatataagattgccaataatcctacaaccgacaaggaaaataaaaagtggtcatatggattctaccttattcacacacagggccagaatgggctggagttctattgcaagacaaaggacttgaagaaaaagtggctggagcaatttgagatggctctgtccaatatcagacccgactacgccgactcaaacttccacgactttaagatgcatacattcactagggtaaccagctgcaaagtctgtcagatgttactgcgcggcactttttaccaggggtatttgtgttttaagtgcggtgctagagcccataaggaatgtcttggccgtgtggacaattgcggcagagtcaatagtggggagcagggcactttgaagttacctgagaaacgcacaaacggcctgcggaggaccccgaaacaggtggaccccgatgtgccatgccttctgcacttttttatttccatggcccccgctacccgatctattgtcaagtcccagaaaaagaacaaaaagttttag

SEQ ID NO: 211202 - DNA, 864 bp, synthetic construct
  misc_feature 1..864: note = Description of Artificial Sequence: Synthetic coding sequence
  source 1..864: mol_type = other DNA
atgcccatcttcaccttcctgagcgagcagggcaccctgaagctgcccgagaaaaggaccaatgggttgaggcggaccccaaagcaggtagacccaggtctgccaaagatgcaagtgatcaggaattattcagggacaccacccccagcattacacgaaggtcctcccctccagcttcaggctggggacaccgtcgaactactgaaaggagatgcacattcgcttttttggcagggacgaaatctggctagcggagaggtgggattctttccttcagatgcagtgaaaccttgcccatgcgttccaaaaccagtggattactcttgccagccatggtatgcgggcgcgatggagcggctgcaggctgaaaccgagttgattaatagagtgaatagcacctaccttgtgcggcaccgcaccaaagagtcaggcgaatatgcaatttcgatcaaatacaacaatgaggccaagcacatcaagatactcaccagagacggtttcttccacatcgcagagaaccgtaaattcaaatcccttatggaattggttgagtactataagcaccacagtttaaaggaaggcttcaggaccctggatactacactgcagttcccttataaagaacctgagcactccgctgggcagagaggtaacagggccggaaatagcctgctcagtccaaaggtcctgggtatcgcaatagccaggtacgacttttgcgcgagagacatgcgggaattatccctgctgaagggcgatgtagtcaaaatttatacaaaaatgagtgccaatggatggtggcggggtgaagtcaacggccgcgtgggttggttcccatctacatatgttgaagaagatgagtag

SEQ ID NO: 211203 - DNA, 2628 bp, synthetic construct
  misc_feature 1..2628: note = Description of Artificial Sequence: Synthetic coding sequence
  source 1..2628: mol_type = other DNA
atggagccctggaagcagtgcgcccagtggctgatccactgcaaggtcttgccgacaaatcatcgggtcacttgggatagcgctcaggtctttgacctggctcagactctgagagatggcgtactcctctgtcagctgctcaataatctcagggcccatagcattaatttaaaagagattaacctcaggcctcagatgtcacagtttttatgtctgaagaacatcagaacatttctgacagcatgctgtgaaactttcggcatgcgaaagagtgaactgttcgaggccttcgatctgtttgatgtgagagatttcgggaaagtgatcgagaccttatcccgcctttcacgcacaccaatcgctctggcaactggaatacggccgtttcctaccgaggaatcaatcaacgatgaagacatctataagggactgcccgacctcattgacgaaacactagtagaggatgaagaagatctttacgactgtgtatacggagaagatgaagggggcgaagtctatgaagacttgatgaaagccgaggaagctcatcagccaaagtgcccggagaatgatattcggagctgctgcctggctgagatcaaacaaaccgaagagaagtacacggaaactctggagagcatagagaagtactttatggcgccattgaaaagattcttgaccgctgcagaatttgatagcgtcttcatcaacatccccgagctggtgaaacttcaccgaaacttgatgcaggaaattcatgattctattgttaataagaacgaccagaatttataccaggtgtttattaactacaaggaacgtctggtgatttacgggcagtattgcagcggcgtcgagtctgcaatctccagtctggactacataagcaaaacaaaggaagacgtcaaacttaaactggaagaatgctcaaaaagggcaaataacggcaagttcacactccgcgacctcctcgtggtgcccatgcagcgggttctcaagtatcacctgcttctccaagaactggtgaaacacaccaccgacccaaccgagaaggctaatcttaaactcgcgctggacgcaatgaaggatttagcacaatatgtgaatgaagtcaagcgcgataacgagacactaagagaaatcaaacagtttcagctgtccattgagaatctgaaccagcctgtattgctgtttgggaggccccagggggatggagaaatacggatcaccactcttgacaaacacacaaaacaggaacgccacattttcctgtttgacctggcagtaatcgtgtgtaaacggaaaggtgataactacgagatgaaggaaattatcgatctgcagcagtataaaatagcgaacaatccaaccacagacaaggaaaataagaagtggagttatggtttctacctgatccatacccagggacagaacggactggagttttactgcaaaacaaaggatctgaaaaagaagtggctggagcaatttgagatggccttatctaatatccgacctgattacgccgactctaactttcacgactttaaaatgcatacctttacgcgtgtgacgagctgtaaggtctgccagatgctactgaggggaaccttttatcagggttatctttgctttaaatgtggggcacgagctcacaaagaatgtctgggtcgggtcgacaattgcggacgcgtgaacagcggtgagcagggtaccctgaagcttcccgaaaaacgcaccaatggtttgagacggacccccaaacaggtggaccccggtctacccaaaatgcaggttattaggaactattccggcaccccccctccagctcttcacgagggaccccctctgcaactgcaggcgggcgacaccgtggagctgctgaagggggacgctcattcgttgttttggcagggccggaatctcgccagtggcgaagttgggttctttccgagtgacgcggtgaaaccttgcccttgcgtgcctaaacctgtggactatagttgccaaccgtggtacgcaggggctatggagaggctgcaggctgaaacggagctgatcaacagagttaactccacctatttggtccgccacaggaccaaggaatccggggagtatgcaatctccattaaatataataatgaggcaaagcatataaaaatcctgacgagagatggattttttcacatcgccgagaaccggaaattcaagtcattgatggaattggtggaatactataaacatcattccctgaaagagggcttcagaactctagataccacactacaattcccgtataaggaacccgagcattccgccgggcagcgaggcaatcgggcgggcaactccagcccttcacttttttgtggattctcttttgtgacgcctcctgattatagctttgtaccccctagcagcacccctttttggagtgtgctctcccccaaagtactgggcatagctattgctcggtatgacttctgtgcgagggatatgcgcgagctctctctactgaagggggatgtggtgaaaatatatacaaaaatgtccgcaaacggatggtggcgaggggaggttaacgggcgcgtcggatggttcccatccacttatgtagaggaagacgaatag

SEQ ID NO: 211204 - DNA, 756 bp, synthetic construct
  misc_feature 1..756: note = Description of Artificial Sequence: Synthetic coding sequence
  source 1..756: mol_type = other DNA
atgcaggtgatccggaactacagcggcacccccccccccgccctgcacgaggggccgccactgcaactccaggcgggcgacactgtagaactcctcaagggcgacgcacatagcttattctggcagggccggaacctggccagtggcgaggtggggttcttcccttctgacgccgtcaaaccttgcccttgtgtgcctaaacccgtggactactcctgccaaccttggtacgcaggggcaatggaaaggctgcaggccgaaactgagctgatcaacagagtaaactcgacatacttggtacggcacaggacaaaggagtctggagagtacgctatatctatcaagtacaacaacgaggcaaagcacataaaaatactgactcgtgatggctttttccatattgctgagaacaggaaatttaaaagtctgatggagctggtggagtattacaaacatcactcgcttaaggagggcttccggacattggataccaccctgcagttcccttataaagagcccgaacattctgccggacagcggggcaaccgggccggtaattccctcttgagcccaaaagttctagggatagctatcgcacgatatgatttctgcgctcgggacatgagggaactttcgttactcaagggagatgtggtgaagatctataccaagatgagcgcaaacggttggtggcgcggggaagtgaatggcagggtaggatggttcccatctacctatgtcgaggaggatgaatag

SEQ ID NO: 211205 - DNA, 912 bp, synthetic construct
  misc_feature 1..912: note = Description of Artificial Sequence: Synthetic coding sequence
  source 1..912: mol_type = other DNA
atgagcagcgcccggttcgacagcagcgaccggagcgcctggtacatgggtccagtctctcgtcaggaagcccagacacggctgcagggccaaagacacgggatgttcctggtgcgagatagctccacctgccccggtgattacgtcctcagcgtgtcggagaattcaagagtttcacactatataattaattccctccccaatcggaggttcaaaatcggagaccaagagttcgaccacttgccagctctgctggaattctacaaaatccattatctggacaccaccaccctgattgagcccgcaccccgctatccatcaccccctatggggagtgtttccgctcctaacctacccactgctgaagataatctggagtatgtccggacgctctacgacttccctggaaatgatgctgaggacctgccctttaagaaaggtgagatactggtaattattgagaaacctgaggagcagtggtggtctgcccggaacaaggacgggcgcgttggtatgattcctgtaccatatgtcgagaaactcgttcgaagcagcccacatggaaaacacggtaaccggaactccaacagctatggtatcccggagcctgcacacgcctacgcgcagccccaaaccacaacacctctgcctgccgtgtctggtagtccaggagcagccatcacccccctgcctagtactcaaaacggacctgtgttcgccaaagctattcaaaagcgagtgccatgcgcctacgacaagaccgcattggccttggaagtaggcgacattgtgaaagttactcgtatgaatatcaacggacagtgggaaggggaggtgaatggccgaaaggggctcttccccttcacacacgtgaagatttttgatcctcagaatcccgacgagaacgagtag

SEQ ID NO: 211206 - DNA, 912 bp, synthetic construct
  misc_feature 1..912: note = Description of Artificial Sequence: Synthetic coding sequence
  source 1..912: mol_type = other DNA
atgagcagcgcccggttcgacagcagcgaccggagcgcctggtacatgggacccgtgtcgagacaggaagcccaaacaaggcttcaggggcaaaggcatggaatgtttcttgtgcgagattcatcgacatgcccaggggactatgtcctgagtgtgtctgaaaattcccgagtcagtcattacatcatcaatagcctcccaaacagacgatttaagattggcgaccaggagtttgaccacctacctgcgctgctcgaattttataaaatccattatctggatacaaccacactgatagagcccgccccgcggtatccatcccctccaatgggatcggtctccgcacctaacctgcctacagccgaagacaacttggaatatgtgcggaccctctacgacttcccaggaaatgatgctgaagatctgcctttcaaaaagggagaaatattggttatcattgaaaagccagaggaacagtggtggtccgcaagaaataaagatggccgggtggggatgatccctgtgccctacgtggaaaaactggtgaggagttcacctcacggcaagcatggtaatcgaaacagcaactcatatggtataccagagcctgcacatgcatatgcccagccgcagactacaacaccgctgcccgctgtatcaggctcccccggcgccgccatcaccccccttccctctacacagaacggaccagtgttcgccaaggcaatccagaaaagagtgccttgcgcctatgataagaccgcattagctctcgaagtgggcgacatcgttaaagtaacacggatgaacatcaacggccagtgggaaggagaggtcaacggccggaaaggcctcttcccttttacacatgtgaagatctttgatccacagaacccagacgagaatgaatag

SEQ ID NO: 211207 - DNA, 3132 bp, synthetic construct
  misc_feature 1..3132: note = Description of Artificial Sequence: Synthetic coding sequence
  source 1..3132: mol_type = other DNA
atggagttcgtgcgggccctgtggctgggcctggccctggccctgggtccggggtcagcagggggacacccacagccttgcggggtactcgcccgcttgggagggtctgtacgtctgggcgccctcctaccccgagcacccctggccagggccagagcccgcgccgccctggctcgggccgcacttgcccctcggctaccccacaatttgtcgctggaactcgtcgttgcggcacctcctgcacgtgatccggcgagtctgacaaggggtttgtgccaggccttggtgcctccaggcgtagccgctttgttggcatttcccgaagctaggcccgagctactccaactgcattttctggcagccgccaccgaaactcccgtgttgagcctgctgcgcagggaagctcgggctccactgggcgccccaaaccctttccacctgcagttgcattgggcttcccctctcgagacactcctggatgttctggttgcggtcctgcaggcgcacgcctgggaggatgtcggcctagctctttgcaggactcaggatcccggcggcctggtggccctgtggacttctagagctggtcgtcccccacagcttgtcctcgacctgtcccggagggacaccggggacgcaggtctccgcgcgaggctcgcgcccatggcagctccggttgggggcgaggccccggtgcccgctgccgtgttactcggatgtgatattgccagagccaggagagtgcttgaggccgttccccctggaccccactggttactggggacgcccttacccccgaaggccttgcccaccgcagggctgcctccgggtctgctggccttgggagaggtcgctagacctcccctcgaagcggccatacatgatatagttcagttagtggccagagccttaggttcagcagctcaagtgcagcctaagcgagcgctcctgccagctcctgtgaattgtggagacttgcaacctgccggtccggaatcacccgggaggtttctcgcccgctttctggccaacacgagtttccagggtagaaccgggccagtttgggtgactggaagcagccaggtccacatgtcccgacacttcaaggtgtggtccttgcgccgagaccctcggggtgctccagcctgggccacagtgggaagctggcgagacggccagttagatctggagccgggcggggccagcgctcgacctcctccaccccaaggagcacaggtttggcctaaactgagggtggtcaccttgctggaacatccattcgtcttcgcgcgggatcctgatgaggacggccaatgcccagctggtcagctgtgcctggacccgggcactaacgactctgcaacgctggatgccctgttcgctgctcttgccaacggttcagctccccgcgctctacggaagtgttgttatggctattgcatcgatctgttggagaggctggcggaggatactcctttcgacttcgaattgtaccttgtaggcgacggaaagtacggcgcgctccgagatggacggtggacgggtttggtcggtgacctactggccggacgtgctcatatggctgtcacctcattctcaattaattctgctcgcagtcaggtcgtggacttcacttcgcccttcttctctaccagcctgggcatcatggtaagagcacgagatacagcctccccgatcggcgctttcatgtggccacttcactggtccacatggctcggcgtcttcgcagctctccacctgaccgctctattccttactgtctatgagtggaggtctccctacggcttgacccccagggggagaaacaggagcacagtcttcagctattcatcagccctcaacttatgctacgccatactgtttagaaggaccgtctcctcaaaaaccccaaaatgcccaactggccgcttgcttatgaatctgtgggccattttttgtctcttggtcctgagcagttatacagcaaatcttgccgctgttatggtaggcgacaaaaccttcgaggagctttcaggaattcacgatcccaagctgcaccaccccgcacaaggattccgattcggcaccgtgtgggaatctagcgcggaagcttatattaagaaatcatttcccgacatgcacgctcacatgcgacgccactctgctcccacgaccccacggggcgtggctatgcttacctctgaccctccgaagttgaacgcttttattatggacaagagtctactcgactatgaggtgagtatcgacgctgattgcaagctcctcaccgtcggcaaacctttcgccatcgagggttacggaattggcctgccccaaaatagccccctgacgtctaatctgtccgagttcattagtagatacaaaagttcaggttttatcgacctgctgcacgacaaatggtataaaatggtgccatgtgggaagcgggtgtttgccgtgacagaaactctgcagatgtccatctaccattttgcaggcctgttcgtcttgctttgtctgggccttggaagcgcactgctgagctcattgggggaacacgcctttttcaggcttgctctgccgcggatacgaaagggcagtagactgcagtactggctccacacctcccagaagatccaccgagctctgaacactgaaccacctgaaggctccaaagaagaaacagctgaggcagagccgtccggaccggaggtagagcagcagcaacagcaacaagatcaacccactgctccagaggggtggaagcgggcgcggagagcagtggacaaggagaggagagtccgttttctgctggagcccgcagtggttgtcgcacctgaagcagatgcagaggcagaggcagctcctagggaaggacccgtatggctgtgttcttatggtagacccccagccgcccgtcccacaggagcccctcagcctggtgagcttcaggagctcgagaggcggattgaagtcgcaagggaaagactgcgccaggcacttgtgaggaggggccagctgctggcacaactcggggacagcgcccgacacaggccgcggagattgctgcaggcgcgcgcagccccagccgaggctccccctcactctggaagacctggcagccaggagtag

SEQ ID NO: 211208 - DNA, 2502 bp, synthetic construct
  misc_feature 1..2502: note = Description of Artificial Sequence: Synthetic coding sequence
  source 1..2502: mol_type = other DNA
atgcaccagctgttccggctggtgctgggccagaaggacctgagccgagcgggggatctattctctctggatgattctgaaatcgaagactccctcaccgaggctctcgagcaaattaagatcatctcgtccagcagtgattatcaaaccaacaacaacgatcaggccgtagtcgaaatctgcataacacgcatcaccactgccatacgggagaccgaatcaatcgaaaagcacgccaaggccctggtggggctgtgggactcctgtctagaacacaacttgcggccgttcggcaaggatgaggacaccccacatgctaagatagcttcagatatcatgtcttgtatactgcaaaattataatcgacctccagttatggccctggctattcccatcgctgttaagttcttgcacaggggcaataaggagctctgccgcaatatgtccaactacctgtctttagcggccatcaccaaagctgatctactggccgaccacacagaggtcatcgtcaagtcaatcctccagggtaacaccatgctgctgagagtattgcccgctgtctacgaaaaacagcctcaacctattaatagacaccttacggagctcctggctttgatgagtcagcttgagcaacccgagcagtatcacctgctgaggctgttgcacgtggccgcgaagaagaagcagctggaagtggttcaaaagtgtatccccttccttattggtcatctaaaagattccacccataatgatatcatacttaatatccttatcgagattgccgtttacgagcctgtggctctaaactcctttctaccaatgctcaaagaaatcggcgagcgtttcccatacctgacagggcagatggctcggatatacggcgctgttggtcatgtcgatgaggagcgcgcgagatcatgtttgacttatctcgtgagccagctggccaacatggaacattccttccaccatattcttcttctcgaaattaaaagtatcacagacaccttttcatccattcttggaccccagtctcgcgatattttccgtatgtccaacagctttacagccattgcgaagctgttgacccgtcagctcgaaaatactaaagctggatctggccgtcggaaaatctccaccgagatagaatttcctgaaaaattggaggaaacgaaacttatcgtcaccgagaacgaggatcacgaaaagctccaggtgaagattcaggccttcgaagataaaattaacgcaggcagcaacacacctggctctatccggcgatattccttgggccaggtttctaaggaagagagaaagaacatccggtttaacagatctaagagcctagcgtttcatacaatgctgacgaaaggagtgggcagcgacgacggcgaggacgagaaccgaggcgacataccggcaagtatcagcctgtccgaaatcgatcctctgggacagggaaacgataaattaccttttaagacagacactgaacgctcccagttaggcgaaagctctgtgagctaccccaacataatccacattgactcggaaaaccttagcgaaaccgtgaaagagaatagccaggaggagacacccgaaactacagcatccccaatcgagtaccaagacaaattgtacctgcacctaaagaagaatttgtcgaaggttaaagcctatgccatggagatcggaaaaaagattcccgtgccagaccagtgcactatcgaggataccgtgagaagttgcgttgccaagctgttctttacatgttccttaaaggggcactattgtctttatagcaagtcaagctttatcctgatctcccaggagccacaaccctggattcaaatcatgtttctgtttcagcagtctctctttccagaaccactgtccatccagtcccactccgtgcaattcttaagagccctttgggagaagactcaagctggtggagctcattcgttcgaaaccgccatgatggaaagcaccttccctcagcaaaaggacttggaccaggtccagctgcacctggaagaagtacgcttctttgatgtcttcggcttctccgaaaccgctggtgcctggcagtgtttcatgtgcaacaacccggaaaaagccaccgtggtcaaccaggacgggcagccactcatagaaggcaagttaaaagaaaagcaggttcgatggaaattcatcaagcggtggaagacccgctatttcactcttgccggcaaccaactgctgtttcaaaaagggaagtctaaggacgatcctgatgactgtccaatagagctcagcaaagttcaatcggtgaaggcggttgcgaagaagaggagagacagatcactgccccgggccttcgagatttttaccgataataaaacctatgtgttcaaagccaaagatgagaagaacgcagaagaatggctgcagtgcataaatgtggctgtggcacaagccaaagagagagaaagccgggaggtgactacatatctgtag

SEQ ID NO: 211209 - DNA, 2502 bp, synthetic construct
  misc_feature 1..2502: note = Description of Artificial Sequence: Synthetic coding sequence
  source 1..2502: mol_type = other DNA
atgcaccagctgttccggctggtgctgggccagaaggacctgagccgcgccggagacctcttcagcctcgatgatagtgaaatcgaggacagtctgacagaagcgctggaacagattaagattatctcatccagtagcgattaccagaccaataacaacgaccaggctgtcgtggagatttgcattacgcgaataacaacagccatacgcgagacagagagtattgaaaaacatgctaaggctttggtgggtctctgggactcctgtctagaacataaccttcgccctttcggcaaggacgaggataccccccacgctaaaatcgccagcgatattatgagctgtattttgcaaaattataacaggcctcccgtcatggctctcgcaatccctatcgcagtaaaattcctgcaccgggggaataaggagctgtgcaggaatatgagtaactacctcagtctcgcggccattaccaaggccgacctgctcgccgaccacacagaagtgatcgtgaaaagcattctgcagggcaacacaatgctgctccgcgttctccccgccgtgtacgagaagcaaccacagcctattaaccgccatctgacagagttattggccctgatgtcacaactcgagcaacccgaacaatatcacctgctgcgccttctgcatgtggctgccaagaaaaaacagctcgaggtggtccagaagtgcataccattcttgataggccatcttaaagacagtactcacaacgacataatcctcaacatccttattgaaatcgcggtttacgagcccgtcgcgctgaattccttcctcccgatgctcaaagaaatcggcgagagatttccttacctgaccgggcagatggctcgtatctatggggcagtggggcatgttgatgaagagagggccaggagctgtcttacctatctcgtgtcccagctggcaaacatggaacactcttttcaccacattctgctactggagatcaaaagcatcactgacacttttagcagtattctcggtccccagagccgcgacatctttagaatgagcaactctttcacagcgattgccaaactgctaacccgccagcttgaaaacacaaaggccggttcaggtcggaggaaaattagtacagagatagaattccctgaaaagctggaggagacaaaactgatcgtgactgagaacgaagaccacgaaaagctgcaggtgaaaattcaagcattcgaggataaaattaacgccggctccaatacccctgggtcaatccgacgctactctctcggccaggtctccaaggaagagcggaaaaatatcagatttaaccgctctaagtccctggcctttcatacgatgcttactaagggtgtcgggtcggatgatggcgaggatgaaaatcggggagatataccagcctccatctctctctccgagatcgatcctttgggacagggaaatgataagctcccttttaagacggacacagaacgttcccagctcggagagagcagcgtgtcctatcccaacatcatacatatcgactccgaaaacctctcagaaacagtcaaggaaaattcccaggaggagactccggaaaccacagcctctcctatcgaataccaggataagctgtatcttcacttgaagaagaacttaagcaaggttaaagcctatgccatggaaattggcaaaaagatcccagtacctgatcaatgcacaatcgaggacacagtcagaagttgcgtggcgaagctcttcttcacgtgttccctgaaggggcattactgtctgtattctaagtcaagctttatactgatttcccaggaacctcagccctggattcaaatcatgtttctttttcagcaaagcctgttcccagagccacttagcatccagtcccactctgttcagttccttcgggctctctgggaaaagactcaggccgggggcgcccattccttcgagacggccatgatggagtccacgttcccccaacaaaaggacctggaccaggtacagttacatttggaagaagtccggttctttgacgtcttcggtttcagcgagaccgccggggcctggcaatgcttcatgtgtaataatcctgagaaagccaccgtcgtcaatcaggacggccagcctcttatagaaggaaaactgaaggagaagcaggttcggtggaaatttataaagaggtggaagacccggtacttcacgctggcagggaatcagttgctctttcagaagggaaagagcaaggatgaccccgacgactgccccatagagctgagtaaagtccagtcagtaaaggctgtcgcgaaaaagcggagagatagaagcctaccccgcgcatttgaaatatttacggataataaaacttatgtgttcaaggcaaaggacgagaaaaatgccgaggagtggctgcagtgcatcaatgtcgccgtcgcccaggccaaagagagagagagtcgcgaagtcaccacatacttatag

SEQ ID NO: 211210 - DNA, 2367 bp, synthetic construct
  misc_feature 1..2367: note = Description of Artificial Sequence: Synthetic coding sequence
  source 1..2367: mol_type = other DNA
atgcaccagctgttccggctggtgctgggccagaaggacctgagccgcgccggggacctgttttcgttggacgatagcgaaatcgaggattctttaacagaagccctcgaacaaattaaaatcatctcctcgtcatctgactaccagacaaacaataatgatcaggccgttgtggagatttgcataacaaggatcactaccgcgattagggaaaccgagagcattgagaaacatgccaaggccttagtcgggttatgggactcatgccttgaacataacctcagaccatttggcaaagatgaagacaccccacatgctaagattgccagcgacatcatgtcgtgcattctccagaattacaaccgcccacctgtgatggcgcttgccattcctattgcagtcaagttcctccacagaggtaacaaggaactatgccgaaacatgtccaactatctcagcctggccgccatcacgaaagccgatctgctcgccgatcacacagaagtgatcgtgaagtctattttacagggcaataccatgctgctgcgcgtactaccagctgtttacgaaaagcaacctcagcccatcaaccggcacctgacagagctactggctctgatgtcacagctggagcagcccgagcagtaccacttgttgcgcttgctgcatgtcgcagcgaagaaaaagcagctggaggttgttcagaagtgcattccttttctgataggccacctaaaggatagcactcataatgatattattctcaatatactgattgagatcgcggtatacgagcccgtcgctttaaactcattcctgccgatgttgaaagagatcggcgagaggtttccatacctgaccggtcaaatggcacgaatctatggtgctgtgggtcatgtagacgaagagcgggctcgctcttgtctgacctacctggtgtctcaactcgccaacatggaacattcttttcaccacatactattgttagaaatcaaaagtataactgatacttttagcagcatcctaggcccgcaatcccgagacatattcagaatgtctaacagctttaccgccattgcaaaactgttgacccgacagctggagaacaccaaggccggatccgggcggcggaagataagcactgagattgaattccccgagaagctggaggaaactaagttgatcgtgaccgagaatgaggaccacgagaaattgcaggtgaaaatacaggcttttgaagacaagattaatgcgggatccaatactcctgggtcaattcgcaggtattcacttgggcaagtgtcaaaggaagaaaggaagaacattcgcttcaacagatctaagtctctggccttccacaccatgcttaccaaaggcgtcggcagcgatgatggagaggacgagaatcggggggatattcctgctagtatctcgttaagtgaaatcgaccctctcggacaaggaaatgataaactgcccttcaaaaccgataccgaacgttctcagttaggcgagagtagcgtgtcctatccaaatataattcatattgattccgaaaacctttctgagaccgtgaaggaaaactcccaggaggagacccccgagacaactgcctctcctatcgaataccaggacaagctttatctccaccttaaaaagaatctgagcaaggttaaggcatacgctatggagataggcaagaagatacctgtgcctgatcagtgtactatagaagataccgtgcgaagctgcgtggcaaagctgttttttacatgctctctgaaaggccactattgcctctactccaaatctagtttcattctgatatcccaggaacctcagccttggatacagattatgtttcttttccagcaggacttagatcaggtccagctccatctcgaagaggttcgatttttcgacgtgtttggtttctctgagacagctggggcgtggcaatgcttcatgtgtaacaatcccgaaaaagccactgtggtgaatcaggacgggcagcccttgatcgaagggaagctgaaggaaaagcaggtgagatggaaatttattaagcggtggaagacccggtacttcacactcgctggcaaccagttgttgttccaaaagggcaaaagtaaggacgaccctgacgactgccctattgaactgagcaaggttcaatctgtgaaagccgttgccaagaagcggcgcgaccgcagtctgccccgggcattcgaaattttcacagacaacaaaacctacgtatttaaagccaaggatgagaagaatgccgaggaatggttacagtgtataaacgtggcggtcgcgcaggcgaaagagcgggagagtcgggaggtcacaacttatctgtag

SEQ ID NO: 211211 - DNA, 192 bp, synthetic construct
  misc_feature 1..192: note = Description of Artificial Sequence: Synthetic coding sequence
  source 1..192: mol_type = other DNA
atgcaccagctgttccggctggtgctgggccagaaggacctgagccgtgccggagatctgttttctctggacgactcagaaatcgaagacagtctaacagaggcactggagcagataaagattatcagttcatcctcagactatcaaacgaataataacgatcaggccgtggtggagatatgcatcacatag

SEQ ID NO: 211212 - DNA, 642 bp, synthetic construct
  misc_feature 1..642: note = Description of Artificial Sequence: Synthetic coding sequence
  source 1..642: mol_type = other DNA
atgcaccagctgttccggctggtgctgggccagaaggacctgagccgggcaggcgacttgttctccctggacgattcagaaattgaggatagcctgacagaggctcttgaacaaataaagataataagctcatcttctgactatcagactaacaataacgatcaagccgtggtggagatttgtatcactcggatcacaaccgccatccgggagactgagtctattgaaaaacatgccaaggccttggttggcctgtgggactcttgcctggaacataacctgcgtccctttggtaaggatgaggacacccctcacgccaagattgcatcagatattatgtcgtgcattttacagaattataataggccaccagtgatggctctggctattcccatcgccgtgaaattcctccacagggggaacaaggagctttgtcgaaacatgtctaactatctgagcctcgctgctattactaaggcagatttacttgccgaccacacggaagtgatcgtcaagagtattctacagggaatggtgcgaaaactgtctctgggaacatgcttcggcaggtaccttaaggtgttcagttcctccatatatggcttgtgggaggcaagacctagagttctcgaggctaattag

SEQ ID NO: 211213 - DNA, 498 bp, synthetic construct
  misc_feature 1..498: note = Description of Artificial Sequence: Synthetic coding sequence
  source 1..498: mol_type = other DNA
atgcaccagctgttccggctggtgctgggccagaaggacctgagccgggcgggagatcttttcagcctggacgactctgagattgaggattcactcaccgaagcccttgaacagatcaaaattatctcatcctcgagtgattatcagaccaacaacaacgaccaggccgtggtggagatttgtatcaccagaattaccaccgctattagggagactgaatccattgaaaaacacgccaaggccctggtggggttatgggactcatgcctcgaacataatctgcgaccgttcggaaaggatgaggacaccccacatgcaaagattgcaagtgacatcatgtcatgtatcctgcaaaattataacagaccccccgtcatggcactggctatccctatcgccgtgaaattccttcatagaggaaacaaggagctctgccgcaatatgagcaactacctttctttagcagcaatcaccaaggccgacctcttggctgactag

SEQ ID NO: 211214 - DNA, 168 bp, synthetic construct
  misc_feature 1..168: note = Description of Artificial Sequence: Synthetic coding sequence
  source 1..168: mol_type = other DNA
atgcaccagctgttccggctggtgctgggccagaaggacctgagccgggctggggacttgtttagtctggatgatagcgaaatcgaagactctttgacggaggccctggaacagattaaaattatctcttctagttcagactatcagactaataataatgatcagtag

SEQ ID NO: 211215 - DNA, 642 bp, synthetic construct
  misc_feature 1..642: note = Description of Artificial Sequence: Synthetic coding sequence
  source 1..642: mol_type = other DNA
atgcaccagctgttccggctggtgctgggccagaaggacctgagcagagcaggcgatctctttagtctggatgattcagagattgaggattcgcttactgaagctttggaacaaatcaagattatctcatcctcctctgattatcagacaaacaataacgatcaggccgtcgtcgaaatttgcatcactagaattacaacggccatcagagagacagaatcaatcgagaagcacgctaaagcactggtgggtctctgggactcatgtttagagcacaacttgaggcccttcggaaaggatgaagatacccctcacgccaaaatcgcatctgatattatgtcttgtattcttcagaattataaccgacccccagtgatggcactcgccatacccattgccgtgaaatttctgcatcgggggaataaggagttatgtcgcaatatgagcaactacctgtctttggccgccatcacaaaagccgacttgctggccgatcatacggaggttatcgttaagtccatcctgcagggcatggttcgcaaactcagtctcgggacatgttttggcagatatctgaaggtcttcagctctagcatctatggactgtgggaggcccgacctcgggtcttagaggctaattag

SEQ ID NO: 211216 - DNA, 534 bp, synthetic construct
  misc_feature 1..534: note = Description of Artificial Sequence: Synthetic coding sequence
  source 1..534: mol_type = other DNA
atgcaccagctgttccggctggtgctgggccagaaggacctgagccgagccggggacctgttttccttggacgactccgaaatcgaggattcactgaccgaggcgctcgagcagattaagattatttccagctcatctgactaccagaccaataataatgaccaggcggtggtggaaatttgtatcaccaggataactacggcaatacgtgagactgagtcgatcgagaaacacgccaaggcactggtcggcctgtgggatagctgcctggagcacaatctgaggccatttgggaaagatgaggacaccccacacgccaaaatagctagtgacattatgtcttgcattttacagaattataatcggcccccggttatggcactcgccatccccatcgccgtgaagtttttacaccggggaaacaaggagctttgtcgaaacatgtcgaactatctgtccctggccgcaattactaaagcagacctcttggcggatcacacggaggtgattgtgaaatccatcttacaggtgtag

SEQ ID NO: 211217 - DNA, 2367 bp, synthetic construct
  misc_feature 1..2367: note = Description of Artificial Sequence: Synthetic coding sequence
  source 1..2367: mol_type = other DNA
atgcaccagctgttccggctggtgctgggccagaaggacctgagccgggccggggatctgttttcactggatgatagtgaaatagaggattcactgaccgaggctctggaacagattaagattatctctagctcaagcgactaccagactaataacaacgatcaggcagtggtcgagatttgcatcaccaggattacaacagctatccgggaaacagagtcaatcgaaaaacatgcaaaggcgctcgtcggactctgggattcctgtcttgaacacaatctcaggccgttcggaaaggatgaagacaccccacatgctaaaatagctagtgacatcatgtcatgtattttgcagaattataatcggcctcctgtcatggctctcgcaattccgatcgcagtgaagttcctgcatcgcgggaataaggaactgtgccgaaatatgagcaactacttgagcttagccgccattacaaaggccgacttgctggcagatcataccgaggttattgtcaagagtatcctgcagggtaataccatgctcctgcgcgtgcttccagccgtgtatgagaaacaacctcagccaattaaccgccacctcacagagctgctcgccttgatgtcacagctcgagcagcctgagcagtatcatctgcttcgcctcctccatgtcgcagctaaaaagaagcagcttgaagtggttcagaaatgtatccctttcctgataggccacctgaaagactcaacacataacgatatcattctaaacattctcatcgagatcgctgtttacgagcccgtggcattgaattctttcctgcctatgctgaaggaaatcggtgagcgctttccatacttgactggccaaatggctagaatttacggtgctgtcggacatgtcgacgaggagagggcccggtcatgtttaacgtacctagtgtcgcagttagccaatatggagcattcattccaccatattctgctcctggagattaagtcaattacagataccttttccagtattctcggcccgcaaagtcgggatattttccggatgagcaattcattcaccgccatcgcgaaacttcttacacggcagctcgaaaacaccaaggcaggctccggtagaagaaagatctccacagagattgagttcccggagaagttggaggaaacgaagctcattgttactgagaacgaggaccacgagaaactccaagtgaaaatccaggcctttgaggacaaaattaatgcgggtagtaatacaccaggctcgatacgcaggtacagccttggccaggtaagcaaagaagagaggaaaaatatacgctttaatcggtctaagtccctggctttccacaccatgctgactaagggcgtgggcagtgacgacggcgaagatgagaatcgcggggatatacctgccagcatctccctgagtgagatagatccgctgggccaggggaacgacaagctcccattcaagacagacaccgaacgctcacaactgggcgagagctcggtgtcctaccctaatataatccacattgatagcgagaacttatcggagaccgttaaggaaaactctcaggaggaaacccctgagaccaccgcttcacccatcgagtaccaagataaattgtatctccaccttaaaaaaaacctgtcaaaggtcaaggcatacgctatggaaatcggcaagaaaatcccagttcctgaccagtgcacgatcgaggatactgtcagaagctgtgttgctaagttattcttcacttgcagtctgaaagggcactactgtctgtattcaaagagcagcttcatacttatttcccaggagccccaaccttggatccagatcatgtttctgttccagcaggatctggaccaggtgcaattgcatctcgaagaggtgagattcttcgacgtgtttggcttttctgagaccgctggggcttggcaatgcttcatgtgtaacaatccagagaaggcaactgtagtcaatcaggatggacagccactgattgagggtaaactgaaggaaaaacaggtccgctggaagtttatcaaacgttggaaaacacgctatttcacactggcaggcaatcagctgctgtttcaaaaaggtaaatctaaggacgaccctgacgattgcccaattgagttatcaaaggtgcaatctgtcaaagctgtggctaagaagcgtagggacaggagcctgcctagagcttttgagatttttactgataacaagacttatgttttcaaggctaaggatgagaagaacgcagaagaatggttacagtgcataaacgtggccgtcgctcaagccaaagaaagggagagccgcgaagtgaccacgtatttgtag

SEQ ID NO: 211218 - DNA, 3768 bp, synthetic construct
  misc_feature 1..3768: note = Description of Artificial Sequence: Synthetic coding sequence
  source 1..3768: mol_type = other DNA
atggagctggccgccctgtgccggtggggcctgctgctggccctgctaccccccggggcagcctccacgcaggtgtgtaccgggactgacatgaaactgaggctgcctgcctcccccgaaacccatctggacatgctccggcatctttaccaggggtgccaggtggtgcagggcaatctcgaactcacctatctgcccacaaacgcgagtttatcgtttctgcaggacatacaggaagtccagggatacgtactaatagcccacaatcaggtccgtcaggtgccgcttcagcggctgcgtatagtgaggggaacccagttatttgaggataattacgcattggcagttctcgacaacggagatccactgaacaatacaacacccgtcactggagcctccccaggtgggctaagagagttacagctcaggtccctgaccgagattctgaaaggaggagttctgatccaaaggaaccctcagctttgctaccaagacaccatattgtggaaggacatcttccacaagaacaatcagctggcattgaccctaattgataccaaccgctctagggcttgccacccttgctccccaatgtgtaagggtagtcgctgttggggggaatcttctgaggattgccaaagcttaactaggacagtctgtgccggcggctgcgcaaggtgcaaaggacccctgcccaccgattgctgtcacgagcagtgcgcagcgggctgtacgggcccaaagcactctgattgcctggcctgtcttcattttaatcactccggaatctgtgagttacactgtccggccctagttacctataacacggacaccttcgagagtatgccgaacccagagggacggtacaccttcggagccagttgtgtgacagcctgcccctacaattacctgagtaccgatgtaggttcgtgcacactcgtttgccccctccacaaccaggaggtgaccgccgaggatggtacccaaagatgtgagaagtgtagcaagccttgtgcacgggtatgttacggcctggggatggaacatctgcgcgaggtgagggcggttacttcagccaacatccaggagtttgccgggtgcaagaagatcttcgggagcctcgcctttctacccgagtcctttgacggtgaccccgctagtaacactgcccccctgcagcccgagcagctacaggtgtttgagactttggaggagatcaccggatatttgtatatatccgcttggccagattcgctccccgacctatcagttttccagaatctccaggtgatccggggaagaatcctccataacggggcgtactcattgacgctgcagggactggggatctcatggttaggcctgcggagtttaagagagctcggatctgggctcgctctgatccatcataacacacacctatgctttgtgcatacagtgccttgggatcagctgtttagaaatccgcatcaagctttactgcacaccgccaatcggcctgaagacgagtgcgtgggggaagggctcgcctgtcatcagctttgcgccagaggacactgctggggacccggcccaacacagtgcgttaattgcagccagtttttaaggggtcaggagtgcgtagaggagtgccgagtgctgcagggcctgccacgagagtacgtgaacgctagacattgtcttccttgccaccccgagtgtcagcctcagaacggcagtgtaacttgttttggaccagaagctgatcaatgcgttgcttgcgcccactataaagacccacccttttgcgtggcccgctgccccagtggcgtgaaacctgacctgagctacatgccaatctggaagtttcctgacgaagagggggcatgccagccctgccccattaactgtacccattcatgtgtcgatctcgacgacaagggctgcccggcagagcaacgcgcttcccccctgaccagtattatttctgcagtagtgggaatcctgctagtcgtggtcttaggtgtggtgttcggaatattaattaagaggagacagcagaaaatccgcaaatacactatgcggcgccttctgcaggagaccgaactggtggaacccctcaccccatccggagcaatgccgaaccaagcacagatgaggattctgaaggaaaccgaactgcggaaagtgaaggtactggggagcggcgccttcggcaccgtttataaaggtatatggattcctgacggggagaacgtcaagattccagtggctatcaaggtcttaagagagaacacatcccctaaggcaaacaaagagattctcgacgaggcctatgtgatggcgggggtagggtcgccatatgtgtctcggctactggggatctgtcttaccagcacagtccaattggtgactcagttgatgccttacggatgccttcttgaccatgttagggagaaccgtggcaggctcggatcccaagacctcctgaactggtgcatgcaaattgccaaaggcatgtcctatctcgaagacgttcgcctcgtccaccgagatctggctgctcgtaacgttttggtaaagtcacctaatcatgtgaagataacagattttggccttgcccggctgcttgacatcgacgagactgagtatcacgccgatggtggaaaagtgccaatcaagtggatggccctggaatccattttgcggcgcagatttacacaccagagtgacgtttggagctacggagtgacagtctgggagcttatgacgttcggcgccaaaccatacgacggcatccccgcccgggaaatccccgacctacttgagaaaggagaacgactccctcagccaccaatatgtaccattgacgtgtacatgataatggtgaagtgctggatgatcgactcagagtgccgccccaggttcagagaattggtgagtgaattttctagaatggcccgcgatccacagagatttgtggtgattcagaatgaagatctggggccagcttcacccctggattcaaccttttacaggtcactcttggaggatgatgatatgggggatctggtggacgctgaagagtacttggtaccccagcagggcttcttctgccctgaccctgcgccaggcgctggaggcatggtgcatcaccgacatcgcagcagttccactcgctctggcggaggcgatctgaccctcggactggagccgtccgaggaagaggcaccccggagtcctctcgctccttctgagggcgccggctcagatgtgttcgatggtgatctcgggatgggagcagctaaggggctgcagagtcttcctacccatgatccatctcccctgcagcgatattcagaagatcccacagttcccctgcctagcgagaccgacgggtacgtcgctcccctgacttgtagcccgcagcctgagtatgttaaccagcctgacgtgcgtccccagccaccttctccccgggaaggacctctacccgcagcgagacccgccggtgcgaccctggagcggcccaagaccctcagcccggggaagaatggcgtcgttaaggacgtgtttgcttttggaggggccgtagaaaacccagagtacctgaccccacagggaggtgcagctccccagcctcaccctccaccggccttctcccctgcctttgacaatttgtactactgggaccaggaccctccagaacggggcgcaccgccgtcgaccttcaagggtacccctactgctgaaaatccagagtacctgggacttgacgtgccggtttag

SEQ ID NO: 211219 - DNA, 3678 bp, synthetic construct
  misc_feature 1..3678: note = Description of Artificial Sequence: Synthetic coding sequence
  source 1..3678: mol_type = other DNA
atgaagctgcggctgcccgccagccccgagacccacctggacatgctaaggcacctctaccagggatgtcaggtggtccagggcaatctagagctgacttacctgccaaccaacgcttcactgtcgttccttcaggatattcaagaagtccaggggtatgtgcttattgctcacaaccaagtgagacaagtccctttgcagcggctcaggatagttagagggacacaactgtttgaggacaactacgctctcgcagtcctggataatggcgaccctctcaacaacaccacacccgtgactggagcttcaccaggtggcctcagggaactgcagttacggtccctcaccgaaatcttaaagggcggagtcctgattcaacgcaatcctcagctgtgctaccaagacacaatcctttggaaagatatcttccacaagaataatcagttggccctgaccctgatcgacacaaacagatctcgagcatgtcatccatgcagcccaatgtgtaagggcagcagatgttggggagagagttctgaagattgccagtctctgacaaggactgtatgcgctggggggtgtgcccgatgcaagggcccccttccaactgactgttgtcatgagcagtgtgcagcaggatgtaccggccctaaacatagcgattgtctcgcgtgtcttcacttcaaccacagcggcatctgtgaactgcactgtccggcactcgtgacttacaacacagacacgttcgagtctatgcccaatcctgaggggaggtatacttttggcgcttcatgcgtgaccgcttgcccatataattacctgtccaccgatgtcggttcatgtaccctggtgtgccccctgcataaccaagaggttacagccgaggatggaacccagaggtgcgagaagtgctcaaagccgtgtgcgagagtgtgttacggcctggggatggaacatctgcgggaggtacgggcagtgactagtgctaacatacaggagtttgcaggctgcaagaagatttttggttctcttgcctttctccccgagtcattcgatggagatcccgccagtaataccgcacctttacagccggagcagttacaggtcttcgaaacactggaagagatcacaggctatttatatatcagcgcctggccagacagcctgcccgatttgtcggtgtttcagaatctgcaggtgatacgcggccgaattttacacaatggggcatactccctcacgttgcagggattgggaatctcttggttgggcttgagaagcctgagagaattgggatcggggctagctctgatccaccacaacacccacctttgttttgtgcatacagtgccttgggaccagttattcagaaatcctcatcaagccctgttacatacggccaatcggccagaggatgaatgtgtcggcgagggcttagcatgtcaccagctctgtgctagaggccactgctggggacctggacctactcaatgcgtaaattgtagtcagtttcttaggggacaggagtgcgtagaagaatgcagagtcctgcaaggcctgcccagagaatacgtgaacgctagacactgtttgccctgccacccggagtgtcagccccagaacggttctgtcacctgctttgggcctgaggctgatcaatgcgttgcgtgcgcccactacaaagacccaccattctgcgttgcccgttgtccttccggagtgaagccggacctgtcttatatgcctatctggaagttcccagatgaggagggcgcttgccagccctgcccgatcaactgtacacactcatgcgtcgaccttgacgacaagggctgtcccgccgagcagcgggcttctcctctgacttctataatatcagcggtggttggcatcctgctagttgtggtgcttggcgtggtgtttggcattcttattaaaaggagacagcagaagatccggaagtacaccatgaggaggctcctgcaggaaaccgaactcgtggagcctctaacacctagtggagcaatgcccaatcaggcacagatgcgtattctgaaggagaccgaattacgaaaggttaaagtactggggtccggggcattcggaaccgtatataagggaatctggattccagatggagagaacgtcaagatccctgtggcgattaaggtcctgagggaaaacaccagcccaaaagcaaataaggagattctggacgaagcttacgtgatggcaggagtggggagcccctatgtgtccagactcttgggcatctgtctgacctcaacagtccagctcgtaacacagttgatgccctatggctgtttgctggaccacgtccgcgagaatcggggcaggctcggttctcaagatttacttaattggtgtatgcagattgcaaagggtatgagctacttggaagacgtccgccttgtacatcgggatctggctgcgagaaatgtgttagtcaaaagtccaaatcatgtgaaaattacggactttggtctggcaagactgcttgacatcgacgagaccgagtaccacgctgacgggggcaaggtgcctattaagtggatggctctcgaatccatcctgcgtagacggttcacacaccagtccgacgtgtggtcctatggagtgactgtgtgggagctcatgacatttggagcaaagccctacgacggtatacccgcgagagagattcctgacctgttagagaagggcgagcgactcccgcagccccccatctgtacaatagacgtgtatatgatcatggtgaagtgttggatgatcgatagtgaatgtagaccgaggtttcgggaactcgtcagtgagttctcacgaatggcacgggatcctcaacggtttgttgttattcagaatgaggaccttggaccagcgagccctctggattccactttctaccgaagcttgctggaggatgacgacatgggagacctggtggatgctgaggaatatttggttccacagcaggggttcttttgccccgaccctgccccgggtgcgggcggcatggtgcaccatcggcacaggagcagtagcacaagatccggtggcggcgacctcactctcggcttagaaccttccgaggaagaagcgccccggtctcctctggcccctagcgagggcgccggctcagatgtgttcgacggcgatcttggaatgggggctgccaaaggcctgcagtctctacctacccacgacccttcacctctgcagcggtatagcgaagaccccaccgttcctctccccagtgagactgacggctatgtggctcccttgacttgcagtccccaacccgagtacgtgaaccagcccgatgtccgacctcagcccccctcacccagagagggccctctgcctgcagcacgacccgctggagccacattggaacgccccaaaacactgagtcccggtaagaacggagtcgtaaaagacgtcttcgcattcggcggggctgtggagaatcctgagtacttgaccccacagggcggcgccgccccgcaaccgcatccgccccctgcattttctcccgctttcgataacctgtactactgggaccaggacccgccagaacgaggtgccccccccagcacttttaaaggcacaccaacagccgaaaatccagagtatttgggcctggacgtccctgtatag

SEQ ID NO: 211220 - DNA, 2940 bp, synthetic construct
  misc_feature 1..2940: note = Description of Artificial Sequence: Synthetic coding sequence
  source 1..2940: mol_type = other DNA
atggagctggccgccctgtgccggtggggcctgctgctggccctgctccctccaggggctgcttccacccaggacaactacctatccacagatgttggttcctgcacactcgtctgcccccttcacaatcaagaagtgaccgcggaagatggaactcagcgatgcgagaagtgcagcaagccgtgtgctcgggtttgctatggactggggatggaacacttaagggaggttcgggccgtgacaagtgccaatattcaagagttcgctgggtgtaagaagattttcggtagcctggcatttctcccagagtcatttgatggagaccctgccagcaacacagcaccactgcagcccgagcagctacaggtttttgaaacactcgaggaaatcaccgggtatctatatattagcgcttggccagattccctccccgatctgagcgtgttccagaatctgcaggtcatccgaggtcgaatcctccacaatggagcctacagcctgacactccaggggttgggcattagttggttgggcctgcgtagccttagggagctgggctctgggctcgcactgattcaccacaacacccatctatgcttcgttcatacagttccctgggaccagctttttcgaaatccacatcaggctctgctgcatacagccaataggccagaggacgaatgtgttggtgaaggcctcgcctgccaccagctgtgcgcgaggggacactgttggggacccggtcctacccagtgtgtaaactgttcgcagtttctacgtggacaagaatgtgtcgaagagtgtagggttctccagggactcccacgcgagtatgttaatgcccggcactgccttccctgtcatcccgaatgccagccacagaacgggtcagttacttgcttcgggccagaagctgatcaatgcgtcgcatgtgcccattataaggatcctccgttttgcgttgcacgctgtcccagcggcgtcaagcctgatctgagctacatgccaatatggaaattcccagacgaggaaggggcatgtcagccttgtccaatcaattgcacccattcttgcgtggacctcgacgacaagggctgtcccgctgaacagagggcttctcctctcacttcaattatttccgccgtggtgggaatcctcctcgtggtggtgttgggggtggtttttgggattctcattaagcgccgccagcagaagataaggaagtacaccatgcgtcggcttctgcaggaaacagagctcgtggaacctttgaccccatcgggggcaatgccaaaccaggctcagatgcgaatccttaaggaaacggaactgcggaaagtcaaggttctggggagcggagcctttggaacggtctacaaagggatctggatccccgatggcgaaaacgtcaaaataccagttgccattaaagtcctcagagagaatacaagtcccaaggctaacaaggagatccttgacgaggcatatgtcatggccggggtcggtagcccttacgtgagcagactgctcggcatatgccttacctcaacagtgcagcttgtgactcaattaatgccatatggttgcttattagaccacgtacgagagaaccggggccgtttgggatcccaggacctgctgaactggtgtatgcagatcgcaaagggcatgtcctatttggaggacgtccgcttagttcaccgggacctcgcagctaggaatgtgctcgttaagagccccaaccatgtgaagatcacagatttcggtctggcacgtcttctggatattgacgaaacagaataccatgctgatggcggcaaagtgcccattaagtggatggccctagaaagtattttacggcgccgattcacccaccagtccgatgtctggtcttacggagttacagtttgggaactgatgacttttggcgctaagccttatgacggaatacccgcccgtgagataccagaccttctggagaagggcgaacgtctgccgcagccacccatatgcacaattgacgtctatatgatcatggtcaagtgctggatgatcgacagcgaatgcagacctcgatttagggagctggtgtctgaattttcccgcatggccagagacccgcaacggtttgtggtaatccagaacgaggatctcggccccgcgtcaccgttagacagtacattctacagaagcctcctggaggatgacgatatgggggacctggtggacgccgaggaatatttagtgccccagcaggggtttttctgcccagatcccgcccccggggctggtggaatggtgcaccaccgccatcgaagctcttctaccagaagcgggggcggggacctcacgctggggttagagccctccgaggaggaggcgccccggtcacccttggctccgtccgagggagccggcagtgacgttttcgacggggacctcggtatgggtgccgcaaaggggctacagtcactgccaactcatgatccatcaccactgcaacggtactctgaggacccgactgtgccccttccctccgagacagacggatacgtggctcctcttacttgctctccgcagccagagtacgtgaatcaaccagatgtgagaccacagccacccagccccagggagggaccactgccagccgcccggcctgccggtgccaccctggaacgccccaagacactctcacccggaaaaaacggtgtggtgaaggatgtattcgcctttgggggcgccgtggagaacccggagtacctgactccgcaaggtggggctgctccccagcctcaccctccaccggcgtttagccccgcgttcgataatttatactactgggatcaagaccctcccgaacggggcgcgccgccctccactttcaagggcacacctacagcagagaacccagagtacctcggattggacgtaccggtctag

SEQ ID NO: 211221 - DNA, 1812 bp, synthetic construct
  misc_feature 1..1812: note = Description of Artificial Sequence: Synthetic coding sequence
  source 1..1812: mol_type = other DNA
atgaagctgcggctgcccgccagccccgagacccacctggacatgctgaggcatttgtaccaaggttgtcaggttgtccagggcaaccttgaactgacctatctgcccactaatgccagcctttcgtttttacaagacatccaggaggtccagggatatgtgctgatcgcccataaccaggtgagacaagtccccctccagaggctgaggattgtcaggggtacccaactgtttgaggataattacgccctggctgtattggataatggcgaccctctcaacaatactacgccagtgaccggcgccagtccagggggcctaagagaattgcaactgaggtccctaaccgaaattctgaagggcggagttttaattcagcgcaatccccagctctgctatcaggataccatcctgtggaaggacatctttcataagaacaaccagctggccctgacactcatcgataccaatcgcagcagggcttgccatccgtgctccccaatgtgcaaaggtagtcggtgctggggggagagtagcgaggattgccaaagcctcacaaggactgtgtgtgctgggggatgtgcacgctgtaaaggtcctctgcccacagattgctgccacgaacaatgcgccgccggctgcactggaccaaagcactcagattgtcttgcttgtctccacttcaaccatagcggaatatgcgaattacactgtccagctctcgtcacgtataacacagacacctttgagtcaatgcctaaccctgaggggcgttacaccttcggtgcctcatgcgttaccgcttgtccatacaattacttatctacagatgtcggatcctgcacacttgtgtgccccttgcacaaccaggaagtgactgcagaggacggcacgcagaggtgcgagaagtgctccaagccatgcgccagagtgtgctacgggttgggaatggagcatctaagggaggttcgagctgtaacttcagccaacatccaggaattcgctggatgtaaaaaaatctttggctccctggcctttctgccagagagtttcgatggggaccctgccagcaacaccgccccactccagcccgaacaactgcaggtgttcgagactttggaagagatcacagggtacctgtatatctccgcatggcctgacagcttgccagatctgtcagtttttcaaaacctccaggtgattcggggaagaatcctccacaacggggcttactcccttactttgcagggactgggaatcagctggctggggctacgaagtctgcgggagctcggcagcggattagctttaattcaccataatacccacctttgtttcgtgcatacggtgccttgggatcagctgtttagaaacccccatcaggctcttctgcacaccgccaatcgccccgaggatgaatgcgtcggagagggtctggcctgccaccagttgtgtgcgcgagggcactgctgggggccggggcctacccagtgtgtgaactgttcccagtttctccgagggcaggagtgcgtagaggagtgtcgggttcttcaggggcttcctagagagtacgtaaacgctaggcattgtctgccatgccaccctgaatgtcaaccccagaacggttccgtaacctgcttcggtccagaagccgatcagtgtgtggcctgcgcccactacaaggacccccctttttgcgtggctcgctgtccttctggagtaaagcccgacttgtcctatatgccgatctggaagtttcccgacgaggagggcgcttgccagccttgtcccataaattgtactcacagttag

SEQ ID NO: 211222 - DNA, 3678 bp, synthetic construct
  misc_feature 1..3678: note = Description of Artificial Sequence: Synthetic coding sequence
  source 1..3678: mol_type = other DNA
atgaagctgcggctgcccgccagccccgagacccacctggacatgctgcgccacctctatcaaggatgtcaagtggtgcagggcaatctagagctaacttacctgcctaccaacgctagtctgtcattcctgcaggacattcaggaagtgcaagggtatgtgcttattgctcacaaccaggtgagacaggttcctctgcagcgcctaagaattgtccgaggaactcagctgtttgaggacaactacgcccttgccgttctggataacggggacccgctcaataataccacccctgtaaccggcgccagcccaggtggattgcgggagcttcaactcagatctttgaccgagattctgaagggaggagttctgatccagcggaatccacaactttgctaccaggacacaatcctttggaaggacatcttccataaaaataaccagctggctctgactctcatcgacacaaacaggtcgcgtgcttgtcacccatgtagccctatgtgcaaaggatcacgctgttggggcgagagttccgaggactgtcagagtcttacccgaaccgtctgtgccggcggatgcgctcgatgtaaggggccgctaccaacagattgttgccatgagcagtgtgctgcagggtgtaccggacctaaacattctgactgcctagcatgtctccacttcaatcactcagggatctgcgagttacactgtcccgccctggtgacttataacacagatacatttgaaagcatgcccaatcccgagggaaggtatacatttggagcctcctgcgtgactgcttgtccctacaattatctgtctacagatgtgggcagttgtaccttagtgtgcccgctgcataatcaagaggttacagccgaggatgggacgcagcggtgtgaaaaatgttccaagccatgtgcacgcgtgtgctacggtctgggtatggaacatctgagagaagtgagagcagtcactagcgcaaacatacaagagtttgcagggtgtaagaagatttttggctcactcgcttttctccccgagtcgtttgacggagatcctgcaagcaatactgctccactgcaacctgaacagctccaggtatttgaaacccttgaagaaattaccgggtacttgtatatttcagcctggcccgattctttacctgatttatccgtgtttcaaaacctccaagtgatccggggccgcatacttcacaacggggcctactcacttacgttgcagggcctgggcatcagctggctcgggctgcgctccttacgcgagttgggtagcggcctagcattgattcaccacaacacacacctctgttttgttcacactgtgccatgggatcaactgttccgaaatcctcaccaagctctactgcacaccgccaatcggcccgaagatgagtgcgttggtgagggcttggcatgccaccaactttgtgccagaggccattgctggggaccaggacctactcaatgtgtgaactgcagccagttccttaggggccaagaatgcgtcgaggagtgtagagtactgcaggggctgccacgggaatacgtgaacgcgcgacattgcctgccttgccaccctgaatgccagccccagaatggttctgtcacttgcttcggcccagaggcagaccaatgtgtagcgtgtgcccactataaggatccgcctttttgcgtcgcacgctgcccctcgggcgtgaagcccgacctcagctacatgccaatctggaagttccctgatgaggagggtgcctgtcagccttgccccattaattgtacgcatagctgtgtcgatctggatgataaaggatgtccggcagaacagagggcctctcctctcacctcgatcatcagtgccgtggtaggaatattgctcgtggtagtgctcggcgttgtgttcgggattctgattaaaaggcgccagcaaaagatacgcaaatataccatgcgcagactcttacaggagactgagttggtagagcccctgacgccctctggtgccatgcccaaccaggcccaaatgcgcatcctcaaggagactgagctgcggaaggtgaaagtgctaggttccggggcttttggcaccgtgtacaaggggatttggattcccgacggcgagaacgttaaaatccctgtcgcaatcaaagtcctccgtgagaacacctctcctaaggccaataaggagatattggatgaagcctacgtgatggccggggtgggtagtccctacgtgtcacggctcttagggatttgcctaacttctaccgttcagttggttacccagttaatgccctacggctgcctgttagaccacgtgcgcgaaaacaggggaaggttaggatcacaagatctccttaattggtgtatgcagatcgcaaaaggaatgtcctatttagaagacgtgcgactagtccatagagacttagccgcgaggaacgtgctcgttaagtcccccaatcatgtgaaaatcaccgacttcgggctggcccggctgctggatatcgatgaaacggaatatcacgcggatggcggtaaggtgccaatcaagtggatggctcttgaatcaattctacgtaggcgatttacacaccagagcgatgtgtggtcctacggtgttacggtctgggaactgatgaccttcggagcaaagccttatgatggaatccccgcccgtgagatccccgatctgctcgagaaaggggagcgtctccctcagccaccaatttgtacaattgatgtttacatgataatggtgaaatgctggatgattgacagtgagtgtaggccgcggttcagagaactagtatctgagttcagcagaatggcgcgcgatcctcagcggtttgttgtcatccagaacgaagacttaggacccgccagtccactcgattcgaccttttataggagtttgctcgaagatgatgatatgggtgacctcgtggatgccgaagagtacttagtcccacagcaaggattcttctgtcccgacccggcccccggagcaggcgggatggtccaccatcgtcatcgctctagctcaactcggagcggaggcggcgacttgactctgggcctggagccgtctgaggaggaagccccacggtcccccctggctcctagcgaaggtgccggatcagatgtcttcgatggcgacttggggatgggagctgccaaaggattgcagtctttacctacccacgaccctagccctcttcagcgatactctgaggacccaacggttccgctacctagcgagactgatggatacgtggcacccctaacgtgttcaccgcagccggagtatgtaaatcaacctgacgttagacctcagccaccgagccctcgagaagggcctctgcccgctgctaggcctgccggagctacacttgaaaggcccaagacactgtcccccgggaaaaacggtgtcgttaaagatgtcttcgctttcggaggcgcagtcgagaatccagaatacttgactcctcaggggggcgccgctcctcagcctcatccgcccccagcattttctcctgcgtttgataacctgtactactgggatcaggaccctccagagcggggggcgccaccttctacctttaaagggactccaaccgctgaaaaccccgaatatctggggctggacgtgcccgtgtag

SEQ ID NO: 211223 - DNA, 3723 bp, synthetic construct
  misc_feature 1..3723: note = Description of Artificial Sequence: Synthetic coding sequence
  source 1..3723: mol_type = other DNA
atgccccggggcagctggaagccccaggtgtgcaccggcaccgacatgaaattgcgcctgccagctagtccagagacacacttggacatgctgaggcacctctatcaagggtgtcaagtggtgcagggcaacttagaacttacatacttgcctactaatgcctcactctcatttcttcaggacattcaggaagtgcagggatatgtgctgattgcccacaaccaagtaagacaggtaccattacaacgtctgcggatcgttcggggaacgcagctttttgaagacaattacgccctggccgttctggataacggcgaccccctgaacaacactacacctgttacaggggcatctccgggcggactgcgtgaactccagctcaggagccttactgagatacttaaaggaggggttcttatacaaaggaatccacaactatgttaccaggacaccattttgtggaaggatatctttcataaaaataaccagttggcgctgacactcattgacactaaccgctcgagagcatgccacccctgtagcccaatgtgcaagggctcacgctgctggggggaaagcagtgaggactgtcagagcctcactcggacagtctgtgccgggggctgcgcgcgctgcaagggccctttgccaacagactgctgtcatgaacagtgtgctgctggctgtaccggccccaaacattcggattgtttggcatgcttgcattttaaccacagcggcatctgcgagctccactgtcccgctcttgtaacgtacaacaccgataccttcgagtccatgccaaaccctgaaggccgttacacctttggagcctcttgtgtaacggcttgcccatataactacctgagtacggatgtaggctcttgtactctggtgtgtcccttgcacaatcaggaagtaactgccgaggacggcacacaacggtgcgagaaatgttcaaaaccgtgcgcccgcgtctgctatggcttggggatggaacatctccgcgaggtcagggccgtgacttcagctaatattcaggagttcgcgggctgcaagaaaattttcggctctctggccttcctgcccgagagttttgacggcgatccggcgagcaataccgcaccactccagcctgagcagctccaagtgtttgaaacactggaggagatcacagggtatctgtacatctccgcctggccggacagtctgcccgacctgtctgtatttcaaaatctgcaggtcattagagggaggattctgcataatggcgcctacagcctgactctgcagggactgggcattagttggttaggtctccgctctctgcgagagcttggcagtgggctagccctgatacatcataacacccatctgtgctttgtccatacggtcccatgggatcagttgttccggaacccccaccaggccttactgcataccgctaatcggccagaagacgaatgtgtcggcgaggggttagcctgccaccaactgtgcgcaagaggacactgctggggacccgggcccactcagtgcgtcaattgttcgcagttcctgcgcgggcaggagtgcgtggaggaatgtcgagtgctgcaaggtctgcctagagagtacgtgaatgcccgccactgtctgccctgccaccctgagtgtcagccacagaatggatcagtgacgtgcttcggacccgaagcagaccagtgtgttgcctgcgcccactacaaggatccacccttttgtgtggcaaggtgtccctctggggtcaagcctgacctgtcatacatgcctatttggaaatttcccgatgaggagggtgcatgccagccgtgccctatcaattgtacccattcttgcgttgacttagacgacaagggatgtcctgccgagcaacgtgcttctccactcacgtcaattatttccgcagttgttggcatcttgctcgttgttgtgctaggtgttgttttcggtatcctgattaagcgtaggcagcaaaaaatcagaaaatatactatgagacgtctcctccaggagacagaacttgtggaacccctgactccatctggagctatgccaaaccaggcccaaatgcggattttgaaagagaccgaactccggaaagtcaaggtccttggaagtggcgccttcggcacagtctataagggtatctggattcccgatggggagaacgtcaagattcccgtggcaatcaaggtgttgcgcgagaacacctcacctaaagccaataaagaaatccttgacgaggcttatgttatggctggtgtcggctctccgtatgtgtcccgactcctcggcatttgcctaacctccaccgtgcagttagtcacccaactgatgccctatggctgcctccttgatcacgtccgggaaaaccggggcaggctcggatcccaggatctgctgaattggtgtatgcagattgcaaagggaatgtcctatctggaggatgtacggctggtccatcgggatttggcagcccgcaatgtgcttgttaaatcccccaatcacgtcaagataaccgattttggcttagccagactgttggacatcgacgaaaccgagtaccatgcggatggagggaaggtgccaataaaatggatggcactcgagagcattctccggcgcaggttcacacaccagagtgacgtctggagctacggcgtgacagtgtgggaactcatgacattcggtgcaaagccttacgacggcataccagcaagggagatccctgacctgctggagaagggcgaaaggcttcctcagcctcctatctgtaccattgacgtgtacatgattatggtgaagtgttggatgatagatagcgaatgccggcccagattccgggagttagtctctgagttttccagaatggccagagatccccagagatttgtggtgatccagaacgaagacctcggtccggccagcccgctcgattccacattctatcgctctcttctggaggatgatgatatgggagatctggtggatgccgaggagtatctggtgcctcagcaggggtttttctgcccagatcctgcacccggcgctggcggtatggtccaccaccgccatcgctcttctagcacacgatctgggggcggcgacctgacgctgggactggaacctagtgaggaagaagctccacgttccccgctggctccatccgagggggccggaagtgatgtgttcgatggagatctggggatgggcgccgccaaagggctacagtccctcccgacgcatgacccaagcccgctgcagcgatatagtgaagatcccactgttcctctgccctctgaaaccgacggctacgtggccccgttgacctgcagtccccaaccagagtatgtaaaccaacccgacgttcgcccacagccaccctcccccagagaggggccactgcccgccgcgaggccggctggggcgacattagaaagaccgaaaacactgagcccgggaaagaacggggtggtcaaagatgtattcgctttcggcggggccgtagaaaatcctgaatatctcacaccacaggggggtgccgccccacaacctcaccctccacccgctttcagtccagcttttgacaacctctattactgggatcaggaccccccagagaggggggctcctccgtcaacctttaaaggcacccctactgccgagaacccagaatatctcggccttgacgtgcccgtttag

SEQ ID NO: 211224 - DNA, 2259 bp, synthetic construct
  misc_feature 1..2259: note = Description of Artificial Sequence: Synthetic coding sequence
  source 1..2259: mol_type = other DNA
atgggcaccagcgccctgtgggccctgtggctgctgctggccctgtgttgggcccctagggagagtggtgcgaccggcacaggaaggaaagctaagtgcgagccttcccagtttcaatgcactaacgggcgctgcatcacactgctttggaagtgtgacggagatgaggactgtgttgacggcagcgatgagttggactgcgccccccccacatgtggggcgcacgagttccagtgctctacttccagctgtatcccgataagctgggtatgtgatgacgatgcggactgttcagatcagtcagatgaatccctggagcaatgcgggaggcagcccgtgatacataccaagtgtcccgcatccgaaatacaatgtggctctggggaatgtatccacaagaaatggaggtgtgacggcgatcctgactgcaaagacggatccgacgaagtcaattgtccgtcccgcacatgcaggcccgatcagttcgagtgcgaagacggatcctgtatccacggttcacgacagtgtaacggcatacgggactgcgtagatggctctgacgaggtaaattgcaagaacgtgaatcagtgcctgggccctggaaaattcaaatgccgctccggcgagtgcattgatatctctaaggtctgcaatcaggaacaggactgccgggattggtccgatgaacccctgaaagaatgtcatatcaatgagtgcttagttaacaatggcggatgctctcacatctgtaaagacctagtgataggatatgaatgtgactgtgcggcaggtttcgagctgattgacagaaagacgtgtggtgatatcgatgaatgccagaacccaggcatttgttctcagatttgtattaatctgaagggcggttacaagtgcgaatgcagtagaggctaccagatggatctggctacaggcgtgtgcaaggctgtgggaaaggagccgtcccttatcttcaccaaccgcagggacattaggaagatcggccttgagcgaaaagagtacatccagctggtagagcaactgagaaataccgttgctctcgacgcggatattgctgcacagaaactgttctgggcagacctgagccaaaaggccatcttttcggcatctatagacgataaggtcgggagacatgttaagatgatcgacaatgtgtacaatccagccgctattgctgtcgattgggtgtacaaaaccatttactggaccgatgcggcctccaagacgatctctgtggctacactcgacgggacaaagaggaaatttctattcaacagtgacctcagagaaccggcaagcattgccgtggaccctctctcagggttcgtctattggtccgattggggagagcccgctaaaatagagaaagctggcatgaatgggttcgataggagacctctcgtgaccgccgatatccagtggcctaatgggattactctggatctgataaagtctagactctactggctcgactctaagttgcatatgctatcaagtgtagatttaaacggacaggaccgacgaatcgtgctgaaatctctggagttcctggctcatcctttagctctgaccatcttcgaagatagggtttactggatcgacggggagaacgaggccgtgtacggagccaacaaatttaccggcagcgaactggctaccctggtcaacaatttaaatgacgctcaggacattatcgtctatcacgaattagttcagccatcgggaaagaactggtgcgaggaggacatggagaatgggggctgcgaatacctgtgtctcccagccccccaaataaacgaccacagcccaaaatacacgtgcagctgtccttccggatataatgtcgaggaaaacggaagagattgtcagtccacagctacgacagtgacctacagcgagacaaaggacactaacaccacagagatcagtgcaacatctgggctggttccaggaggcataaatgtgaccaccgcagtaagtgaggtgtccgttccccctaaggggaccagtgcagcttgggccatattgcccctgttgctgctggtgatggccgcggttggggggtatctgatgtggcggaattggcaacacaaaaatatgaagagcatgaacttcgacaaccctgtctacttgaagaccacggaagaggatctatccatcgatatcggccggcacagcgcttctgtgggtcacacatacccagcaataagtgtcgttagcaccgacgatgacctggcatag

SEQ ID NO: 211225 - DNA, 522 bp, synthetic construct
  misc_feature 1..522: note = Description of Artificial Sequence: Synthetic coding sequence
  source 1..522: mol_type = other DNA
atgggcaccagcgccctgtgggccctgtggctgctgctggccctgtgctgggcaccccgcgaatcaggcgccaccgggaccggccggaaagcgaagtgtgaaccttcccagtttcagtgtacgaacgggcggtgcatcacactgttatggaagtgtgatggggacgaggattgtgtggacggcagcgacgagaaaaattgcgttaagaaaacatgtgctgagtccgacttcgtgtgtaacaacggccaatgtgtgccgtcccggtggaagtgtgacggcgaccctgactgcgaggacggttccgacgaatcccctgaacaatgccggaatatcacttgtagtcctgatgagttcacatgctcttccggccggtgcatatctaggaattttgtgtgtaatggtcaggatgattgttcagatggcagcgatgagcttgactgcgcccctccaacctgcggagcccacgagtttcaatgctccacttcttcctgtatacccatctcgtgggtgtgtgatgattag

SEQ ID NO: 211226 - DNA, 2538 bp, synthetic construct
  misc_feature 1..2538: note = Description of Artificial Sequence: Synthetic coding sequence
  source 1..2538: mol_type = other DNA
atgggcaccagcgccctgtgggccctgtggctgctgctggccctgtgttgggccccaagagaaagcggggccactgggactggcaggaaggccaaatgcgaaccatcccagtttcagtgcaccaatggacgttgcatcaccttgttatggaagtgtgacggagatgaagattgcgtggacggctccgatgagaaaaactgcgtcaaaaagacctgtgccgagagcgattttgtgtgtaataacggccaatgcgtgcccagtaggtggaaatgcgatggagaccccgactgtgaagacgggtctgacgagagccccgaacagtgccacatgcgcacctgtagaatccatgagatatcctgtggtgcacacagcacccagtgcatccctgttagctggcggtgtgacggagaaaacgattgtgactctggagaggacgaagagaactgcgggaatattacctgctcccctgacgaatttacatgttcatcagggcggtgcatctcgcgaaatttcgtgtgcaacgggcaggatgattgctccgacggctccgacgaacttgattgtgcaccccctacctgcggcgcccacgagtttcagtgtagcacttctagctgtatccccatctcctgggtatgcgatgatgacgccgactgcagtgatcaatctgacgaatcccttgaacagtgtggcagacaacctgtcattcacaccaagtgccccgcctcagagatccagtgtggctcgggcgagtgcattcataaaaagtggcggtgcgatggagaccctgattgtaaggacggaagcgatgaggtcaattgcccctccaggacttgccgtcccgaccaatttgaatgcgaggatggaagctgcatacatggatcacgtcagtgcaatggcattcgggactgtgtagacggctccgatgaagtgaactgtaaaaatgtgaaccaatgtctcggacccggaaagttcaagtgtagatcaggagagtgcatcgatatatccaaggtgtgtaatcaggagcaggactgtagagactggagtgacgaaccattaaaagaatgtcatatcaatgagtgtttagttaataatgggggctgctcccatatttgtaaagatctcgttattggttacgaatgcgactgcgccgcggggttcgagttaatagaccgcaaaacttgtggggacatcgatgagtgtcagaacccaggcatttgctcccagatttgcataaacttaaaagggggatacaagtgcgagtgtagtcgtggatatcaaatggatctggccacgggcgtctgcaaggctgttggcaaagaaccgagcttgattttcactaaccgtagggatattaggaagattggcttagaacggaaggaatatattcagctcgtcgagcaactgcggaacacagttgccctcgacgcggatatcgccgcccagaaactattctgggcagacctcagccaaaaggcgatttttagcgcatcaatcgacgataaggtaggacggcatgtgaaaatgatcgacaacgtgtacaatccagctgcaatcgccgtcgactgggtctacaagacaatatattggaccgatgcagcctcgaagacgatctccgtggcgactctcgatggaacaaagcggaaattcctgttcaactcagatctaagagagcccgcgagcatcgctgtggatccattgagtggcttcgtgtactggagtgattggggtgagcctgccaagatcgagaaggcaggcatgaacggatttgaccggaggcctctggtgaccgccgatattcaatggcccaatgggatcacgttggacttgatcaaatcccgactctactggttggactccaaactccatatgcttagcagtgtcgatttaaacggccaagatcggaggatcgtcctcaagagcttagaattcctggcacacccactggctttaactatttttgaggaccgcgtgtactggattgatggcgagaacgaagccgtttatggggctaacaagttcacgggaagtgaacttgccaccctggtgaacaacttaaacgatgcccaggatattatagtttatcacgagttagtgcagccttcaggtaaaaactggtgcgaagaggatatggaaaacggcggctgcgaatatctttgccttcctgcccctcagattaacgatcacagccccaaatacacttgttcatgcccatcaggctacaacgtcgaggagaatggccgcgactgccaacgcatcaatgtcactacagccgtctccgaggtcagtgttccacctaagggcaccagcgcagcctgggccattctacctctcttactcctggtaatggctgctgtaggcggctatttgatgtggcgcaactggcaacataagaacatgaagtctatgaacttcgacaaccccgtatacctgaaaacgaccgaagaggatttaagtattgacattggcagacatagtgccagtgtgggtcatacttaccccgctataagcgtggtgtctactgatgatgacttggcatag

SEQ ID NO: 211227 - DNA, 2622 bp, synthetic construct
  misc_feature 1..2622: note = Description of Artificial Sequence: Synthetic coding sequence
  source 1..2622: mol_type = other DNA
atgggcaccagcgccctgtgggccctgtggctgctgctggccctgtgctgggcccctcgggaaagcggagcgaccggtaccggaagaaaggcaaagtgcgaaccctctcagttccagtgcaccaatgggcgatgcataactttgctgtggaagtgcgacggagatgaggattgtgtggatggcagcgacgagaagaattgcgtcaaaaaaacatgtgccgaatccgatttcgtttgcaacaacggccagtgcgtaccctctagatggaaatgcgatggtgatccggattgcgaggacggaagcgacgagtcgcccgagcaatgccacatgcggacttgcagaattcacgagatctcctgcggagcccactccactcagtgcattcccgtgagttggcgatgtgatggagagaacgattgcgacagtggagaggacgaagaaaactgtgggaatatcacctgctctcctgacgaatttacatgctcatccggacgatgtatcagcagaaattttgtctgcaatggccaggacgattgctctgacggctcagacgaattagactgtgctccccctacttgcggagcccacgaatttcagtgttccacctccagctgcatccccattagttgggtttgcgatgatgatgctgactgctctgaccaaagtgacgaatcattagaacagtgtggcaggcaacccgtgatacacactaagtgcccagcatctgagatccagtgtggctccggggaatgcatacacaagaaatggaggtgcgacggggacccggattgtaaggacgggtctgatgaagtgaattgtccatcacggacttgtagacctgaccaatttgagtgtgaagacgggagctgcatacatgggtctcgacaatgtaacgggatcagggactgcgtggacggatcagacgaagtcaactgtaaaaacgtgaaccagtgcctgggtcccggcaaattcaagtgcaggtctggagagtgcattgacatttccaaggtgtgcaaccaggagcaggattgcagagattggtccgacgagccccttaaggagtgtcacataaacgagtgtttggtcaacaatggcggctgcagtcacatttgcaaagatttagttattgggtacgaatgtgattgcgctgctggcttcgagttaatcgacaggaaaacgtgcggggatatcgacgaatgtcagaatcccgggatctgcagtcagatttgcattaatctgaaaggtggttataagtgcgaatgcagtagagggtaccagatggaccttgccacaggtgtgtgcaaggccgttggaaaggagccttcattaatattcacaaaccgccgcgatatccggaaaatcgggttggagcggaaagaatatattcagctggttgaacagctcagaaacactgtggcgcttgacgccgacatcgcagcccagaagctcttttgggcggatctaagccagaaagcaatattcagtgcttctattgacgataaggtcggccgccatgtgaaaatgattgacaacgtgtacaacccagccgccatagctgtagactgggtctataagaccatctattggactgacgcagctagtaaaactatcagtgtcgcaactctggacgggaccaagagaaagttcctatttaactcagatcttcgggagccagccagcattgcagtcgatcctctgagcggcttcgtgtactggtcggattggggcgagcccgccaagatcgagaaggcggggatgaatggattcgaccgacggcccctggtgactgccgatatccaatggccaaacggaattacattggacctcatcaagtcccgcctgtattggctggacagtaagctccatatgctgagttccgtggacctgaatggccaggaccggagaatcgtcctcaagagtctcgaattcttggctcacccccttgcattaacgattttcgaagatagagtgtattggatcgacggcgaaaatgaagctgtctacggggcaaacaagtttacaggcagcgagctggctactctggtgaacaatctcaatgacgcccaggacattatcgtgtaccatgagctggttcagccatccggtaagaattggtgcgaagaggacatggaaaacggtgggtgcgagtacctgtgcctgccagcacctcagattaacgatcatagccccaagtacacgtgttcttgcccttccggatacaatgtagaggagaatggccgcgattgccagtctactgcgacaacagtgacttattcagaaactaaggataccaataccaccgagatttccgccacaagcggcctcgtccccgggggcataaatgtgacaacagccgtaagtgaggtctcggtgccccctaaaggaacttccgccgcctgggcgatcctccccctgttgttactggtcatggccgcggtgggaggttatctgatgtggaggaattggcagcacaagaacatgaagagcatgaacttcgacaatcccgtctacctaaagaccacagaggaagatctttccattgatattggacgtcatagcgccagtgtgggccatacctatccagccatcagcgtcgtgagtacagacgacgacctggcctag

SEQ ID NO: 211228 - DNA, 729 bp, synthetic construct
  misc_feature 1..729: note = Description of Artificial Sequence: Synthetic coding sequence
  source 1..729: mol_type = other DNA
atgagcgacgagcgggaggtggccgaggccgccaccggcgaggacgcgtcatctccaccccccaagacagaggccgcgtctgatccacagcaccctgccgctagcgagggggctgctgctgccgccgcgagcccccccctgttacgttgtttggttctgaccgggtttggcggatacgacaaagtgaagctgcagagccggcctgctgcccctccggcccctggtcctgggcaactgacattgcgtctgcgggcttgtgggctgaattttgccgatctgatggccagacaggggctgtacgaccgcctgcctcccttgcctgtgactcctggcatggagggcgcgggcgtcgttatcgccgttggcgaaggagtaagtgacagaaaggcaggggatcgagtgatggttttgaacaggtcaggcatgtggcaggaggaagtaacagtcccgagtgtgcagaccttccttattcctgaggccatgactttcgaagaggcagctgctcttttggttaattatataaccgcttacatggtgctgttcgattttggtaatctgcagccaggccattctgtgctggtgcatatggcagccggaggagtggggatggcagctgtgcagttgccttattccggcgagtgcgactccgtaaggaacgggctgggccagcaggccaggggtacagagggcgagtggggacatacctcacatagattatctcacgattag

SEQ ID NO: 211229 - DNA, 1182 bp, synthetic construct
  misc_feature 1..1182: note = Description of Artificial Sequence: Synthetic coding sequence
  source 1..1182: mol_type = other DNA
atgagcgacgagcgggaggtggccgaggccgccaccggcgaggacgccagtagcccccctcctaaaacagaagccgcctcagacccccagcacccggctgcctccgaaggagcagccgccgctgcagcatctcctccactcctgagatgcctggtactgacagggttcggaggttacgacaaagtcaagctgcaatccaggccagctgccccccccgctccgggaccaggccagttgactttgagactccgggcatgtggccttaatttcgccgacctgatggcccggcagggtctctatgatagactccccccattaccggtgactcccgggatggagggcgcaggagtggtcatcgcagtgggagagggggtaagcgaccggaaggccggtgacagagtgatggtgctcaacagatccgggatgtggcaggaagaagtgactgtgccgtccgtccagacatttctaattccagaggccatgacgttcgaggaagctgctgcgctcctggtgaattatattacagcctacatggtgttattcgactttggaaacctgcagccaggacactccgtgctcgtccacatggccgctggcggcgtgggcatggcggctgtgcaattgtgtcggactgtggagaatgtcactgtcttcggcaccgcgtcggcctcaaaacacgaggctttaaaggaaaatggcgtcacccaccctatcgattatcacacaacggattacgtcgatgagatcaaaaagatcagtcccaagggcgtagacatcgttatggatccactgggcggtagtgataccgccaaagggtataacctgctgaagccaatgggaaaagtggtgacctacggaatggcgaatctactcactgggccgaagcgaaaccttatggcactcgcacgaacatggtggaaccagttttccgtaactgcactgcagctcttacaagcaaatagagcagtgtgtggatttcacctgggctacctggacggcgaagtggagctcgtgtctggggtggtcgcaaggctgctggctctgtataaccagggacatattaaaccccacatcgatagcgtttggcctttcgagaaggttgctgatgccatgaagcagatgcaagaaaaaaagaacgttgggaaggtgctgctagtgccaggcccagaaaaggagaattag

SEQ ID NO: 211230 - DNA, 780 bp, synthetic construct
  misc_feature 1..780: note = Description of Artificial Sequence: Synthetic coding sequence
  source 1..780: mol_type = other DNA
atggtgctgaaccggagcggcatgtggcaggaggaggtgaccgtgccatccgtgcagactttcctcatacccgaggctatgactttcgaggaagcagcggccctccttgtcaactacattacagcgtatatggtgctctttgactttggcaacctgcaacctggccattcagtcctcgtgcatatggctgccggaggagtgggaatggctgccgtgcaactttgtagaacagtggagaacgttaccgtttttggaaccgccagtgcctcgaagcacgaagcacttaaagagaatggcgtgactcaccccatcgactaccatactacagattacgtggatgagatcaagaagatctcacctaagggggtggacattgtcatggacccactgggcggctcagatactgccaaaggctacaatctgttaaaacccatgggaaaggtggtcacatacggaatggctaatttactgacgggacctaagcggaacctcatggctctggccaggacctggtggaatcagttctccgtcaccgcattacaactgctgcaggctaatcgggccgtctgcggctttcaccttgggtacttggacggtgaagtagagttggtcagcggcgtcgtcgctcgattgcttgcattgtataatcagggccatataaagcctcatattgattctgtgtggccttttgagaaagtcgccgacgccatgaagcagatgcaggaaaagaagaacgtggggaaagtcctgttggttcctggacctgaaaaagaaaactag

SEQ ID NO: 211231 - DNA, 903 bp, synthetic construct
  misc_feature 1..903: note = Description of Artificial Sequence: Synthetic coding sequence
  source 1..903: mol_type = other DNA
atggcccggcagggcctgtacgaccggctgccccccctgcccgtgacccctgggatggagggtgctggcgtggtgatcgccgtgggagaaggtgtttcagaccggaaagccggagatagggtgatggttctcaatagatccggaatgtggcaggaggaggtaactgtccctagcgtacagacctttctgatcccagaggctatgacatttgaagaggccgcagctttgttggtgaactacattacagcatacatggtgttgttcgactttggaaatctacagcccgggcacagtgtgctagtccatatggccgcaggaggggttggaatggctgcggtgcagttatgcaggaccgttgagaacgtgacggtgttcgggaccgcttcagcttccaaacacgaggcactgaaggagaatggggtgactcaccccatcgactaccatacgaccgactatgttgacgagatcaagaaaatttcgcccaaaggtgtggacatcgtgatggatccactcggggggtctgacacagcaaaagggtacaacctcctaaaacccatgggcaaagttgtcacgtatgggatggccaatctcctaactggccccaaaagaaacctgatggctctggcccgaacttggtggaatcagttttccgtgactgccttgcagctgctacaggccaaccgcgccgtatgcggttttcacctaggatatctggatggggaggtcgaactcgtttctggggttgtggctcgtcttctggccttgtacaaccaggggcatataaagcctcacatcgatagtgtctggccctttgagaaagttgctgatgcgatgaaacagatgcaagaaaaaaagaacgtggggaaagtgctgctggttcccgggcccgagaaagaaaattag

SEQ ID NO: 211232 - DNA, 654 bp, synthetic construct
  misc_feature 1..654: note = Description of Artificial Sequence: Synthetic coding sequence
  source 1..654: mol_type = other DNA
atgagcagcgacttcgagggctacgagcaggacttcgccgtgctgacagctgaaattacgtcaaaaattgcgcgcgtgcctcgccttccaccggacgagaagaagcagatggttgccaacgtagagaagcaactcgaggaagccaaggagcttctcgagcagatggatcttgaggtcagagagatacctccccaaagtagaggtatgtacagcaacaggatgcgtagttataaacaggagatgggaaagctagagacggacttcaagaggagtaggatcgcgtactctgacgaggtcagaaacgaactactgggcgacgacggtaactcctccgagaatcaaagagcccaccttttagataacactgagagactagagcggtccagccggcgacttgaagctggttaccagattgcggtcgaaaccgagcagatcgggcaggaaatgctcgagaatctcagccatgaccgcgagaaaattcagcgggcccgggagcggctcagggagacggacgccaacctagggaagtccagtcgcattctcaccggcatgctgaggcgaatcatacagaatcgcatcttgcttgtaatcctcggcataatagtggtaatcacaattctgatggctatcacgttctcagtgagaaggcattag

SEQ ID NO: 211233 - DNA, 612 bp, synthetic construct
  misc_feature 1..612: note = Description of Artificial Sequence: Synthetic coding sequence
  source 1..612: mol_type = other DNA
atgagcagcgacttcgagggctacgagcaggacttcgccgtgctgaccgccgaaattacaagtaagatcgcccgtgtgcctcgcctgccccctgatgaaaagaaacagatggtggcaaatgtggaaaagcagctcgaggaagcgaaagagctgttggaacaaatggacttggaagtgagggagattcccccgcagtctagaggtatgtacagtaatagaatgaggtcttacaagcaggaaatgggaaagttagagactgattttaagaggtctcgaatcgcctattctgatgaggtgcgtaatgagctcctgggcgacgacggcaattccagtgagaatcagcgtgcacatttacttgataacaccgagcgactggaaaggagctccaggcgattggaggctggttaccagatagccgttgaaaccgaacaaatcggtcaggaaatgctcgagaacctcagccacgatagggagaaaattcagcgggcccgggaaagacttagagagacggacgccaatcttgggaagtcctctagaattttgaccggcatgctgcggaggggttgttcagtcaaaaagcaatgtaacctctccctggctcccaaagcttag

SEQ ID NO: 211234 - DNA, 432 bp, synthetic construct
  misc_feature 1..432: note = Description of Artificial Sequence: Synthetic coding sequence
  source 1..432: mol_type = other DNA
atgagcgcccccgcccagccccccgccgagggcaccgagggcaccgctcccggaggcggccccccagggcccccccctaatatgacaagtaatcggcgtctacagcagacccaagctcaggtggaggaggtggtggacatcatacgcgtcaacgtcgacaaggtgcttgaacgggatcagaagctaagcgaacttgatgacagggctgacgcactgcaggccggcgcctctcaattcgagtcatctgcagccaagttgaagcggaagtactggtggaaaaattgtaaaatgatgatcatgctgggcaggtggcagctaactcagtactgccttgtgatgtggagtttcccttcctggactcggcctgaagagggaccaggaggaggccccaagagcaatttggtatctgttcaatacccattcagaaaatag

SEQ ID NO: 211235 - DNA, 354 bp, synthetic construct
  misc_feature 1..354: note = Description of Artificial Sequence: Synthetic coding sequence
  source 1..354: mol_type = other DNA
atgagcgcccccgcccagccccccgccgagggcaccgagggcaccgcccccggtggtggcccacccggacctcccccaaacatgacatcaaacaggaggctccagcagactcaggctcaggtggaagaagtggttgacatcatccgggtaaacgttgacaaggtgctcgagagggatcagaagctatctgagctcgacgatagggcagacgccctgcaggctggcgcttcacaatttgaatccagcgccgctaagctcaagcgtaagtattggtggaaaaattgcaaaatgatgattatgttgggagccatttgtgccattattgtcgtggtcatcgtgtccaaatatagatag

SEQ ID NO: 211236 - DNA, 357 bp, synthetic construct
  misc_feature 1..357: note = Description of Artificial Sequence: Synthetic coding sequence
  source 1..357: mol_type = other DNA
atgagcgcccccgcccagccccccgccgagggcaccgagggcaccgctcctggaggcggcccgcccggcccaccccctaacatgactagcaatcgcagacttcaacagactcaggcccaggtggaggaggtggtggatataatccgtgtcaatgtggacaaggtcctcgaaagagaccaaaagcttagtgaattggacgacagagcagacgccctgcaggccggggcgagtcagttcgagagtagcgctgccaaactcaagcgaaaatactggtggaaaaactgtaaaatgatgatcatgctgggcgccatctgtgcaattatcgtggtggtgattgttatctacttctttacctag

SEQ ID NO: 211237 - DNA, 744 bp, synthetic construct
  misc_feature 1..744: note = Description of Artificial Sequence: Synthetic coding sequence
  source 1..744: mol_type = other DNA
atgagcgcccccgcccagccccccgccgagggcaccgagggcaccgcccctggtgggggtccacctggtcctccaccaaacatgacgtcgaatagaaggcttcaacaaacgcaggcccaggttgaggaggtcgttgacatcattcgagtgaacgtggacaaagtgttggaaagagaccagaagctctctgagttagacgaccgcgccgatgcactacaggccggcgcctctcagtttgaaagcagtgcagctaagcttaaaagaaaatactggtggaagaactgtaagatgatgatcatgctcggcgcgatctgtgctatcatagtcgtagtgattgtgatctacttctacttgaggatgtaccatccatttcctgtggtacattgccacccacatagctgcccactgccctctgtatgcagtctcaacactctgccacaccctcctagcagcattcccgcccaggctagtcccagccccatcccacctttttcccttcgaagttttgcgctgtgtccctctacattagagatgctgttagtggcccaaagcaagagtctccccgaggaacagcagctggcccccccgccctgtctgcttttcctttacagtcaggtaccaccgaagccgcagagagttggcgggcagggaaaaggtcaggggggagaatggctccggcgatccacgcatgaggctgcgcagacatgggaggaaaagtctatcggggcacatggggatttttag

SEQ ID NO: 211238 - DNA, 351 bp, synthetic construct
  misc_feature 1..351: note = Description of Artificial Sequence: Synthetic coding sequence
  source 1..351: mol_type = other DNA
atgagcgcccccgcccagccccccgccgagggcaccgagggcaccgcccctggcggcggaccacctgggccacctcccaacatgacctccaacagacggcttcaacaaactcaggcgcaggtggaagaggtcgtagatatcatcagagtgaatgtagataaggtgctggaaagagaccagaaactctccgaactagatgatcgagctgacgccctccaggccggggccagtcagtttgagagcagcgccgctaagcttaagaggaagtactggtggaaaaactgtaagatgatgatcatgcttggagcaatctgtgccattatcgtagttgttatcgttcggcgggactag

SEQ ID NO: 211239 - DNA, 351 bp, synthetic construct
  misc_feature 1..351: note = Description of Artificial Sequence: Synthetic coding sequence
  source 1..351: mol_type = other DNA
atgagcgccaccgccgccaccgccccccccgccgcccccgccggcgaaggcggcccacctgcccctccacctaatctgacatcaaatagacgactgcagcagacacaggcccaggtggatgaagtggtggatattatgcgggtgaatgttgacaaagtcctggaacgggatcagaaactgagtgagctcgacgaccgtgccgacgcgctgcaggccggtgcctcccaattcgaaactagcgctgccaagctgaagcgcaagtactggtggaagaatcttaaaatgatgatcattctgggggtcatctgtgctattatcctgataataataattgtgtacttctctacatag

SEQ ID NO: 211240 - DNA, 303 bp, synthetic construct
  misc_feature 1..303: note = Description of Artificial Sequence: Synthetic coding sequence
  source 1..303: mol_type = other DNA
atgagcaccggccccaccgccgccaccggcagcaaccggcggctgcagcaaacccagaaccaggttgatgaggtggtcgatataatgagggtcaatgtcgacaaggtgctagagcgcgaccaaaagctctctgaactcgatgatagggcagacgcccttcaagcaggcgcttcgcaattcgaaacatccgcagctaaactcaaaaggaagtactggtggaagaattgtaagatgtgggcaattgggattaccgtactagtcatcttcattatcatcattatcgtctgggtggtctcaagttag

SEQ ID NO: 211241 - DNA, 351 bp, synthetic construct
  misc_feature 1..351: note = Description of Artificial Sequence: Synthetic coding sequence
  source 1..351: mol_type = other DNA
atggccggcatcgagctggagcggtgccagcagcaggccaacgaggtgaccgagattatgaggaataattttggcaaagtgttagagagaggagtgaaattggccgagctgcagcaaaggagtgatcagcttttggatatgagttctacctttaataagacaacacagaaccttgcccaaaaaaagtgttgggagaacatcagatataggatctgtgtcggactggtggttgtgggagttttgctgattatccttatagttttgctcgtggtgtttctgccccagtccagcgactcttcctccgccccccgaacccaggacgccggcatcgcgtctggaccgggcaattag

SEQ ID NO: 211242 - DNA, 783 bp, synthetic construct
  misc_feature 1..783: note = Description of Artificial Sequence: Synthetic coding sequence
  source 1..783: mol_type = other DNA
atggccatcctgttcgccgtggtggcccggggcaccaccatcctggcaaaacacgcatggtgtgggggaaatttcctagaagtgaccgagcaaatactggctaaaattccatccgagaataacaagctcacttattcgcatggcaactatttgttccattacatctgtcaggataggatagtgtatttgtgtattactgatgatgatttcgaacggagtcgggcattcaatttcttgaatgaaatcaaaaaacgctttcaaacgacatatgggtcccgtgctcagacagcgctgccatatgcaatgaattccgagttctcgtctgtgctggcggcacagttgaagcatcatagcgaaaacaagggactagataaggtcatggagacacaggcccaggttgatgagttaaaggggatcatggtacgcaatattgtatgccacttacagaactatcaacagaaatcatgcagctcacacgtctacgaggaacctcaagctcattattaccaccaccacagaataaactgtgtgcatctctaccactgcttcacgagcctatggtggatttatatggccaagctgtgcgaggaaatcgggaagaagaagctgccacttacgaaagatatgagagagcagggcgtgaagagtaacccctgtgattcctcactgtcccatacagaccgatggtatctccctgtaagcagcacactcttctccctctttaaaatcctttttcatgccagcagattcatcttcgtattaagcacgagtctctttctgtag

SEQ ID NO: 211243 - DNA, 663 bp, synthetic construct
  misc_feature 1..663: note = Description of Artificial Sequence: Synthetic coding sequence
  source 1..663: mol_type = other DNA
atggccatcctgttcgccgtggtggcccggggcaccaccatcctggccaagcacgcctggtgcgggggcaatttcctcgaggtgactgagcagattttagctaaaatcccatccgagaacaacaaactgacttatagccatggcaattatctgttccactacatctgccaagatcgtattgtttacttatgcattacagatgacgatttcgagaggagtcgggcgttcaattttctgaatgagattaaaaaacggttccaaaccacgtacggaagtagagcccagactgcacttccctacgctatgaattcggagttttcgtccgtgctggctgctcaactgaagcaccacagcgagaataagggacttgataaagtaatggagacgcaggcccaggtggatgaactcaaggggatcatggttcgaaacatagatttggttgcacagagaggtgagaggctcgagctgctcatcgacaagaccgaaaatttagtcgatagcagcgtgaccttcaagacaacctcgcgaaacctggccagagcaatgtgtatgaagaatctgaagctgaccattattattataatcgtgagtatcgtcttcatttatatcatcgtgtcaccgttgtgcgggggtttcacatggccaagctgcgtgaagaaatag

SEQ ID NO: 211244 - DNA, 540 bp, synthetic construct
  misc_feature 1..540: note = Description of Artificial Sequence: Synthetic coding sequence
  source 1..540: mol_type = other DNA
atggccatcctgttcgccgtggtggcccggggcaccaccatcctggccaagcacgcttggtgcggaggcaacttcctggaggattttgaaagatccagggccttcaattttctcaacgagatcaagaagcgcttccagacaacctacggcagccgcgcacagaccgccctgccttacgccatgaactctgaattctcatctgtcctcgctgctcagttgaaacatcactccgagaacaaaggtctggataaggtgatggagactcaggctcaggtggacgaacttaaaggaattatggttaggaatatagacctcgtcgctcaacgcggagagagattggagctgttgatcgacaagactgaaaatctcgtggactcttccgtgacgtttaaaactacaagtcggaacttagctcgagctatgtgtatgaagaacctgaaactcaccatcatcatcattattgtatctatcgtgtttatatatatcatcgtgtcacctttatgtggtggcttcacctggccgtcttgcgtgaaaaagtag

SEQ ID NO: 211245 - DNA, 303 bp, synthetic construct
  misc_feature 1..303: note = Description of Artificial Sequence: Synthetic coding sequence
  source 1..303: mol_type = other DNA
atggaggaggccagcgagggcggcggcaacgaccgggtgcggaacttgcagtccgaagtcgagggagtaaaaaatattatgacgcagaacgtggagaggattctagccaggggcgagaatttggaacatctccgtaataagacagaagacttggaggcaaccagtgaacactttaagacaaccagccagaaggtggctcgaaaattctggtggaagaacgtgaagatgatcgtcctgatctgtgtaatcgtctttatcattattctcttcatcgttctgttcgccaccggggccttttcatag

SEQ ID NO: 211246 - DNA, 777 bp, synthetic construct
  misc_feature 1..777: note = Description of Artificial Sequence: Synthetic coding sequence
  source 1..777: mol_type = other DNA
atggaggagatgaagaagaccgccatccggctgcccaagggcaagcagaagcctatcaagaccgaatggaattctcggtgtgtgctatttacctattttcagggagacatcagttctgtggtcgacgagcactttagccgtgcgctctctaacattaagtctccacaggaactcactccatcttcccaatctgagggcgtgatgctgaaaaatgacgatagtatgagtcccaaccagtggcgttactcctcgccatggaccaaacctcagccagaagtgcctgttaccaatagggctgccaattgtaatctgcatgttcctggtcccatggcagttaatcagttctcaccatctcttgctagacgagcctcagtgcggccaggcgaactgtggcatttttctagtctcgctgggacctcaagtctggagccaggatacagtcatccattccctgctcggcacctggtgcctgagccacagcccgacggaaagagggaacccttgctgagccttctgcagcaggaccggtgcctggcgcggccacaggaaagcgcggctcgcgaaaacggaaatcctggacagatagctggatccaccggtttactctttaatctacccccaggctctgttcattacaagaaactgtacgtaagcagagggtctgcttccacaagtctgccgaacgagaccctctcagagctcgaaactcccggcaaatacagcctgactcctccaaatcactggggacatcctcatagatatctccagcatctgtag

SEQ ID NO: 211247 - DNA, 348 bp, synthetic construct
  misc_feature 1..348: note = Description of Artificial Sequence: Synthetic coding sequence
  source 1..348: mol_type = other DNA
atgaagaagaccgccatccggctgcccaagggcaagcagaagcccatcaaaactgagtggaatagccgttgcgtcttgtttacctacttccaaggagacatctcctcggtggtcgacgagcatttttccagagcactttctaacattaagtctccacaggagctaacaccatcaagccagagcgagggcgtaatgctgaagaacgacaaaaagctgtacgtctcaagaggatctgcctcaacatctttgcccaatgagacattgagtgagttggaaacccccggaaagtacagtttaactccccctaatcactgggggcacccacacagatacttgcagcatctgtag

SEQ ID NO: 211248 - DNA, 492 bp, synthetic construct
  misc_feature 1..492: note = Description of Artificial Sequence: Synthetic coding sequence
  source 1..492: mol_type = other DNA
tgaatcagcagcgtggtggacgagcacttcagccgggccctgagcaatattaagtccccgcaggagctcaccccgtcttctcagagcgaaggcgtcatgctcaaaaatgatgattctatgtcccccaaccaatggcggtactccagtccctggacaaaaccccagccagaagtaccagtcacgaacagggcagccaattgcaacctgcatgtcccagggcctatggcagtgaatcaattctccccctcgctcgcacgtagagcttccgtccgtcctggggagctgtggcacttctcctcgctcgctggaaccagctctttggagcctggctatagccacccttttccggctagacatctggtccctgagcctcagcccgatggaaagcataaaaagctctatgtgtctcgggggagtgctagtacttccctgcctaacgagaccctgtccgagcttgagaccccagggaagtatagccttactcctccctag

SEQ ID NO: 211249 - DNA, 183 bp, synthetic construct
  misc_feature 1..183: note = Description of Artificial Sequence: Synthetic coding sequence
  source 1..183: mol_type = other DNA
acccccagcagccagagcgagggcgtgatgctgaagaacgacaagaagctctacgtgtctagaggctctgcctcaacctccttgcccaacgaaaccctgtctgaactggaaacccccgggaaatatagtctgacgccccctaatcattgggggcaccctcaccggtacctgcagcacctgtag

SEQ ID NO: 211250 - DNA, 954 bp, synthetic construct
  misc_feature 1..954: note = Description of Artificial Sequence: Synthetic coding sequence
  source 1..954: mol_type = other DNA
atgagctgcctggacgtgatgtaccaggtgtacggccccccccagccttactttgcggctgcatatacaccctatcatcaaaagcttgcctactattcaaagatgcaagaagcccaagaatgcaatgcatcacctagctcatcaggttccggtagctcatccttcagctcccagactcctgcctccatcaaggaagaggaggggagccccgagaaggagcggcccccagaggcagaatacattaatagtagatgtgtcctgttcacctacttccaaggtgacatttctagcgtcgtggacgagcattttagcagagctctgtcccagccatcgtcctacagccctagttgcacaagttccaaggcacccaggagtagcggcccatggcgcgattgtagcttccccatgagccaacgatcctttcctgcctcattctggaactcagcctaccaggcacccgtgcctccgccgctgggcagcccccttgctactgcccattctgagcttcctttcgccgctgccgatccctatagcccagcggccctgcatggtcaccttcatcagggggccaccgaaccctggcatcacgcgcatcctcaccatgctcatccacatcatccttacgccctgggcggagctctgggagcccaggccgcaccctacccacgccctgccgcagtacacgaggtgtacgcacctcattttgatcctcgctatgggcccctcctcatgccagccgcctctgggaggcccgcaaggctcgcgaccgcgcccgctccagcgccaggttcccctccatgtgagctcagtggcaagggagaacccgccggtgctgcatgggcgggaccaggagggcccttcgcttctccatccggcgatgtggcccagggactcggtctgagcgtggatagtgcacgcagatacagcctgtgcggtgctagccttctctcatag

SEQ ID NO: 211251 - DNA, 432 bp, synthetic construct
  misc_feature 1..432: note = Description of Artificial Sequence: Synthetic coding sequence
  source 1..432: mol_type = other DNA
atgagctgcctggacgtgatgtaccaggtgtacggccccccccagccttattttgccgcagcgtacacgccttaccaccagaagttagcttattactccaagatgcaggaggcacaggagtgcaatgccagtccaagctccagcggctcaggctctagcagctttagctcgcagacaccagcttctatcaaggaggaggaaggctcccctgagaaagaaagaccacctgaggctgaatatatcaatagtcgatgtgttttattcacctatttccagggcgacatcagtagtgtcgtggacgagcatttcagccgggccctgtcgcagccctcctcctattcaccgtcttgtaccagctccaaggctccacgatccagtggtccttggcgggcgaggcgctactccctgtgtggtgcctcccttttatcttag

SEQ ID NO: 211252 - DNA, 963 bp, synthetic construct
  misc_feature 1..963: note = Description of Artificial Sequence: Synthetic coding sequence
  source 1..963: mol_type = other DNA
atgagctgcgccgaggtgatgtaccacccccagccctacggcgcctcacagtacttgcccaatccgatggctgccaccacctgtcccactgcttactaccaacctgctccccagccaggacagcagaaaaaattggccgtgttctccaaaatgcaggattcgcttgaggtgacattgccctcgaagcaggaggaagaagatgaagaggaggaagaggaagaaaaggaccaacctgccgagatggaataccttaattccagatgcgtcctttttacgtatttccaaggcgacatcgggtcagtggttgacgagcacttctcgcgtgctctgggccaggccataaccttgcaccctgagagcgctattagcaaaagtaaaatgggcctcacgccactctggcgagattcctctgccttgtccagccagaggaactcattcccaacttccttctggaccagttcgtatcaaccccctcctgctccatgtctgggcggcgtacatccagatttccaggtgaccggcccacccggcaccttctcagccgcagacccatccccctggcctggacataatcttcaccagaccggcccagccccacctcccgctgtatcggagtcatggccttacccattgacctcccaggtgtccccctcctattctcacatgcatgatgtgtatatgcgccatcatcatccccacgcgcacatgcaccacaggcataggcaccaccaccatcaccatcacccccccgcgggcagcgccttagatccctcttacggacctctactaatgccatctgtacatgccgcaagaatcccagcaccccagtgtgatatcacaaagacggaacctacaacggtgacaagcgcaactagcgcctgggcaggagcctttcacgggacagtggacatagtccccagcgtgggatttgatactggttggtctgcaatggcccggtcatag

SEQ ID NO: 211253 - DNA, 981 bp, synthetic construct
  misc_feature 1..981: note = Description of Artificial Sequence: Synthetic coding sequence
  source 1..981: mol_type = other DNA
atgagctgcgccgaggtgatgtaccacccccagccctacggcgcctctcaatacctgcccaacccaatggcagctaccacgtgtccgacagcgtactatcagccggctccacagcccggccagcaaaagaaactcgccgtttttagtaaaatgcaggattccctcgaggtgacactgccctccaaacaggaggaggaggatgaagaagaggaggaggaagagaaggatcagccagccgagatggaatacttgaacagtcgatgtgttctatttacctattttcagggcgacatagggtccgttgttgatgaacacttcagtcgcgctctcggccaggcgatcacattgcatcctgaatctgcaatttcgaaaagtaaaatgggactgacgcctctgtggcgtgactcaagtgcgttgtctagtcaacggaactcattccctacctcattctggacttccagttaccaacctccccctgctccttgcttagggggagtacatcctgatttccaggtgacaggccctcccggtacctttagtgcggccgaccctagcccatggcccgggcataatctacatcagacaggcccagcgccccccccagcagtgtccgaatcttggccctatcccttgaccagccaggtcagtccttcctactcccatatgcatgacgtatatatgagacaccaccatcctcatgcccatatgcatcaccgccacagacaccatcaccatcatcaccatcctcctgcaggctccgccctggacccctcatatggtcccctcctgatgcctagtgtgcacgctgcaagaattcccgcaccacagtgcgacattactaaaacagagcccaccactgttacctccgcgactagcgcatgggcaggtgcttttcacggcaccgtcgatattgttccgagcgtggggttcgatacggggctccagcatcaggacaaatccaaggagtccccctggtactag

SEQ ID NO: 211254 - DNA, 1326 bp, synthetic construct
  misc_feature 1..1326: note = Description of Artificial Sequence: Synthetic coding sequence
  source 1..1326: mol_type = other DNA
atgaaggccgccgtggacctgaagcccaccctgaccatcatcaagacagagaaagtcgacctggaactgtttccatctccagacatggagtgtgctgatgtgccactcttgaccccctcttcaaaggagatgatgtctcaggccctgaaggctactttttccgggttcaccaaagaacagcagaggctgggaatcccaaaagatccccgccaatggacagagactcatgtccgggattgggtcatgtgggctgtgaatgagttcagcttaaagggcgttgacttccagaagttctgcatgaacggggccgccctgtgtgctttgggaaaggactgctttctagaactggccccagatttcgttggagatattctctgggagcacctggagatcttgcaaaaagaggacgtcaagccctatcaggttaatggtgtgaaccccgcatatcctgagagccgatacacaagcgattattttatttcatatggcattgagcacgctcaatgtgtgccaccaagcgaattttccgagcccagttttataaccgaatcatatcagacgctgcatcctatcagtagtgaagagttgttgtcactgaaatacgagaatgattacccctctgtcatattacgggaccccctgcagaccgacaccctgcagaacgattactttgcaattaagcaggaagtcgtcacacctgataacatgtgcatgggccggacaagtcggggcaaactgggggggcaagacagcttcgagagtattgagtcttacgatagttgcgaccggttgacgcagagctggtcctcgcagagcagcttcaactctctgcagcgggttccatcctacgactcattcgactctgaagactaccccgccgcgctgccaaatcataaacccaagggtacattcaaagattacgtacgggaccgtgccgatctgaataaggacaaacccgtgattcccgcggccgcccttgcaggctatacaggaagcgggccaatccaactttggcaattcttactcgaattactcactgacaaaagctgtcagtcttttatttcctggactggagacggctgggaattcaaactgtctgacccagatgaggtggccaggagatgggggaagcgtaaaaataagcctaaaatgaactacgaaaaattaagtcggggactgcgttactattatgataagaatatcattcacaaaacggcggggaaacggtacgtatacaggtttgtgtgtgacctccagtcactgctcggttacacaccagaagagcttcatgctatgttggatgttaaaccggacgccgatgaatag

SEQ ID NO: 211255 - DNA, 1065 bp, synthetic construct
  misc_feature 1..1065: note = Description of Artificial Sequence: Synthetic coding sequence
  source 1..1065: mol_type = other DNA
atgaaggccgccgtggacctgaagcccaccctgaccatcatcaagaccgagaaagtggatctcgaactattcccttccccggacatggagtgtgctgacgtgcctctgctcactccttcttcaaaggagatgatgagccaggccttgaaagcaaccttttctggatttaccaaggagcagcagcggcttggcatacccaaagatcctaggcagtggaccgagactcatgttcgcgattgggtgatgtgggccgtcaacgaattttctcttaagggtgtcgattttcagaaattttgtatgaacggagctgccttatgcgctctcggaaaggactgctttctggagcttgcacccgatttcgtgggagacatcctctgggagcatctcgagatactgcagaaggaggatgtgaaaccataccaggtcaacggcgtgaaccctgcgtacccagagtccaggtacaccagcgattactttattagctacggcattgaacatgctcagtgtgtccccccttcagagttcagcgagccttccttcatcaccgaaagctatcaaacgctgcatcctatctcatctgaggagctcttgagtctgaaatacgaaaacgactacccatccgtgattctgcgggacccactacaaaccgacacactgcagaatgactattttgcaatcaagcaggaggtggtgaccccagataacatgtgtatgggtaggacatcaagaggatccggccctattcagttatggcaattcctgctggagctcctaactgataaatcgtgtcaatcctttatcagctggaccggtgatggatgggagttcaagctcagcgaccccgacgaggttgccagaaggtggggaaagagaaagaacaagccgaagatgaattatgagaagctcagccgggggctgagatattactatgacaagaatatcattcataagaccgctgggaaaagatatgtatacaggttcgtgtgcgacctgcagagcctcctgggctatactcctgaggagctgcacgccatgctggacgtcaagccggatgccgacgagtag

SEQ ID NO: 211256 - DNA, 1458 bp, synthetic construct
  misc_feature 1..1458: note = Description of Artificial Sequence: Synthetic coding sequence
  source 1..1458: mol_type = other DNA
atgagctacttcgtggacagcgccggcagcagccccgtgccctactctgcccctagaccggctgtggtccgacaggggccatcaaacacctatgaagatcctcggatgaattgcgggtttcagagtaattatcatcaacaacgaccctgctaccctttctgggatgaaatggccacccaggaagtgcccacggggctggagcattgtgtctctgatatggagtgcgccgacgtgccattactcactccgtcgtcaaaggaaatgatgtctcaggcattgaaagctacattctcgggcttcaccaaggaacagcagagattgggcattcctaaggatccaaggcaatggactgagactcatgtgcgagattgggttatgtgggcagtcaatgaattttctctgaagggcgtagatttccagaaattctgcatgaacggggctgctctgtgtgcgctggggaaagattgctttcttgagttggcacccgattttgtgggcgacatcctctgggagcacttggagatcctccagaaagaagacgtgaagccttatcaagtgaacggggtgaaccctgcatatccagaatcacggtatacttccgactacttcatcagctacgggatcgaacacgcccagtgcgtgccaccatccgaattttccgaaccgagtttcattaccgagagctaccagaccttgcacccgattagttcagaagagctgctgtccttgaaatacgaaaatgactatcctagcgtgattcttcgcgatccgttgcagactgacaccctccagaatgactactttgcgataaagcaggaagtggtaacccccgacaacatgtgtatgggacgaaccagcaggggtaagctaggcggacaggactctttcgagtcaatcgagtcatatgatagctgcgacagactcacccagagctggagtagtcagtcgtcttttaactccctgcagcgagtgccttcttatgattccttcgacagcgaggattaccctgccgccctgcccaaccacaagcccaaaggaacctttaaagactatgttcgggatcgggcggacctgaacaaggacaagccggtgatccctgcagcagccctcgccggctataccggaagtgggcctattcagctgtggcagttcctactcgaactgctcactgataagagctgtcagagcttcatcagttggacaggagacgggtgggaatttaaactcagtgatcctgacgaagttgcccgtaggtggggcaaaagaaaaaacaaacccaaaatgaactatgaaaagctctccagaggactgcgatattactatgacaagaacattattcacaaaaccgctggaaagcgctatgtgtatcggtttgtatgcgatctgcagtcattgttgggctacaccccagaagagttacatgccatgctagatgtgaagcccgatgcagacgagtag

SEQ ID NO: 211257 - DNA, 1065 bp, synthetic construct
  misc_feature 1..1065: note = Description of Artificial Sequence: Synthetic coding sequence
  source 1..1065: mol_type = other DNA
atgaaggccgccgtggacctgaagcccaccctgaccatcatcaagacagaaaaggtagacttagagctcttcccttcgcctgacatggaatgcgcagatgtgcccttactgactccaagctctaaggagatgatgagccaggccctcaaagccactttcagtggttttaccaaggagcaacagcggctcggaatccccaaggatccacggcagtggactgaaacccatgtgagagactgggttatgtgggcagttaacgaattctctcttaagggcgtagatttccagaagttttgcatgaatggcgccgccctttgcgccctgggtaaagactgcttcctcgagctagcaccagattttgtgggtgatatcctgtgggagcacttggagattctccaaaaagaagacgtcaaaccataccaggtcaatggagtgaacccagcctaccccgaaagtagatatacttccgactacttcatctcttacggcatagagcacgcccagtgcgtgcctccatcagaatttagcgagccttcatttattactgagtcatatcagactctgcatcctatcagttcagaggaactcctttctctgaagtacgagaatgactatccatctgtgatcctgcgtgaccctctgcagactgataccctgcagaacgattatttcgcaattaagcaggaagtggtcacgcctgacaatatgtgtatgggaagaacatctcggggatcaggtccaatccagctctggcaattccttttagagctactgaccgacaagagttgtcagtcttttatctcctggactggagacggatgggaatttaaactgagtgatccggacgaggtggccaggcgctggggaaaacgaaagaacaagccaaaaatgaattacgagaagctgtcacggggacttcggtactattacgacaaaaacattatccacaagaccgcaggtaagcggtacgtctatagatttgtgtgcgatctccagtctctgctgggctatactcccgaggagttgcatgccatgctagacgtgaagccagacgctgatgagtag

SEQ ID NO: 211258 - DNA, 819 bp, synthetic construct
  misc_feature 1..819: note = Description of Artificial Sequence: Synthetic coding sequence
  source 1..819: mol_type = other DNA
atgaaggccgccgtggacctgaagcccaccctgaccatcatcaagaccgagaaggtcgacctggagctcttcccatcaccggacatggagtgtgccgacgtgccactgttgaccccaagctccaaggaaatgatgtctcaagcgcttaaggcaacatttagcgggtttacgaaagagcagcaacggcttggtatccctaaggatccacgtcaatggaccgaaacacatgtgagagactgggtgatgtgggcagtcaacgagtttagccttaagggagtcgatttccagaagttctgcatgaacggggcggccctgtgcgccttgggtaaggactgtttcttggagctggctccggactttgttggggacattctgtgggagcatctggagattctgcagaaagaggatgttaagccatatcaggtaaatggcgtgaacccagcgtacccagagtcacgctacaccagcgattatttcatatcgtatggaatcgagcacgcccagtgcgttccgcccagtgagttcagcgagcccagcttcatcacggaaagttaccagactcttcatccaatttcaagcgaggaactcctgtccctgaaatacgagaatgattacccctccgtaattctgagggaccctcttcagaccgacacactgcagaacgattactttgctataaaacaggaggtggtcactcccgacaacatgtgtatgggacgcaccagcagaggcaagttaggcgggcaggacagttttgaaagtatcgaaagctacgacagctgcgggcaggagatgggcaaagaagagaaacagacatag

SEQ ID NO: 211259 - DNA, 678 bp, synthetic construct
  misc_feature 1..678: note = Description of Artificial Sequence: Synthetic coding sequence
  source 1..678: mol_type = other DNA
atgaaggccgccgtggacctgaagcccaccctgaccatcatcaagacagaaaaagtggacttagagctcttcccatcgcccggaaagttaggaggtcaggactccttcgaatccatcgagagttacgatagttgtgaccggctcacgcagagctggagtagccagtcatcctttaatagcctgcagagagttccctcttacgattcctttgacagcgaagattatcctgccgctttgcccaaccacaagcccaaaggcacatttaaggattatgtaagagatagggcggacctgaataaagacaaaccggtcatccctgccgccgctctggccggctacacgggcagtggccccatccagctgtggcagtttctcctcgagctgctcacagacaaatcttgtcagtccttcataagctggacaggcgatggatgggagttcaaactctccgaccccgacgaagtagctcgccgatggggtaaacgaaaaaacaagcccaagatgaattatgaaaagctgtccagaggactaagatactattatgacaaaaacattatccataagactgctgggaagagatatgtgtaccgttttgtgtgtgatcttcaaagtctgttgggttacacacccgaggaacttcacgctatgctagatgtgaaaccagacgctgatgagtag

SEQ ID NO: 211260 - DNA, 1848 bp, synthetic construct
  misc_feature 1..1848: note = Description of Artificial Sequence: Synthetic coding sequence
  source 1..1848: mol_type = other DNA
atgaaggccctgcggctgagcgccagcgccctgttctgcctgctgttaattaatgggctgggtgctgcacctcctggccgacccgaggctcagcctccccctctcagtagcgagcacaaggagcccgtggctggggatgccgtccctggaccaaaggatggaagtgccccggaggtgcgtggggcgcgtaacagtgaaccacaggacgaaggggagctattccagggggtcgatcctagggcactggctgcagtgttgttacaagctctcgaccgccccgcctctcccccagctcccagcggctctcaacaaggccctgaggaggaagctgcggaggctcttcttaccgaaaccgtgaggtcacaaacacatagcctgcccgccccagaaagcccggagcccgccgctccgccacgccctcagaccccggagaatggccccgaagcttccgaccccagcgaggagctagaagcgctggcctccctgctgcaggaattgagagattttagcccttcgtcagcaaagagacagcaagaaaccgccgctgcagagaccgagacacggacccacacactgacacgggtaaatcttgaatccccaggtcctgagcgagtctggcgcgcctcctggggtgaattccaggcccgggtccctgaacgggccccactgcccccacctgcccctagtcagttccaggctcggatgcccgatagtggtcccctgcctgaaacccataagttcggagaaggagttagctcccctaaaacccatctcggcgaggctctagcccctctttcgaaggcataccagggagtcgcggccccattccctaaagccaggcgacctgagtctgccctgcttggagggtccgaggctggcgaacgactcctgcagcagggactagctcaagttgaggcaggtcgtaggcaggctgaagccaccaggcaggctgccgcacaagaagaacgactggccgatctagcgagtgatctgcttctccagtatctcctgcagggaggggccagacagcggggtttggggggaagaggactgcaagaagccgccgaggaacgggaaagtgctagagaggaggaggaagccgagcaagagagaagagggggggaagagcgcgtgggggaggaagacgaagaagccgccgaggccgaagccgaggccgaggaggcggagcgcgcccgccagaacgcactcctgttcgccgaagaggaagacggtgaagcgggggctgaagacaaaagatctcaagaggagacaccgggccatcggcgcaaggaagcggaagggaccgaagaaggaggtgaagaagaggacgatgaggagatggatcctcagacaatcgatagcctgatcgagctgagcaccaagctgcatctgccagctgacgatgtggttagtatcattgaggaagtggaggaaaagaggaaaaggaagaaaaacgcgcccccagagcccgtgcctccacccagagcggctcctgcacctacccatgtgcgctctcctcagcctccgccaccggcaccggcccccgctagagacgaactaccggactggaacgaagttctcccaccatgggacagggaggaggatgaggtatacccaccaggcccttatcacccttttccaaattacatcaggccacgaacacttcagccgccctccgccctacggaggcggcactatcaccatgccctcccacccagccggcactaccctgggcgagaagcccaggcgcgacgagcacaggaggaggccgaagcagaggaacggcgcctacaagaacaggaagagctggaaaactatattgagcacgttctgctccgccgcccttag

SEQ ID NO: 211261 - DNA, 1848 bp, synthetic construct
  misc_feature 1..1848: note = Description of Artificial Sequence: Synthetic coding sequence
  source 1..1848: mol_type = other DNA
atgaaggccctgcggctgagcgccagcgccctgttctgcctgctgctaataaatgggctgggagctgcaccacccggccggcctgaggcccagccaccacccctcagctccgagcacaaggaacccgtcgccggagatgcagtgcccggtcctaaggacggttccgcgcccgaggttaggggagccagaaactccgaaccccaggatgagggtgagctgtttcaaggtgtcgatccacgagccctggctgccgtgctgcttcaggcactagacaggccggcctccccgcccgcccccagtggttcccagcaagggccagaggaagaggcggcagaagcactattgacagaaactgtgaggagtcagacccacagtctgcctgctccagagtcccctgaaccagcggcacctccacgaccacagacgcccgaaaacggcccagaagctagtgacccatcagaggagttggaggcacttgctagtttactgcaggaactccgagatttctcaccatcctccgccaaaaggcagcaggagacagccgctgcagagacggagactcgcacacacacgctcacgcgggtaaatctggagagtccaggacccgagcgagtttggagagcaagttggggggagtttcaggctcgggtgccagaacgcgctcctttgcctccgcctgctccatcacagtttcaggcccgcatgccagacagcggaccattacctgagacccataagtttggagagggtgtgtcaagccccaagacacacctcggcgaagccctggctccactgtcaaaggcttaccagggagttgctgccccctttccaaaagccagaaggcccgaatccgccctgctggggggaagtgaagctggagaacgtttgctgcaacaaggtttagcccaggttgaggccggtaggcgccaggctgaagccaccagacaggctgccgctcaggaagagagactggcagaccttgcttcagatctgctgctccagtacctcttacagggcggtgcacggcagcggggtctgggagggagaggtctgcaggaggctgcagaggagcgggaatccgcgagggaagaggaggaggctgagcaggagagacgcggtggggaggaacgtgtcggagaggaggatgaagaggccgccgaggctgaggctgaggccgaggaagccgagcgggccaggcagaatgctctgctgttcgctgaggaggaagacggcgaagctggggctgaagataaacgaagccaggaagagacccctggccatcggcgaaaagaagccgaaggcacagaggagggaggcgaggaggaagatgacgaggagatggatcctcaaacaattgactcgctcatagaacttagtaccaagcttcacctacccgccgacgacgtagtttctataatcgaagaagttgaagaaaagagaaagcgcaaaaagaatgcgccacctgagccagtaccacctccaagagcagcccctgcgcccactcatgtcaggagccctcagccccctccccctgcccccgcgcctgcccgggatgaactgccggattggaatgaggtcctgccaccttgggatagagaagaagacgaagtgtaccctcccggaccataccaccccttccccaactatatcagaccaagaacactccaacccccaagcgctttgcggaggcgacactatcatcatgctttgccaccatctcggcactaccctgggagggaggcacaggctaggagagcccaggaggaagccgaagctgaggaaaggcgcctccaggagcaggaagaactggagaattatatcgaacatgtgttgcttcggcgcccctag

SEQ ID NO: 211262 - DNA, 1134 bp, synthetic construct
  misc_feature 1..1134: note = Description of Artificial Sequence: Synthetic coding sequence
  source 1..1134: mol_type = other DNA
atgaaggccctgcggctgagcgccagcgccctgttctgcctgctgttgatcaatggactgggggcagcccctcctggccgtcccgaggcccaacccccacccctttccagcgagcataaggagcctgttgctggcgatgccgtgcccggacccaaggatggcagtgcccctgaggtgcgcggggcgcggaactcagaaccgcaggacgaaggtgagttgtttcagggcgtggaccctagagccctcgcggctgtgctgctgcaagccttggatcgccccgctagccctcccgcgcccagcggttctcagcagggcccagaagaggaggctgctgaggcactcctgactgagaccgtgcgttcacagactcactccctgcccgcacctgagtctcctgaacccgctgcaccgccacggcctcaaactcccgaaaacggcccagaagctagcgacccctccgaggagctcgaagcgctcgcctctttactgcaggagttaagagatttttcaccctcctctgccaaacggcagcaggaaactgcagccgcggagaccgagacgagaacccacacactcacccgtgtcaacttggagtctcctggtcctgagcgcgtgtggcgggcctcttggggtgagtttcaggcacgagtgcctgaacgggcacctctgcctcccccagcacccagccagtttcaggcgagaatgcccgactccgggcccttgccggagacccacaagttcggagaaggcgtgagttcacctaaaacgcatctgggtgaggccctagccccattgtctaaggcgtatcaaggggtggctgctcccttccctaaggccaggcggcccgagtccgcacttttaggagggtctgaagctggagagcgccttctgcagcagggtctggcccaagtggaagccggccgtcggcaagccgaagctactaggcaagccgctgctcaggaggagcgcctggctgacttggcaagcgatctgttactgcaattcgcagcagggagaggtccagccgctcgtccatgtcccctggcactgccactgagccccgggtgtgttggaacatgccagactcctctcccgggacctgagcctgagttgcctgagcttacgagagggtag

SEQ ID NO: 211263 - DNA, 2484 bp, synthetic construct
  misc_feature 1..2484: note = Description of Artificial Sequence: Synthetic coding sequence
  source 1..2484: mol_type = other DNA
atgaccaagctgagcgcccaggtgaagggcagcctgaacatcaccactccaggtctgcagatttggcgcattgaggcgatgcagatggtcccagtcccaagtagcacgttcggaagtttctttgatggcgactgttatattattcttgccattcacaagacagcttcaagtctgagttacgacatacattactggattggccaagactcttccctagacgaacagggtgcggccgccatttacacaacacagatggacgatttcctgaaagggagggcagttcagcaccgggaagtgcagggcaacgagtctgaagcttttagagggtactttaagcagggcctcgtgatcaggaaagggggggtagcaagcggcatgaaacatgtcgaaaccaactcatatgacgtgcagagattgctccacgtgaagggcaagagaaacgtggtggccggtgaagtcgaaatgtcttggaagagtttcaataggggggacgtttttcttctggatctcggaaagctcatcatccagtggaatggacccgaatccacaaggatggaaaggctcagaggcatgaccttagccaaagaaatccgggaccaagagagaggcggtcgcacatatgtcggagtcgtggatggcgaaaacgaactcgcttctcccaaacttatggaggttatgaatcacgtactgggaaaacggagggagcttaaggcagctgtgcctgacactgtcgttgagcctgcgttgaaggccgccctgaaactttaccacgtgtcagacagtgagggcaatttggtggtacgagaggtggccacacgacccctgacccaggacctgttgagtcatgaagattgttacattctcgatcagggggggctgaagatctacgtgtggaagggcaaaaaggcaaatgagcaggagaagaagggcgccatgagccatgctctgaattttatcaaggccaaacagtatccgcctagcacgcaggtagaggttcaaaacgacggcgcagagtcagccgtgttccagcagttgttccagaagtggactgcctccaacagaacgtctggcttgggaaaaacacacactgtgggcagcgtggctaaagtggagcaggtaaaatttgacgctacgtcaatgcacgtcaagccacaagtggcagcccagcagaagatggtggatgatggctctggagaggtacaggtctggcggatcgaaaatctcgaattagtgcccgtcgacagcaaatggttggggcatttctacggtggagactgctacctactgctgtatacttacctcattggcgagaaacaacactatctactttacgtgtggcagggaagccaagcctctcaggatgagattacagccagcgcatatcaggctgtcattctcgaccagaaatacaatggtgagcccgtccagatccgcgtgcccatgggaaaggagcccccccaccttatgagtatatttaagggcagaatggtggtgtaccaaggaggtacttctaggactaataatctggagacgggtcctagcacaaggctgttccaagtccaagggaccggagcaaataataccaaggccttcgaggtcccagccagggccaactttttgaattctaatgatgtatttgtgctcaagacccagagctgctgttacctctggtgcggaaaaggttgcagcggggatgagcgagagatggctaagatggtggccgataccattagcaggactgagaagcaggtcgtggtggaggggcaggaacccgccaacttttggatggcattgggtggaaaggcaccatatgctaatactaagaggcttcaggaggaaaatctcgtgatcaccccacgcctgtttgaatgcagcaataagaccgggcgttttctcgcaacggagattcctgatttcaatcaggatgatttggaagaggacgacgtgtttctgcttgatgtgtgggatcaggtgtttttctggattgggaaacacgccaatgaggaagagaaaaaggccgctgctaccacagcacaagagtatttaaagacgcacccatcaggacgggacccagagacaccaatcatcgtggtcaagcagggtcatgagccacccactttcaccggctggtttttggcatgggaccccttcaagtggtccaacacgaaatcgtacgaagatttaaaagcagaactcggaaatagtcgtgactggtcccagatcaccgcagaggtgaccagcccaaaagtggatgtcttcaatgccaacagtaacctcagttccggtccactgcctatctttcctttggaacaactggtcaacaagcctgtcgaggaactgccagaaggtgttgatccaagccggaaagaggagcacctttcaatcgaagatttcactcaggcattcggaatgactcctgctgcgttttcggctctgcccagatggaagcagcaaaatttgaagaaagagaagggcttattttag

SEQ ID NO: 211264 - DNA, 1551 bp, synthetic construct
  misc_feature 1..1551: note = Description of Artificial Sequence: Synthetic coding sequence
  source 1..1551: mol_type = other DNA
atgagccacgccctgaacttcatcaaggccaagcagtaccccccctccacccaggtagaggtgcagaacgatggcgcggaaagcgcggtgttccaacaactgttccaaaaatggacagcttctaacaggaccagtggcctgggaaaaacacacacagtggggtctgttgcaaaagtcgagcaggtgaaattcgacgccacttccatgcatgtaaaaccacaggtcgctgcacagcagaagatggttgatgatggctcgggagaggtccaagtgtggcgaatagaaaacctggaactggttcctgtggacagtaaatggctggggcatttctacggaggagactgctacctgctcttgtacacttatctgattggggagaagcaacactacctactatatgtatggcagggttcacaggcgtcccaggatgagattaccgcctccgcttatcaagcagtgattctggatcagaagtataatggggaacccgtgcagattagagtccccatgggcaaggaacctccgcacttgatgagcatcttcaaggggcggatggtggtgtaccaaggcggaacttccaggactaataacctggagacgggccctagcactaggctgtttcaggtgcaaggcacaggcgcaaacaacacaaaggccttcgaagtgccagcaagagccaactttttaaatagcaatgacgtttttgtgctgaaaactcagagttgttgctacctctggtgcggcaagggctgttccggagacgaaagggaaatggcaaaaatggtggcagataccataagcaggacagaaaaacaggtggtcgtcgaagggcaggaacccgccaatttctggatggctttaggcggtaaggcaccatatgccaatactaaacggttgcaagaggaaaacctcgtgatcactccccggctcttcgagtgctccaacaaaaccggacggtttctggccacggaaatcccagactttaatcaggatgatctcgaggaggacgatgtctttctactggacgtctgggatcaggtgttcttttggatcggcaaacacgccaacgaagaagaaaagaaggctgctgcaaccactgctcaggagtatctgaaaacccacccgagcggtcgggatccagaaacaccaataattgtcgtaaagcagggtcatgaacctccaaccttcaccggctggtttctggcctgggacccttttaaatggtcaaatacaaagtcatatgaggacctcaaagccgagctcggcaacagccgcgattggtctcagattacggcagaagtgactagcccaaaagtggatgtgttcaatgccaacagtaatttgagctcaggcccattgccaatattcccgctggaacagctggtgaacaagcccgtggaagagctgccagagggagttgaccccagtaggaaggaagagcacttatctatagaggacttcacacaggcatttggtatgaccccagcggccttctccgcactccccagatggaagcaacaaaatctgaaaaaggaaaaaggccttttctag

SEQ ID NO: 211265 - DNA, 1266 bp, synthetic construct
  misc_feature 1..1266: note = Description of Artificial Sequence: Synthetic coding sequence
  source 1..1266: mol_type = other DNA
atgaccaagctgagcgcccaggtgaagggcagcctgaacatcaccactcctggattgcagatctggaggatcgaggccatgcagatggtccctgtgcctagtagcacatttggttcatttttcgacggcgactgttatatcatactggcgatacataagaccgcatccagcctgagctatgacattcattactggatcggtcaggatagcagcctcgatgaacagggtgcagccgcaatctacaccacgcagatggacgatttcctcaagggtagggctgtacaacatagagaagtgcaaggaaacgagtccgaggctttcagaggctacttcaagcaggggctcgtgattcggaagggtggagttgcgagcggcatgaaacatgtggagacaaattcctacgacgttcagagattattacacgttaaaggcaaacggaatgtggtcgcgggcgaggttgaaatgtcctggaagtcttttaacaggggagacgtctttctcttagacttgggaaagctgattattcagtggaatggaccggagtccacacgtatggaacgactgcgcggaatgaccctggctaaagaaatccgtgatcaagagaggggcgggcgtacttacgttggagtcgtcgatggcgagaacgaactcgcttcgcccaaattgatggaggttatgaatcacgtactcggcaaacgcagagaactgaaggcggctgttcctgacactgtcgttgagcctgccttgaaagccgcactgaaactgtatcatgtaagcgactccgagggtaatctagtggtgagggaggtagctacacgaccactgactcaggacctcctttcgcatgaggactgctacatactagatcagggaggcttaaagatctatgtgtggaaggggaagaaggcaaacgaacaggaaaaaaaaggcgcgatgagccatgccctgaacttcataaaagcgaagcagtaccccccgtcaacgcaggtcgaggtacagaacgatggcgcagagtctgcagtgttccagcagctattccaaaagtggacagccagtaatcgaactagcgggctgggtaaaacccacacagtaggcagtgtaggggaaggacaggccggtgctgttcgagagccaggctccaggagttgggcaaggagagccacttggagtactacccatcccccttcattgacctgcatctttaacgaggacttctatgccggctccggacttgtcttggccgacggggacgtggacaaactatag

SEQ ID NO: 211266 - DNA, 576 bp, synthetic construct
  misc_feature 1..576: note = Description of Artificial Sequence: Synthetic coding sequence
  source 1..576: mol_type = other DNA
atgggcaagcagaacagcaagctggcccccgaggtgatggaggaccttgtcaagagcacagagtttaatgagcacgagctcaaacagtggtataagggctttctgaaagattgtccaagtggacggttaaatctggaggaattccagcaactgtatgttaaattcttcccatacggcgatgcgtcaaagtttgcgcagcacgccttccggacctttgataaaaatggcgatgggacaatagacttcagggaattcatttgcgccttgagtatcacatcgcgcggctccttcgagcagaagctgaattgggccttcaacatgtacgatctggacggcgacggaaaaattactcgtgttgagatgctcgaaataatcgaggctatctacaagatggtgggaaccgttattatgatgaaaatgaatgaagacggccttacacctgagcagagggttgataagatattttcgaaaatggataagaataaggatgatcagatcactctggacgagtttaaggaggcggccaagagcgatccatctattgttctgctgctccaatgtgatatccagaaatag

SEQ ID NO: 211267 - DNA, 576 bp, synthetic construct
  misc_feature 1..576: note = Description of Artificial Sequence: Synthetic coding sequence
  source 1..576: mol_type = other DNA
atgggcaagcagaacagcaagctggcccccgaggtgatggaggacctggtcaaatccaccgagtttaatgagcacgagttgaaacagtggtacaaaggattcctgaaagactgtccctctggccgcctgaacctcgaagagtttcagcagttgtatgtgaagttctttccatatggtgacgcgtcaaaatttgcccagcacgccttccgtacctttgacaagaacggagacggtaccatagactttcgcgaattcatctgtgcattgagtattactagtaggggaagttttgagcaaaagcttaattgggcttttaatatgtacgacttagatggagatggaaaaattaccagggtcgagatgttggaaataatcgaggccatttacaaaatggtgggcaccgtgattatgatgaagatgaacgaggacggcttgacccctgagcagcgcgttgacaaaatcttttcgaaaatggacaagaataaggatgatcagataaccttagatgaattcaaagaagccgccaagagcgatccatccattgttctcttactgcaatgcgacatccaaaagtag

SEQ ID NO: 211268 - DNA, 576 bp, synthetic construct
  misc_feature 1..576: note = Description of Artificial Sequence: Synthetic coding sequence
  source 1..576: mol_type = other DNA
atgggcaagcagaacagcaagctggcccccgaggtgatggaggacctagtgaaaagcaccgagttcaacgaacacgagctaaaacagtggtacaagggatttctcaaggattgccctagcggacgcctgaatctcgaggagttccagcagctttatgtaaaattcttcccatatggggatgcttctaagttcgctcagcacgccttccgaacttttgacaagaacggtgatggtacgatagacttcagagaattcatttgtgctctgagcatcacatcaaggggctcatttgaacagaagctgaattgggcctttaacatgtatgaccttgatggcgatggtaaaatcacccgcgttgagatgctggagataattgaggcgatttataagatggttggcacagtgataatgatgaaaatgaacgaagatggactcaccccagaacagagagtggacaagatcttctccaaaatggataaaaataaagacgatcagatcacacttgacgaattcaaggaggcagcaaaatcagacccctcaatcgttctcctgttgcagtgtgatatccagaagtag

SEQ ID NO: 211269 - DNA, 315 bp, synthetic construct
  misc_feature 1..315: note = Description of Artificial Sequence: Synthetic coding sequence
  source 1..315: mol_type = other DNA
atgggcaagcagaacagcaagctggcccccgaggtgatggaggacctggttaagagcacagagttcaacgaacatgagctgaaacagtggtacaaggggttcctgaaggattgccctagcgggcgactgaacctggaggagttccagcagttgtacgtgaagttcttcccgtacggcgacgctagcaagtttgcccagcatgccttccggacattcgacaagaatggagatggtacaattgatttccgtgaattcatttgcgcattgtctataacatcacgcggaagctttgaacaaaaactgaactgggcttag

SEQ ID NO: 211270 - DNA, 357 bp, synthetic construct
  misc_feature 1..357: note = Description of Artificial Sequence: Synthetic coding sequence
  source 1..357: mol_type = other DNA
atgggcaagcagaacagcaagctggcccccgaggtgatggaggaccttgtgaagagcacagaatttaatgaacacgagctgaagcagtggtataagggtttcttgaaagactgtccttccggccgactcaacttagaggagttccagcagctctatgtgaagtttttcccatatggagatgcttccaagtttgcccagcatgcttttcggacattcgacaagaacggggatgggaccatcgattttcgcgaatttatttgcgccctgagcatcacgtcaagaggctctttcgagcagaagttaaactgggcatttaatatgtacgacttagatggcgacggaaaaatcactcgctag

SEQ ID NO: 211271 - DNA, 720 bp, synthetic construct
  misc_feature 1..720: note = Description of Artificial Sequence: Synthetic coding sequence
  source 1..720: mol_type = other DNA
atgaccggccgggacagcctgagcgacggccggaccagcagccgggccctggttcccggagggtctcccaggggctcgcgccccaggggcttcgccatcacggacctgcttggcctggaagccgagctgcctgccccggcgggaccagggcagggcagcggctgtgaaggccctgccgtcgcaccctgccctgggcccggcctagatggaagcagcctcgccaggggcgccttgcccctgggactgggactgttatgcgggtttggcacccagcctcctgcggcagcccgcgcaccttgcttgctgttagcggacgtgccgttcctgccacctcgcggccctgagcctgccgcccctttagctccctccaggccgcctccggctctagggcggcagaagcgatctgattctgtgagtaccagcgatgaggattcacagagcgaagaccgaaatgatctgaaagctagtcctactctgggaaagcggaaaaaacgcagacaccgaacagtgtttacagctcaccagcttgaagagcttgaaaaagccttctcagaagcccactatccagacgtttatgccagggaaatgctggccgtaaaaaccgagctacccgaggaccgtatacaggtgtccggggttcccttcctgagatcaaaggatacgacagagaacgtgtctttcccccacagcgttagccagtctgctgtcccctcactgtag

SEQ ID NO: 211272 - DNA, 1098 bp, synthetic construct
  misc_feature 1..1098: note = Description of Artificial Sequence: Synthetic coding sequence
  source 1..1098: mol_type = other DNA
atgaccggccgggacagcctgagcgacggccggaccagcagccgggcactagtacccggaggcagtccaagagggagccgcccacggggcttcgccataaccgacctgctgggcctcgaggcagagttacccgcaccagccgggcctggacagggatctggatgtgaaggtccagccgtggcgccttgcccaggccccggcctggatgggagtagtttggctagaggagccctgcccctgggactcggattgctgtgcgggttcggtacacaaccaccagctgccgccagggcaccttgcttgcttcttgccgacgtaccatttctgccccctcgcggtccagagccggccgccccccttgccccatcccggcccccccctgccctgggcaggcagaagcggagcgattccgtctccacttctgacgaagatagtcagagtgaagaccggaatgacctgaaggcttccccaactctggggaaacgcaagaagagaaggcatcgaactgtgttcactgctcaccagttggaagagcttgagaaagctttttctgaagcccattaccctgatgtctacgccagggagatgctggctgtgaagaccgaactcccggaagacaggattcaggtgtggtttcagaataggagagcaaagtggagaaaacgagagaagcgttggggggggagctcagtgatggctgaatatgggctctacggagctatggtacggcattgcattcctctcccggactcggtcctgaacagcgccgagggcggcttactgggttcctgcgccccctggcttctgggaatgcacaagaagagcatggggatgataaggaagcccggctccgaagataagctggctggactgtggggatcagaccactttaaagagggttccagccagtccgagtcagggagtcaacgagggagcgataaggtgagtcctgaaaacgggctggaggatgtggctatcgatctgtcgtcttcagcccggcaggagactaagaaagttcaccctggcgccggcgcacaagggggcagcaactcaacagccttggagggtcctcagcctgggaaagtcggggcgacctag

SEQ ID NO: 211273 - DNA, 432 bp, synthetic construct
  misc_feature 1..432: note = Description of Artificial Sequence: Synthetic coding sequence
  source 1..432: mol_type = other DNA
atgaccggccgggacagcctgagcgacggccggaccagcagccgggctctggtgcctggagggtccccaagaggcagcaggccaagaggctttgccatcaccgaccttctcgggcttgaagcggaactacccgcacctgctggaccaggacagggttctggatgtgagggtcctgccgttgccccctgtccaggacccggactcgatgggtccagcctcgcacggggggcattaccactgggcctgggcctgctgtgtggtttcggcacgcaaccccctgccgcggcgcgcgccccctgcttgctcctcgctgatgtaccatttcttccaccccgcgggcctgagccagccgcccctttggccccatcccgcccacctcccgcactcgggagacagaagaggtccgactccgtctctacgtccgccatgtag

SEQ ID NO: 211274 - DNA, 843 bp, synthetic construct
  misc_feature 1..843: note = Description of Artificial Sequence: Synthetic coding sequence
  source 1..843: mol_type = other DNA
atgaccggccgggacagcctgagcgacggccggaccagcagccgggccttggtgcctggcggctccccacgtggatctagaccgaggggctttgccataacagacctcctcggactggaagccgaactgcctgcacccgcgggacctggtcaggggtccggatgtgaaggccccgctgtggcgccgtgccctggcccggggctcgacggaagttctctggcccgcggcgcgctccccctcgggctgggtttgctctgtggctttggtactcagcccccagcggccgcccgagccccttgcttactcctcgcagacgtccctttcttgcccccccgcgggcctgagcctgccgcccctctggccccttcccgacctcccccagccctgggcagacaaaagcgcagtgatagcgtgagcaccagcgacgaagattcacagtccgaggatagaaacgacctcaaagcctcgcccacactcggtaagagaaaaaagagaagacatcgaactgtatttactgcacatcagctggaggaactggagaaggcattcagcgaggcccattatccagacgtgtacgccagagagatgctggccgtgaagaccgaacttcccgaagatcgaatacaggtttggtttcagaaccggcgcgctaagtggcggaaaagagaaaaaaggtggggtggctcttctgtgatggctgaatatggactgtatggcgctatggtgcgtcactgcatccccctgcccgatagcgtcctgaactctgctgagggcgggctgcttgggtcctgtgccccttggctgttggagggtgaaacactcggctgcagagaaatgaaatag

SEQ ID NO: 211275 - DNA, 657 bp, synthetic construct
  misc_feature 1..657: note = Description of Artificial Sequence: Synthetic coding sequence
  source 1..657: mol_type = other DNA
atgaccggccgggacagcctgagcgacggccggaccagcagccgggccttggtaccaggtggctctcccagaggaagcaggcctcgaggctttgctattaccgatctcctcggcctggaggccgagctaccagctcccgctggtccaggccaaggatctggctgcgaaggcccagccgtagctccctgcccagggcccgggctcgatggatcaagtcttgctcggggggctctgccattgggcctgggcttactctgtgggtttgggacacaaccaccggccgctgctcgcgccccatgtctcctgctggctgatgtgccctttttacccccgcgtggcccggagcctgctgcgccgttagccccttccaggccacctccagccctcggcagacagaagcgatccgatagcgtgtccacaagtgacgaggattctcaatcagaggaccgcaacgatctgaaggcttcccccacgctcggtaaaagaaaaaagcggcgccatagaacagtctttacagcacaccagctggaggaattagaaaaggcgtttagtgaagcccattatcctgacgtgtatgccagggagatgctggcagtgaagaccgagctgccagaggacagaattcagagagtgcgccattgggctgccgaaaagtag

SEQ ID NO: 211276 - DNA, 906 bp, synthetic construct
  misc_feature 1..906: note = Description of Artificial Sequence: Synthetic coding sequence
  source 1..906: mol_type = other DNA
atgaccggccgggacagcctgagcgacggccggaccagcagccgggcactcgtgcccggtggaagccctagaggcagtagaccccgcgggtttgctattacggacttattgggactggaggctgagctccccgccccagccggccctggacagggatccgggtgcgaggggcccgccgtcgcaccctgtccaggccccggcttggacgggagcagcctggcaaggggtgcattgcccttagggctgggccttctatgcggcttcggaactcagccaccagccgcggcacgcgcaccgtgtcttctccttgctgacgtcccgttcctgccgcctaggggaccagagcccgctgctcctctcgccccgagcaggcccccgcctgccttgggcaggcagaaacggtcagacagcgtgagtacctctgacgaggatagccaatctgaagataggaatgacctgaaggcctctcccaccctgggtaaacggaaaaaaaggcgccatcggacagtttttactgcacaccagcttgaggagctggaaaaggccttttccgaggcacactatccagacgtgtacgcccgggagatgctcgctgtgaagacggagttgcctgaggatcgcattcaagtctggtttcagaatcgcagggcgaagtggcgcaaaagggagaaacggtggggcggtagtagcgtgatggcagaatatgggctatatggcgcaatggttaggcactgcatccccttaccggattccgttttgaacagtgccgaaggcggccttctgggaagctgtgccccatggcttctggtccaaacctctgcacccggcggctcacggagcctggattttgccggcgacacacaggcacctcaaaccccgtggtggtgcctcatgactttcagttag

SEQ ID NO: 211277 - DNA, 711 bp, synthetic construct
  misc_feature 1..711: note = Description of Artificial Sequence: Synthetic coding sequence
  source 1..711: mol_type = other DNA
atgaccggccgggacagcctgagcgacggccggaccagcagccgggccctcgtgcccggggggtctccacgcggcagcagaccccgaggattcgcgattactgatttgctcggactcgaggccgagcttccagcccccgctgggccaggtcagggttcaggctgtgaaggcccagcggtcgccccgtgtccaggtcccggactcgacgggtcgtcactcgcaaggggcgccctgccactgggcttgggcttactctgtggcttcggcacgcagccgccagctgccgcaagagctccctgccttcttctggccgacgtgccttttctccctccccgggggccagaacctgccgcgccattggctccaagtcgtccccctcccgcactgggacgacaaaagcgcagcgattcagtgtccaccagcgacgaggattctcagtctgaagacagaaacgatctaaaagcttcgccaaccctgggtaagagaaaaaagcgcagacatagaaccgtgtttacagcccatcaattggaagaactggagaaagctttttctgaagcccactaccctgacgtgtatgctcgtgagatgctagctgtcaagactgaattgccggaggatcgcatacaatgtaaacttctgctgcttgaggccccggtccattggaccctgcaggaaacccaccgactgccacgcccacgggggggagcttag

SEQ ID NO: 211278 - DNA, 1110 bp, synthetic construct
  misc_feature 1..1110: note = Description of Artificial Sequence: Synthetic coding sequence
  source 1..1110: mol_type = other DNA
atgcgggcctgcatcagcctggtgctggccgtgctgtgcggcctggcctgggccgaggaccacaaggagtctgaacccctcccccagctggaggaagagaccgaagaggctctcgcttccaatctgtattcggcacccacaagttgccaaggccggtgttacgaggctttcgacaaacaccaccagtgtcactgcaacgccaggtgtcaggagttcggcaactgctgtaaagacttcgaatcgctatgctctgaccacgaggtgagtcatagttcagacgccattactaaggaagagatccagagcatctcagagaaaatctacagagcagatacaaataaggcccagaaggaggatattgtgctgaacagtcaaaactgtatctccccgtctgaaacccgtaaccaggtggatcggtgccctaagccgcttttcacttacgttaatgagaagcttttctctaagccgacatatgctgcattcataaatcttttaaacaattatcagcgcgctacaggacacggtgaacatttctcagcacaggagttagcagaacaggatgccttcctacgggagatcatgaaaacagcggtgatgaaagagctgtactcattcctgcaccaccagaataggtatggctctgagcaggaattcgtggacgacctaaagaacatgtggttcgggctctacagtagaggcaatgaggagggcgattcaagtggattcgagcacgtgtttagtggagaagtgaagaaagggaaggtcactggctttcataattggatcaggttctatctggaagaaaaggagggactggtcgattattattcgcacatttatgatggtccctgggactcttaccctgatgtccttgcaatgcagtttaattgggatgggtattacaaggaagtggggtctgcatttattggttcttcaccagagtttgagttcgccctatactctctttgtttcattgctaggccaggcaaagtatgccagctgtctctggggggataccccctggcagttcggacctatacatgggacaagtcaacctatggtaatggtaagaaatatattgcgaccgcttatatcgtgtcatccacctag

SEQ ID NO: 211279 - DNA, 1284 bp, synthetic construct
  misc_feature 1..1284: note = Description of Artificial Sequence: Synthetic coding sequence
  source 1..1284: mol_type = other DNA
atggaggccatggccgccagcaccagcctgcccgaccccggcgactttgaccgcaatgtcccaaggatatgcggcgtgtgtggggacagggcaaccgggtttcatttcaatgccatgacgtgtgaaggctgcaaaggattcttccgccgctctatgaaaagaaaggctctgttcacatgcccatttaatggggactgtagaattacaaaagacaacagacgtcactgtcaagcttgccgcttgaagagatgcgtcgacatcggcatgatgaaggagtttattctcaccgatgaagaggtccagagaaagcgggagatgatcctcaagaggaaggaagaagaggctctaaaggacagcctgagacctaagctcagtgaggaacagcagcggatcattgcaatccttctcgacgcccatcacaagacctacgaccccacatactccgatttctgccaattccggcccccagtaagagtgaatgacgggggcggcagtcacccttccagaccaaactctcggcacactccgtcgttttcaggggacagtagttccagctgttcagaccactgtataacctcatccgatatgatggactccagttctttcagtaatctcgacctgtcggaggaagacagcgacgacccctcagtgaccctggagctttcacagttgtcgatgctgccgcacctcgcggatctggtcagttactctatacagaaggtgattggctttgcaaaaatgatccctgggttcagagatctgacctcagaggatcagatcgtcctgctcaagtccagtgctatagaggtcataatgcttagatccaatgaatctttcaccatggacgacatgtcttggacatgtggcaatcaggattataagtaccgcgttagcgacgttaccaaggcgggccatagcttggagctaattgagcctctgattaaatttcaggtgggcctcaagaaactgaatttgcacgaggaagaacacgtcctcctgatggccatctgcatagtcagccccgacagaccaggagtgcaggacgccgccctaatcgaggcaatccaggatcgcctcagtaacactctacagacatacattagatgtcggcatcccccgcccggctcacacctattatatgccaagatgatccaaaaactggctgatctgcggtctcttaatgaggaacatagtaagcaatatcgttgcttaagcttccagccagagtgtagcatgaaactaacaccgctcgtgctagaggtgtttggaaacgagataagctag

SEQ ID NO: 211280 - DNA, 1188 bp, synthetic construct
  misc_feature 1..1188: note = Description of Artificial Sequence: Synthetic coding sequence
  source 1..1188: mol_type = other DNA
atgagcatggagcacgccgccctgaccgccaccggcgccggcggctcttggcgcagtatgaagcgcaaggctcttttcacatgcccgtttaatggagattgtcgcataacgaaggacaacaggagacattgccaagcctgccgacttaaacggtgtgtggatattgggatgatgaaggaatttatcctgactgacgaggaggtgcagagaaaacgtgaaatgattctgaagcgaaaggaagaagaggctctaaaggattccctgaggcccaaactgagcgaggagcagcagagaattattgcaattttactggacgctcatcacaagacctacgacccgacctatagcgatttctgtcagttccggccgccagtgcgcgtgaacgacgggggtggcagccatccatcgaggcctaacagtagacataccccgtcatttagcggcgattcctctagctcctgcagtgaccactgcattacatccagcgatatgatggattcaagtagtttcagtaatctggacctttcagaagaggacagcgacgacccgagtgtgaccctcgagctgtcgcaactgtcgatgttgccgcatctcgcggatctggtttcctactcgattcaaaaagtcatcggcttcgcaaagatgatccccggatttagagacctgaccagcgaggatcagattgtgttactgaaaagctctgccattgaggtgatcatgcttagatctaacgagtcgttcacaatggatgatatgagctggacctgcggtaatcaagactacaagtatcgcgtgagcgacgttaccaaagcgggacactccttggaactgattgaacccctgattaaatttcaggtcgggttaaagaaattgaatcttcacgaggaagagcacgtgctgctgatggctatctgtatcgtcagtcccgatcgcccgggagttcaggacgccgccctcatcgaagcgattcaggatcgactctctaacacgttgcagacctacatcaggtgccgccaccctcctcctggcagccacctcttgtatgccaaaatgatccagaagcttgctgatctcagaagtctgaatgaagagcattcaaagcagtaccgttgtctgtcattccaaccagaatgtagtatgaagctgactcctttggtgcttgaggtctttggaaatgagattagttag

SEQ ID NO: 211281 - DNA, 753 bp, synthetic construct
  misc_feature 1..753: note = Description of Artificial Sequence: Synthetic coding sequence
  source 1..753: mol_type = other DNA
atggaggccatggccgccagcaccagcctgcccgaccccggcgactttgatcggaacgtgcctcggatatgcggagtgtgtggcgatagagccacaggatttcactttaacgccatgacgtgtgagggatgcaagggcttctttcggcgaagtatgaagcggaaagccttgtttacttgtccatttaacggtgactgccggatcactaaagacaataggagacactgccaagcatgtaggttaaagcgctgtgtagacattggaatgatgaaagagtttatcctgactgacgaggaggtgcagcggaagcgagaaatgatcctcaagaggaaagaagaggaggccttgaaagactccctccggcccaagctgtcggaggagcaacagagaattatagcaatcttactggatgctcaccataaaacatacgatcccacctattctgatttctgtcaatttaggcccccagttagggtgaatgatggcgggggaagtcatccatcaagacccaactctaggcacactccctccttcagcggcgatagttcttctagctgttccgaccattgtatcaccagctctgatatgatggattcctcgtcattctccaacctggatctgtccgaggaggattccgatgaccctagcgtcaccctggaactgagccagttgtcaatgctgccccacctcgcagacctcgtgtcatatagcatccagaaagttatcggctttgcaaagatgatcccaggctag

SEQ ID NO: 211282 - DNA, 306 bp, synthetic construct
  misc_feature 1..306: note = Description of Artificial Sequence: Synthetic coding sequence
  source 1..306: mol_type = other DNA
atggaggccatggccgccagcaccagcctgcccgaccccggcgacttcgatcggaatgttcctcgcatttgtggcgtctgtggggatcgcgcaacgggattccacttcaacgctatgacatgtgaaggttgtaagggcttttttagacgcagtatgaagcgcaaagccctgtttacctgcccctttaacggggactgtcgaattactaaggataacagacgtcattgtcaagcctgcaggctgaagagatgtgtggatatcgggatgatgaaggagtttattcttacagacgaggaagtgcaatag

SEQ ID NO: 211283 - DNA, 1284 bp, synthetic construct
  misc_feature 1..1284: note = Description of Artificial Sequence: Synthetic coding sequence
  source 1..1284: mol_type = other DNA
atggaggccatggccgccagcaccagcctgcccgaccccggcgacttcgatcgaaatgtcccccggatttgtggtgtgtgcggcgatcgcgccaccgggtttcacttcaacgctatgacatgtgagggttgtaaaggcttcttccgtcggagcatgaagagaaaagcgctcttcacgtgtccattcaatggcgactgcagaatcacaaaggataacaggagacactgtcaagcctgcagattgaaacggtgtgtggatatcggaatgatgaaagagttcattctgacagatgaagaggtccagaggaagcgcgagatgatccttaaacgcaaggaggaagaggccctgaaggattcactacggccaaaactctctgaagagcagcagcgaattatagctattttgttagacgcacaccataaaacctatgaccccacttattctgacttctgtcagttccgccccccagtacgtgtgaacgacggcggtggcagccacccctcaaggccgaatagtcgacatacaccctcttttagtggagatagttcctctagttgctccgaccactgtataacaagcagcgacatgatggacagttctagcttctctaatttggacctgtcagaggaggatagtgacgacccttctgtgactttggaactctcgcaactttctatgctgccccacttggccgatctagtatcctattccatccagaaagtcatcggcttcgctaagatgatacctggcttccgggatctgaccagtgaagaccagatcgtccttcttaagagttctgctatcgaggtgatcatgctccgcagtaatgagagctttaccatggacgacatgagctggacctgcggcaatcaggattacaaatatcgtgtgtccgatgttaccaaggccggtcacagtctggaactcattgagccgttaatcaagtttcaggtggggctgaaaaagctgaacctacatgaggaggagcatgtgctcctgatggctatatgcattgtttcccctgacaggcccggagtgcaggatgccgcactaattgaggcaatccaggacaggctgtccaatacacttcagacctacatccgatgtagacatccccctcccgggtctcatctgctgtacgccaaaatgatccagaaactggccgacctcagatctctgaatgaggagcacagcaaacaatacagatgtctgagctttcagccggaatgctccatgaaactcaccccactggtgctggaggtcttcgggaacgagattagttag

SEQ ID NO: 211284 - DNA, 321 bp, synthetic construct
  misc_feature 1..321: note = Description of Artificial Sequence: Synthetic coding sequence
  source 1..321: mol_type = other DNA
atggaggccatggccgccagcaccagcctgcccgaccccggcgacttcgatagaaacgtgccacggatctgcggagtgtgcggagatagagccaccggattccacttcaacgctatgacttgtgagggatgcaagggattttttaggcgcagtatgaaacgtaaggccttatttacctgccccttcaatggtgactgccgcatcacaaaggataataggaggcattgtcaggcttgcagactgaagcgatgcgtcgatatcggcatgatgaaagagttcattttgactgacgaagaagtgcaacgaaaacgtgagatgtag

SEQ ID NO: 211285 - DNA, 1434 bp, synthetic construct
  misc_feature 1..1434: note = Description of Artificial Sequence: Synthetic coding sequence
  source 1..1434: mol_type = other DNA
atggagtggcggaacaagaagcggagcgactggctgagcatggtgctacgaaccgctggcgtcgaggaagccttcggtagcgaggtgtctgtccgtcctcatcgaagagcgccactaggatctacttacctgccgccggccccgagcggaatggaagctatggccgcatccacaagtctgcccgaccccggagatttcgacagaaacgtgccccgcatctgtggggtgtgcggagatagagctactggattccattttaatgccatgacatgtgagggctgtaagggtttcttccggcggtctatgaagagaaaagccctgtttacctgcccattcaatggagactgccggatcaccaaagataaccgcagacattgtcaggcttgccggttgaagaggtgtgtggacatcggcatgatgaaagagtttatcttgacagacgaggaggtgcagagaaagcgggaaatgatcctcaagagaaaagaggaggaggctttaaaggacagtctgagacctaagttgagcgaggagcagcagcggattatcgcaatactgctggacgcccaccacaagacttatgatcccacatatagcgatttctgccagttccggcccccggtgcgagtgaacgatgggggcggatctcaccccagcagacccaatagcagacatactcccagtttcagcggcgattctagcagcagctgctcagatcattgtataacatcctcagacatgatggacagcagttccttttctaacctggatttgagcgaagaggactccgacgaccccagcgtgacactagagctcagtcagttaagtatgctgccacatctagccgacctggtcagctatagtattcaaaaagtcattggtttcgctaagatgatccccggcttccgcgatttaacgagcgaggaccagatagttctgttgaaaagcagcgctatcgaggtgatcatgttgcggtcaaacgagagtttcacaatggacgatatgtcttggacctgcggcaaccaggattacaaatacagggtgagtgatgtgacaaaggccggccatagtcttgaactgattgagcccctgattaaatttcaagtggggctgaagaaactgaatctgcatgaagaggagcatgtgttgctgatggcaatctgtattgtgtcacctgacaggcccggggttcaggacgctgctctcatcgaggcaattcaggataggcttagtaacaccctccaaacttatatccgctgcagacatccaccaccgggctcacatctactgtatgcgaagatgattcaaaaactggccgatctgcgcagcttgaacgaagagcactccaagcaataccggtgcctgagctttcagcctgagtgctccatgaaattaacccctttggtcctcgaagtgttcggtaacgaaattagctag

SEQ ID NO: 211286 - DNA, 279 bp, synthetic construct
  misc_feature 1..279: note = Description of Artificial Sequence: Synthetic coding sequence
  source 1..279: mol_type = other DNA
atgggcagcacctggggcagccccggctgggtgcggctggccctgtgcctcacgggcttggttctcagtctgtacgcattgcacgtgaaagccgcaagggcacgcgaccgagattaccgggctctctgcgacgtgggcacggcaatatcttgtagtcgggtcttctcctcccgtctgcctgctgacacgcttggcctttgcccagatgctgctgagctgccgggtgtcagtcggtggttctgcctgccaggtttagaccccgtcctgagagcgttatag

SEQ ID NO: 211287 - DNA, 492 bp, synthetic construct
  misc_feature 1..492: note = Description of Artificial Sequence: Synthetic coding sequence
  source 1..492: mol_type = other DNA
atgggcagcacctggggcagccccggctgggtgcggctggccctgtgccttactgggctggtgctgagcttgtacgccctccatgtcaaagctgctcgggctcgggatcgagactaccgtgccctttgcgatgtggggactgccatctcctgtagcagagtcttttcctccaggtggggccgtggttttggactagtggagcatgtccttgggcaagattcgatcctgaatcagtctaacagcattttcggctgcattttctataccctccagctgctcctgggatgtctccgtacacgatgggcatcggtgctgatgttgctgtcctcgctggtcagtttagcaggctcggtgtacctggcgtggattctgttctttgtcctgtacgatttctgtatcgtttgcatcaccacgtacgccattaatgtaagcctcatgtggctctcattccgcaaggtgcaggagccccagggtaaagccaaaagacattag

SEQ ID NO: 211288 - DNA, 5823 bp, synthetic construct
  misc_feature 1..5823: note = Description of Artificial Sequence: Synthetic coding sequence
  source 1..5823: mol_type = other DNA
atgagcagcgacaccgagatggaggtgttcggcatcgccgcccccttcctgcgaaagtccgagaaggagcggatagaggcacaaaatcagcccttcgacgccaagacgtattgtttcgtggttgatagtaaagaggagtatgcgaaaggcaagatcaaatcatctcaggatggcaaggtgaccgtagaaaccgaggataataggacactggttgtgaagccggaggacgtgtatgccatgaatccccctaaattcgacagaattgaggacatggccatgttgacgcatctcaatgagcctgccgtgctctacaacctcaaggacaggtacacttcatggatgatctacacctactctgggcttttttgcgtgactgtgaatccgtacaagtggttaccagtatacaaccctgaggtggtggagggttacagagggaaaaaaagacaggaggcgcccccccacatattctctatttctgacaatgcgtaccagttcatgctgactgatcgggagaaccagtcaattctcattactggggagagcggggccggcaagaccgttaataccaaacgtgttatccagtattttgcgacaattgcggcaactggagatctggcaaagaaaaaggactctaaaatgaaggggacattggaagatcaaataatctccgctaatccactgctggaagccttcggaaatgctaagactgtccggaacgacaattcttcacgcttcggtaagtttatccgtattcatttcggaacaaccgggaagctggccagcgcagacattgaaacctatctcctggagaagagcagagtgacatttcaattgaaggctgagaggagctaccacattttttaccagatacttagtaataaaaagcctgagctgattgagcttctcctaatcactaccaatccctacgattatccgttcatatcgcagggagagattcttgtcgcctcaatcgatgacgcagaggagctgttggcaactgactcagcaatagatatcctaggcttcacacctgaagagaaaagcggtctgtataagctgactggagccgtgatgcactatgggaatatgaaattcaaacaaaagcagagggaggaacaagcggaaccagatggtacagaggtcgcagataaaacagcttacttgatgggtctgaacagtagcgatctgttgaaggccttgtgctttcctcgggtgaaggtggggaatgaatacgtgacaaagggccagaccgtggatcaggtgcatcacgccgttaacgccctgtctaaatcagtgtatgaaaaactctttctctggatggtcactcgcattaatcagcaactcgacacaaagctgcctcgacagcacttcattggcgtgctcgacatcgcgggctttgaaatttttgaatacaactctctcgagcagttatgcataaatttcaccaatgagaagttgcaacagttcttcaatcaccacatgttcgtacttgaacaggaggagtacaagaaagaaggtattgaatggacatttattgattttggcatggacctagccgcctgcattgaacttatcgaaaagccaatgggcattttctcaatactggaagaagaatgtatgttcccgaaagcgacagacacaagtttcaagaataagctgtacgaccagcacttaggtaagagtaataattttcagaaacctaaggtcgtcaaaggccgggctgaagcgcacttctcactcatccattacgctggaactgtggattactctgtcagcggatggctcgaaaagaacaaggaccccctgaacgagactgtcgttggactgtatcaaaagtcatctaatcggttactcgcacacttgtacgctaccttcgcaaccgcggacgctgattctggtaaaaagaaggtcgccaaaaagaaggggagcagttttcagacagtgtctgccctttttcgcgagaacctgaacaaactgatgtcaaacctgcggactacccatccccactttgtacggtgcataatacctaacgaaaccaaaaccccaggggctatggagcacagcctggtcctgcatcagttgaggtgcaatggggtattggaaggtatccggatctgcaggaagggttttcctaaccggatcctctacggggacttcaagcagcgctatagggttttaaacgctagtgccatacctgaaggccagttcatcgatagcaagaaggcttgtgaaaagttactggcttccatagatatcgatcacacacagtacaagttcgggcacactaaagtgtttttcaaggccgggcttctgggcacccttgaggagatgagggacgacaggttagctaagcttatcaccagaacccaggccgtatgtcgtggattcttgatgcgagtggagttccaaaaaatggtccagagaagagagtccattttctgtattcagtataacatcaggagttttatgaatgtgaaacattggccatggatgaaactctttttcaagatcaagccacttttgaagagcgccgagacggaaaaggagatggcaacaatgaaggaggagtttcagaaaacaaaagacgagttggctaagtctgaagccaagagaaaggagcttgaggaaaaactggtgactctggttcaagagaaaaatgatctccagctgcaggtgcaggccgaatctgagaaccttttagacgctgaagaacggtgcgaccagcttataaaagccaagttccagctggaagctaagataaaggaggtcactgaacgtgccgaggatgaagaagagatcaatgccgagcttactgccaaaaaaaggaagctggaggacgagtgctcagagctcaagaaggacatcgacgatttggaactgacattggccaaggttgaaaaagaaaagcatgccaccgagaacaaggtgaaaaatctcaccgaagaattgagtggactggacgaaaccatcgctaagttgacaagggaaaaaaaagccctacaggaagcacaccaacaggccctggacgatcttcaagccgaagaggataaagtcaacagtttaaacaagactaagtctaaacttgagcaacaagtggaagacttggagagtagcttggagcaagagaagaagctgcgcgtggacctagagcgtaacaaaagaaaattagaaggggatttaaagctggctcaggaaagtatcctcgacttggagaacgataagcagcagctggatgaacgtcttaaaaaaaaagattttgagtattgtcagctgcagtctaaggtcgaggacgagcagacactgggtctgcaattccagaaaaaaatcaaggaactgcaggccaggatcgaggagttggaagaagaaatcgaagctgagagagctacgagagcaaagacagaaaagcaacgatctgactatgcccgggaactggaggagcttagcgaacggcttgaagaggcgggcggagtgacttcgactcaaattgagctgaataaaaagcgagaggctgaattccttaagcttcgccgggatctcgaagaggccacattacagcacgaggccatggtggccgctcttagaaagaaacatgccgactccgttgcagaactcggtgagcaaatcgataacctgcagagggtcaaacaaaaactcgagaaggaaaagtcagaatttaagctcgaaattgatgatctttcttccagcatggaatccgtaagcaagtcaaaggccaatctagagaaaatctgtcggacacttgaggaccagctttctgaggctagaggcaaaaacgaagagatacagcgatcattatcagaactgactacccagaagtccagactgcaaacggaggcaggggaactgagccgtcagttggaggaaaaagagtctattgtgtctcagctctcccgttctaaacaggcattcactcagcaaactgaagagctcaaacgacagctggaggaagagaataaggccaaaaatgcactggcacatgccttgcagagttcccgccacgattgcgatttgctgcgagaacagtatgaggaggaacaggagggcaaggctgagttgcaaagggcgttgtcaaaggctaattcagaggtcgcgcagtggagaaccaaatatgagaccgatgctattcagagaactgaagaattggaggaggccaaaaagaaactggcacagcggttacaggactcagaggaacaggttgaagcagtgaatgcaaagtgcgcatcactggaaaaaaccaagcagaggctgcaaggcgaagtcgaagatctcatggtggacgtggagagggctaatagccttgcggccgctctcgataagaagcagagaaattttgataaagtcttggcagagtggaagacgaagtgtgaagagtctcaagccgagctcgaggcctctctcaaagagtcccggagcctatcaacagaacttttcaagctgaagaacgcctatgaagaagcacttgaccagcttgaaaccgtgaagcgagagaacaaaaaccttgagcaggagattgctgatctgacagaacagatcgctgaaaacgggaagacaatccacgaattagaaaagagtagaaaacagatagaactcgagaaggccgacattcagctggcactcgaagaggccgaagccgccctggagcacgaggaggctaagattttaagaatccagctggaactgactcaggtaaaatcggagatcgacaggaagattgcagagaaagatgaggagatagagcaattgaagaggaactaccagcgaacagttgaaacaatgcagtcagccctggacgctgaggtccggagccggaacgaagccatcagactgaagaaaaaaatggagggcgatttgaacgagatcgagatacagttgtcccacgctaaccgccaggccgccgaaaccctgaagcatctgcggagcgtacagggccagctgaaggacactcagctacatctcgacgatgcacttagaggccaggaggacctgaaggaacagttggcaatcgtagaaaggagggccaacctactgcaagcggaagtagaagagttgcgcgctacactggagcagactgaaagagccaggaaactcgctgaacaggagctgttagactctaatgagagagtgcaactgctgcacacacagaacacctccctgatccacaccaaaaagaagttagagacagatctcatgcagcttcagagtgaggtggaagacgcttctcgcgacgctcggaacgcagaggaaaaagctaagaaagcaataacggatgctgcaatgatggcggaggaacttaagaaggaacaggatacaagcgcacacctggagagaatgaaaaaaaatttagaacagacagtgaaagaccttcagcacaggttggacgaagccgaacaacttgctctgaaaggtggtaagaaacagatccagaagctagaaactcgaattagggagctggaatttgaactcgaaggcgagcagaagaaaaacaccgagtctgtcaaaggcctcagaaaatatgaacggcgggtcaaggagctaacgtaccaaagcgaggaagacagaaagaacgtgctgcgcctgcaagacttggttgacaagttgcaggtgaaggtgaaatcctataagaggcaggcggaagaagctgacgagcaagcgaatgcgcatttgactaaatttcgcaaggcccagcatgaactcgaagaagcagaggagagggctgacattgccgaaagccaagtaaataagctgcgcgctaagaccagggatttcacttctagcaggatggtagttcacgaatctgaggagtag

SEQ ID NO: 211289 - DNA, 357 bp, synthetic construct
  misc_feature 1..357: note = Description of Artificial Sequence: Synthetic coding sequence
  source 1..357: mol_type = other DNA
atggcccccctgcggcccctgctgatcctggccctgctggcctgggtggcattggccgaccaagagtcctgtaaggggagatgtacagagggctttaacgtggacaaaaaatgtcaatgcgacgagttgtgtagttactatcagtcctgctgtacggactacacagctgaatgcaagcctcaagttacccgtggtgacgtcttcaccatgcccgaggatgagtatactgtgtacgatgacggagaagaaaagaataacgctaccgttcacgagcaggtagggggcccttctcttacaagcgatctgcaggctcagtcgaaagggaaccccgagcagacacccgtccttaagccatag

SEQ ID NO: 211290 - DNA, 495 bp, synthetic construct
  misc_feature 1..495: note = Description of Artificial Sequence: Synthetic coding sequence
  source 1..495: mol_type = other DNA
atgagcgtggaccccctgagcagcaaggccctgaagatcaagcgggaacttagcgaaaatacgccacacctgagcgatgaggccctcatgggactgagtgtacgggaactgaaccgtcacctcaggggtctgtctgcggaggaagtcaccaggctgaagcagcggcgtagaacgcttaaaaataggggttatgcagcaagttgtagggtgaaacgtgtgtgccagaaagaggagttacaaaagcagaagagcgaactggagcgagaggttgataagctggcacgtgagaacgccgccatgcgcctggaactcgacgcacttcgaggcaagtgcgaggccctgcagggatttgcgcgtagtgtggccgccgccagaggtcccgccaccctcgtggccccggccagtgttatcacaattgtcaaatccacccccggatcagggagcgggccagcacacgggcctgatccagcccacggtcctgcctcatgtagctag

SEQ ID NO: 211291 - DNA, 495 bp, synthetic construct
  misc_feature 1..495: note = Description of Artificial Sequence: Synthetic coding sequence
  source 1..495: mol_type = other DNA
atgagcgtggaccccctgagcagcaaggccctgaagatcaagcgggaattatcggagaatacacctcatttaagcgacgaagccctcatgggtctcagtgtgagagaattgaacaggcatttgagaggcctctcagcagaagaggtgacacgtctcaagcagagaaggaggaccttaaagaacagaggttacgccgcatcttgcagggtgaaacgagtgtgccagaaagaagaactgcaaaagcagaaatccgaactggaaagggaggtggataagctggcaagggagaacgcagcaatgcggctcgagctggacgccttgagaggtaagtgcgaggcactccagggttttgctcggtcagtggccgcggcaagggggccagcaacgctcgttgctccagcgtcggtgatcacaatcgttaagagtacccctggtagtggaagtggacccgcgcacggccccgaccccgcacacggacccgcttcatgctcgtag

SEQ ID NO: 211292 - DNA, 381 bp, synthetic construct
  misc_feature 1..381: note = Description of Artificial Sequence: Synthetic coding sequence
  source 1..381: mol_type = other DNA
atgagcgtggaccccctgagcagcaaggccctgaagatcaagcgggaactcagcgaaaatacgccccatctgtccgatgaggctttaatgggcctgtcagtacgggagttaaatagacatctacgcggcctcagcgccgaagaggttaccaggcttaagcagcggcggagaaccctcaagaaccggggatacgccgcaagttgtagagtaaagcgggtgtgccagaaagaggaactccagaaacagaagtccgagctggaaagagaggtcgataaactggcaagagaaaatgccgcaatgcgccttgagctagatgctctcaggggaaagtgtgaagccctgcaaggatttgccaggtccgttgctgcagcacgtgggtag

SEQ ID NO: 211293 - DNA, 495 bp, synthetic construct
  misc_feature 1..495: note = Description of Artificial Sequence: Synthetic coding sequence
  source 1..495: mol_type = other DNA
atgagcgtggaccccctgagcagcaaggccctgaagatcaagcgggagttgagtgaaaatacgccccacctgagcgatgaggccctgatgggcctctcagtgcgggagctgaaccgccacctgcgcgggctatccgcggaggaggtcacaagactgaaacagaggcggcgtaccctcaagaaccgcggatatgcggcatcatgcagggtcaagcgagtctgccagaaggaggaattacagaaacagaagagtgagcttgagcgagaggtcgataaactggctcgcgagaatgccgcgatgcggttggagctggacgctctgcgagggaaatgcgaggcccttcagggattcgcacgtagtgtcgccgcggccaggggccccgcaaccctggtggccccggccagcgtgatcacaatagtgaagagcacgcccggctcaggaagtggccccgcccacggaccagaccctgcccacggaccggcctcttgttcctag

SEQ ID NO: 211294 - DNA, 282 bp, synthetic construct
  misc_feature 1..282: note = Description of Artificial Sequence: Synthetic coding sequence
  source 1..282: mol_type = other DNA
atgggcctgagcgtgcgggagctgaaccggcacctgcggggcctgtccgcagaggaagtcacaaggctgaaacagaggaggcgcacacttaagaatagggggtacgccgcctcttgtcgcgtcaagagggtctgtcagaaggaggaactgcaaaagcagaaaagtgaactggagagagaggtggataaactggcccgcgaaaatgcggccatgagactggagctcgatgcactgaggggaaaatgtgaggcgctgcagggcttcgctcgatctgtcgcttag

SEQ ID NO: 211295 - DNA, 495 bp, synthetic construct
  misc_feature 1..495: note = Description of Artificial Sequence: Synthetic coding sequence
  source 1..495: mol_type = other DNA
atgagcgtggaccccctgagcagcaaggccctgaagatcaagcgggagctctccgagaatactccacacctctcagatgaagccttgatggggttatccgtcagagagcttaaccggcacttaagggggctgtctgcagaggaggtgactagactgaagcagcgccgacggacgctgaagaaccggggatatgctgccagctgccgggtcaaaagggtgtgccaaaaagaggagctccaaaagcagaaatccgagctcgagcgagaagtggataaactcgcccgagagaacgcagcaatgcggctggaactcgacgctcttcgaggcaaatgcgaggccctgcaaggattcgccagaagtgtggcggctgctaggggccccgccactttagtcgcacctgccagcgtgatcaccattgtcaaaagtacccccggcagcgggagcggcccagcccacggtcctgacccagcccacgggcccgcctcctgttcttag

SEQ ID NO: 211296 - DNA, 408 bp, synthetic construct
  misc_feature 1..408: note = Description of Artificial Sequence: Synthetic coding sequence
  source 1..408: mol_type = other DNA
atgggcctgagcgtgcgggagctgaaccggcacctgcggggcctgagcgccgaagaggtgactcgcctaaaacagaggaggaggacccttaagaaccgggggtacgctgccagctgtcgagtcaagagagtgtgtcaaaaggaggaacttcagaaacaaaaaagcgaactggagagggaggttgacaagcttgctagagaaaatgctgcaatgcgtttggagctggacgctctacggggtaagtgtgaggcccttcagggcttcgctcgatctgtggcagcagctagggggcctgcgactctggtggccccggcctcggtgatcacgattgtgaagtccacacctggaagcggcagcggacccgcgcatggcccagaccctgcacacggtccggcatcttgttcctag

SEQ ID NO: 211297 - DNA, 489 bp, synthetic construct
  misc_feature 1..489: note = Description of Artificial Sequence: Synthetic coding sequence
  source 1..489: mol_type = other DNA
atgaccacccccaacaagggcaacaaggccctgaaggtgaagcgggaacctggtgaaaacggcaccagcctcactgacgaggagctcgtgacgatgtccgtaagggaactgaatcagcatcttaggggcttgagcaaagaagagatcgtacagttgaaacaacggcggcgtacactcaagaaccggggctacgccgctagctgtcgagttaaacgagtcacacagaaagaggaactggaaaagcagaaggctgaactacagcaggaagtcgaaaagctcgcaagtgagaacgcatccatgaagctggaactggacgcactgaggtctaagtacgaggccctccagacctttgccagaaccgtggcccgaagcccagttgcccctgccaggggcccactggccgcgggactgggccctctggtcccaggcaaagtcgctgcaacttccgttatcactattgtgaaatcaaagacagacgccagatcctag

SEQ ID NO: 211298 - DNA, 489 bp, synthetic construct
  misc_feature 1..489: note = Description of Artificial Sequence: Synthetic coding sequence
  source 1..489: mol_type = other DNA
atgaccacccccaacaagggcaacaaggccctgaaggtgaagcgggagcctggagaaaacgggacaagcctgacagatgaagagttggttacgatgagcgtgcgcgagctgaaccagcacctcagaggcctgagcaaggaggaaatcgtccagttgaagcaacggcgtcgcacccttaagaaccgcggctatgctgcatcctgtcgggtgaaaagagtcactcagaaagaggaactggagaagcaaaaggcagagttgcaacaggaagtggaaaaactggctagtgaaaacgcatcaatgaaattggagctcgatgcattgagaagtaaatacgaagccctgcagacattcgctcgaaccgtggctcggtccccagtggcccccgcccgagggccactcgcagccggcctcggccccctcgttcccggaaaggtggcagcaacttcggttatcaccatagtgaagtccaagacagacgcaaggtcttag

SEQ ID NO: 211299 - DNA, 471 bp, synthetic construct
  misc_feature 1..471: note = Description of Artificial Sequence: Synthetic coding sequence
  source 1..471: mol_type = other DNA
atgaccaccaaccccaagcccaacaaggccctgaaggtgaagaaggaagcgggggaaaatgctccagtcctgagtgatgatgaactggtctctatgtcagtccgtgaactgaaccaacatctgcggggactgactaaggaagaagtgacccgcctcaagcagcggagaagaaccctcaagaatcggggatatgctgcttcctgccgcattaagcgggtgacacagaaggaagagctagagcggcagagggtcgagctacagcaggaggtagaaaaacttgctcgcgaaaactcgtcaatgcgattggagctcgatgctcttcgaagtaagtacgaagcattacagacattcgcacgcactgttgctaggggcccagtcgccccatctaaggtggcgactacttcggtcataactattgtgaaaagtacggagcttagttcaacctctgtgcccttcagtgcagccagttag

SEQ ID NO: 211300 - DNA, 471 bp, synthetic construct
  misc_feature 1..471: note = Description of Artificial Sequence: Synthetic coding sequence
  source 1..471: mol_type = other DNA
atgaccaccaaccccaagcccaacaaggccctgaaggtgaagaaggaagccggtgagaatgcacctgtgctgagcgacgacgaactggtttcaatgagcgtccgcgaactaaaccaacatttgcggggattaaccaaggaggaggtgactaggcttaagcagcgaaggaggacactcaagaaccgggggtacgccgctagttgcagaatcaaacgggtcacccagaaagaagaattagagagacaacgcgtggagcttcaacaggaagttgagaagctagcgcgtgagaattcctctatgcgcttagagttggatgctctgcgcagtaagtacgaagcccttcagacctttgcacggaccgtagcccgggggcccgtcgctccaagcaaagtcgccacgactagcgtgatcaccatagttaagagcaccgaactgagctctacctctgtaccattctcagctgcaagctag

SEQ ID NO: 211301 - DNA, 471 bp, synthetic construct
  misc_feature 1..471: note = Description of Artificial Sequence: Synthetic coding sequence
  source 1..471: mol_type = other DNA
atgaccaccaaccccaagcccaacaaggccctgaaggtgaagaaggaggcaggcgaaaatgcccccgtgctgtccgacgacgagctggtatctatgtccgtacgggagctcaaccagcatttacgagggctgaccaaggaggaggtgactaggctcaagcagcgaaggcggaccctcaagaatagaggctatgccgcctcctgtagaataaaacgggtcacacagaaggaggagcttgaacggcagcgtgtggagttgcaacaggaggtcgaaaagttggctcgggagaatagctctatgagattggagttagacgccttgcggtctaaatacgaagcgcttcagacgtttgctagaactgtggctagagggcccgttgctccctctaaggtggccactaccagtgtcatcacgatcgtaaagagtacagaactgtcgtccacatccgtcccattctcagccgccagctag

SEQ ID NO: 211302 - DNA, 1041 bp, synthetic construct
  misc_feature 1..1041: note = Description of Artificial Sequence: Synthetic coding sequence
  source 1..1041: mol_type = other DNA
atgcccagccccctggccctgcggccctacctgcggagcgagttcagcccctccgtggacgctaggccatgttcctctccttcagagctgccagcaaagttactcctgggtgcaactctaccgagagcccccagactgcctcgccgattggcctggtgcagtattgactgggaacaagtttgtttgctgcagcggcttggcgccggaggattcggaagtgtttacaaagctacctacaggggagttccagtagcaataaaacaagtcaataagtgtacgaagaacaggcttgcaagtcggcggtctttttgggccgaactgaacgtggcaagactccgacatgacaacatcgtgagggtggtcgctgcctcaacccgtactcctgccgggagtaattctctgggtaccataatcatggagttcggcgggaacgtgacgttgcaccaagttatatatggcgccgctggacaccccgaaggggacgccggcgagccgcactgtagaactggaggacaactgtccctcggaaagtgtctgaagtacagtctggacgtggtgaatggccttctgtttcttcactctcagtcgattgttcatttagatctaaaacccgccaacatactgatctctgagcaagatgtctgcaagatcagtgactttggatgtagcgagaaactcgaagacttgctctgtttccaaacaccaagttatcccctaggaggcacatacacacaccgtgctcccgagctcttgaagggtgaaggagtgactccaaaggccgatatttattcttttgctataacgctctggcagatgactacgaagcaagctccttatagcggcgagcggcagcatatattatacgccgtggttgcctacgatttgcgtccttccttaagcgcagccgtcttcgaggactctttacctggacagaggttaggggatgtgatacagagatgttggcgaccatccgccgcccagagaccttctgctaggttgttgttggtggacctcacgtcacttaaggccgaactcggttag

SEQ ID NO: 211303 - DNA, 1839 bp, synthetic construct
  misc_feature 1..1839: note = Description of Artificial Sequence: Synthetic coding sequence
  source 1..1839: mol_type = other DNA
atggcccggcggccccggcacagcatctacagcagcgacgaggacgatgaagatttcgaaatgtgtgaccacgactatgacggacttctccctaaaagtgggaaaagacacttggggaaaacacgatggacccgcgaggaagatgaaaagttaaagaagctcgtcgagcagaacggcacggatgattggaaggtcatcgctaactacctgcccaacagaacggacgtacagtgccaacaccggtggcagaaagtcctgaatcctgagctgatcaaggggccatggacgaaggaagaggatcaaagggtgatagaactcgttcagaagtatggtccaaagcgttggtcagtcattgcgaagcacttgaaaggccgtataggcaagcagtgtagggagcgttggcataatcacctcaacccagaggtgaagaagacatcttggaccgaggaagaggatcggattatataccaggcacacaaaaggcttggcaaccggtgggctgaaattgccaaactactcccaggccgcaccgacaatgccatcaagaaccattggaattccacgatgcggaggaaggtcgagcaggaaggctatcttcaggaatcttcgaaggccagccaacctgctgtggcaacgtccttccagaaaaatagccatctcatgggcttcgcccaggccccccccacggcccagctgcctgccaccggacaaccaacagtaaataacgactatagctactatcatatcagcgaggcgcagaatgtgagctcccatgtgccttatcctgtcgccctgcacgtgaatattgttaacgtaccccaacccgccgccgcagcgattcaaagacattacaacgacgaagaccctgagaaggagaagcgtatcaaagagttggaattgcttctgatgtccaccgagaatgagcttaaaggacagcaggtcttgcccacccagaatcacacgtgcagctatcccgggtggcacagcacaacaattgccgaccacaccagaccccacggcgactcagctcctgtgagctgcttaggagagcaccactctacaccaagcctgcctgccgatcccggttccctgcccgaagagtcagccagtcccgcacggtgcatgatcgtgcatcagggcacaatccttgataacgtgaagaacctcctggaattcgcggagacactgcagttcatagattctttcctcaacacatcaagtaatcatgagaattctgatctcgaaatgcctagtctcacaagcacccctctgatcggccataagctgactgtgacaacccctttccaccgtgaccaaacagtgaaaactcagaaggaaaacactgtatttcgcaccccggcaataaagaggtctattttggagtccagccctcggacccccactcctttcaagcatgcactggcagcccaagagattaagtacggtcctttgaagatgttgccccagaccccgagccacctcgtggaggacctccaggatgtgattaaacaggagagcgatgagtctggcatcgtggctgaattccaggaaaatggtcccccgcttctcaagaagataaaacaggaagtcgagtcgccgaccgataagtccgggaactttttttgcagtcaccattgggaaggagacagtctcaacacacagctgtttactcagaccagccccgtggcagacgcccccaatatccttacaagctctgtactcatggccccggctagtgaggatgaagataacgttttgaaggcctttaccgtacctaaaaacaggagtctggcttcacctttacaggctactaaggcacagcggttattccagttctag

SEQ ID NO: 211304 - DNA, 2181 bp, synthetic construct
  misc_feature 1..2181: note = Description of Artificial Sequence: Synthetic coding sequence
  source 1..2181: mol_type = other DNA
atggcccggcggccccggcacagcatctacagcagcgacgaggacgacgaagattttgagatgtgtgaccacgactacgacggcctgctgcctaagagcggaaaacgccatctggggaagacaaggtggacgcgggaggaggacgaaaaactgaaaaaactggtcgaacagaatggcactgacgattggaaggtcatcgctaactatctaccaaatcgcactgatgtgcagtgccagcaccggtggcagaaagttctgaaccctgagttgatcaagggaccatggacaaaagaagaggatcagcgcgtcatcgagctggttcagaaatacggacctaaacgatggagcgtgattgctaaacacctaaagggtcgcatcggcaagcagtgtcgggagcggtggcacaatcatctgaatcccgaagtgaaaaaaacctcatggacggaagaggaggataggatcatttaccaggcccataagcgccttggaaacagatgggccgagatcgccaagctgctccctgggcggacagataacgcaatcaaaaatcattggaatagcacaatgcgccgaaaagtagaacaggaggggtatctccaggaaagctccaaggcttcacagcccgccgtcgccacctccttccagaaaaactcccaccttatgggatttgctcaggctccacctacggcccagctgcccgccaccggccagccaactgttaacaatgattactcatactaccatattagcgaggcccagaacgtgagctcgcacgtcccttacccggtggcccttcatgtaaatattgtgaatgtgccccagcctgctgctgcagcaattcagcggcattataacgacgaggaccctgagaaagagaaacggataaaggagctggaactcttgctgatgtccacagagaacgagctcaagggccagcaagtgctgcctacacagaaccacacatgtagttatcctgggtggcatagtactactatagccgaccataccagacctcatggagattcagcacccgtgagttgcctgggcgagcatcattccacacctagcctgccggctgacccaggcagcctgcctgaagaatctgcgtctccggcccggtgtatgattgtgcaccagggtaccatccttgacaatgttaagaacctgttggaattcgctgaaacattacagtttatcgacagtttcctcaacacctccagtaatcacgagaacagcgatctagagatgcccagtctgacttcgacgcctctgatcggtcacaaactgacggtgacaaccccattccatcgagaccagaccgtcaagacccagaaggaaaacacggtgtttcggacacctgctatcaagaggtctattctggagagttctccgagaactcccaccccctttaaacatgcactcgccgcacaagagatcaagtacgggccactcaagatgctccctcagaccccatcccacctcgtagaggatctccaggatgtcatcaaacaagagtctgatgagtctggcatcgttgcagagtttcaagaaaatgggcccccccttcttaaaaaaatcaagcaggaggtagagagtcccacggataagtccggcaactttttctgtagtcatcattgggagggagactcattgaacacacaactctttacccagacctccccagtggcagacgctcccaccggagtacagtggcatgacttcggatcccttcagcccctcccaccaggctttaaacggttctcatgtctttctcttcctaggagctgggattaccgccacccaccgccacgccctgcaaacttcgaatttttggttgagacggggttcctgcacgtaggtcaagccggccttgagctactcacttcgggcgatctgcccgcatccgcttcgcaaagcgctcgaatcactggagtgagtcatagagctagacccgataatatcctgacctcttctgttctaatggcgccagcttcagaagatgaggacaatgttttaaaggccttcaccgttcctaaaaatcggagcctcgcctctcccctgcagccatgttccagtacctgggaaccagcgtcttgcggcaaaatggaagagcaaatgaccagctcctcccaggcccgcaagtatgtcaatgctttctccgcgagaactttagtaatgtag

SEQ ID NO: 211305 - DNA, 2286 bp, synthetic construct
  misc_feature 1..2286: note = Description of Artificial Sequence: Synthetic coding sequence
  source 1..2286: mol_type = other DNA
atggcccggcggccccggcacagcatctacagcagcgacgaggacgatgaggactttgagatgtgcgaccacgattacgacggcctgctgccaaaaagcggcaagcggcacctaggcaaaaccagatggacacgggaggaggacgagaaattgaaaaaattagttgaacagaatggtacagatgattggaaagtaatagcaaattacctacccaatcgtacagatgttcagtgccaacaccgctggcagaaggtgttgaaccctgaactcatcaaaggcccatggaccaaagaggaagaccagcgcgtaatagaattggtccagaagtatgggcctaaacggtggagtgttatcgctaaacacctgaagggccgaatcggaaagcagtgtcgggaacggtggcataaccaccttaatcccgaggttaagaagacctcgtggactgaggaggaggaccgaattatctatcaggctcataagcgcttagggaataggtgggcagaaatagccaagctgctgcccgggaggactgataacgccattaagaaccactggaattctaccatgcgcagaaaagtagagcaggagggctatctccaggagagctctaaggcaagtcagccggcagtggcaaccagcttccagaagaactcacatctaatggggttcgcccaggcacctccaactgcccagcttcccgctacagggcagccaacagtaaataacgattatagctactaccacatctcagaggcacagaacgtctccagccatgtaccgtatcctgtggcactgcatgttaatattgtgaacgttccccagcctgctgccgccgctatccaaaggcactataatgacgaggatcctgagaaggagaaacggatcaaggaactggagctgctgttgatgagtacagaaaacgaactcaagggccagcaagtccttccaacccagaaccacacttgctcttatccaggctggcactctacaaccatagccgaccacacacggccacatggcgattcagcccccgtgtcttgtctcggcgagcatcattccacgccaagtctgcccgcagacccgggtagcctccctgaggaatccgcctcaccagccaggtgtatgattgttcatcaaggcacaattctggataacgttaaaaatcttttagaattcgccgaaaccctgcagtttattgattcggacagctcctcctggtgcgacctgtcctccttcgagttcttcgaggaggctgacttcagcccttctcagcatcacaccggcaaggcccttcagttgcaacagcgtgaagggaacgggacgaagccagctggtgaaccctctcctcgcgtcaacaaacgaatgctgtcagagtcttctcttgatccccctaaggtgctgcccccagcacggcatagcaccattcctctggtgattttgcgcaagaagagagggcaagcgtcccctctcgctaccggcgactgctcaagctttattttcgccgatgtgtcctcttctaccccaaagcgctcgccagtaaaatcactacccttttcgcccagccagtttctaaacactagttctaaccacgagaactcagatctcgagatgccctcactcacctcgacccctctcatcggccacaagcttacagttacaactcctttccacagagaccaaaccgtaaaaacgcaaaaggagaataccgtcttccgcacccccgcgatcaaacgcagcatactggagtcatctccccggactcctaccccctttaagcacgcactagctgcccaagagattaaatacggcccactcaagatgttgccccagacaccctcgcacctcgttgaagacctgcaggacgtgataaaacaggagtccgacgaaagcggtattgtagctgaatttcaggaaaatgggccgcccctgctgaagaagattaagcaagaagttgagtctcccaccgataagtcagggaactttttctgttctcatcattgggagggagattcgttaaacacacaactattcacccagacttctcccgtcgctgacgctcccaacatcctaacttcctcagtgctcatggcgccagcctccgaagacgaggataacgtcttgaaagcctttacagtgccgaaaaaccgctctctggcctccccgctgcagccatgttcttccacttgggaacccgctagctgcggaaaaatggaagagcagatgacatctagcagtcaggcaagaaaatacgtaaatgcattctcagccagaactttagtgatgtag

SEQ ID NO: 211306 - DNA, 1923 bp, synthetic construct
  misc_feature 1..1923: note = Description of Artificial Sequence: Synthetic coding sequence
  source 1..1923: mol_type = other DNA
atggcccggcggccccggcacagcatctacagcagcgacgaggacgacgaggattttgaaatgtgtgaccatgactatgacggcttgctgcccaagtctggcaagagacatctgggtaagacgcgctggacccgggaggaggacgagaagctgaaaaagctagtcgagcaaaatggcacggatgactggaaggtaatcgccaattacctgccaaatcgcaccgacgtccagtgccaacaccgctggcagaaagtgttaaacccggagttaatcaaggggccatggactaaagaggaagaccaacgggtcatcgaactcgtgcaaaagtacggtcctaagcgctggagcgtgatcgccaagcacctaaagggccgcatcggaaaacaatgtagagagcgttggcacaaccatctcaaccccgaggtgaagaagaccagctggacagaagaagaggataggatcatctaccaggctcacaaacggctgggtaaccggtgggctgagatcgctaaactgttacccggtcgtaccgacaatgccattaagaatcattggaactccactatgaggcggaaggtcgaacaagaaggctatctgcaggagtcgagtaaagcttctcagccggcagtcgcgacctctttccaaaaaaatagccacctgatgggattcgctcaggcgccccccaccgctcagctccctgcgacagggcaaccaaccgtcaacaatgactattcctactaccatatctctgaagctcagaacgttagctcccacgtgccttaccctgtcgcactgcacgtcaacatcgtgaatgttccgcagcccgcggccgccgcaatccaacgtcactataatgacgaggatcctgagaaggagaagaggataaaagagttggaactcctactgatgagtaccgaaaacgaactgaaaggacagcaagttttaccgacccaaaatcacacctgcagttacccaggctggcattcaacaacaattgctgaccatacaaggccacatggggattcagcccctgtctcatgcctgggggagcaccattccacaccttctcttcccgcagacccaggctcacttcctgaggagagcgcttctcccgcgaggtgtatgatagtccatcagggcacgatccttgacaatgttaaaaacctgctggagtttgcggaaacattgcagtttatcgatagctttttaaatacctccagcaaccatgaaaactccgacctggagatgccctccctgacaagcacgcccctaataggacataagctgacagtcacaacccctttccaccgggaccagaccgtcaagacacagaaggagaatactgtattccggactcctgctatcaagagatccatcctcgaatcgagccctagaaccccaaccccgttcaagcacgcactggcagcacaggagatcaaatacggtccactgaaaatgctgcctcaaactccaagtcatctggtcgaagatctgcaagacgtgatcaagcaagagtccgacgaatcaggcatcgtggcggagtttcaggaaaacggcccacctctgttaaaaaaaattaaacaggaagtggagtcacctactgataagagcggcaacttcttttgtagccatcattgggaaggcgacagtttaaatacccaattgttcacacaaactagtcctgtagcagatgcacccaatatccttacgagttcggttctgatggccccagcttccgaggatgaggataacgtactcaaggctttcactgtgcccaaaaaccgatcactcgcatcacctcttcagccctgctcttctacatgggagccagcctcatgcggcaaaatggaagaacagatgaccagttcctcccaagcacgcaagtacgtgaatgcattcagtgcgcgcaccctcgtaatgtag

SEQ ID NO: 211307 - DNA, 1914 bp, synthetic construct
  misc_feature 1..1914: note = Description of Artificial Sequence: Synthetic coding sequence
  source 1..1914: mol_type = other DNA
atggcccggcggccccggcacagcatctacagcagcgacgaggacgacgaggatttcgaaatgtgtgatcacgactacgatggactgctgccaaaatcaggaaagcggcacctgggcaagactagatggacacgggaagaagacgagaaactcaagaagctcgtggaacagaatggaacggatgactggaaagtaatagccaattatctacctaatcgtaccgacgttcagtgccagcataggtggcagaaagtgttgaaccctgaactgatcaaagggccatggaccaaagaagaggaccaaagagttatcgaactggtacagaagtacggccccaagcggtggagcgtgatcgccaaacatttgaagggtagaatcggcaaacagtgtcgcgaacggtggcacaatcaccttaatcctgaagtcaagaagacctcatggacagaggaggaggatagaataatttaccaggcacacaagaggctcggcaaccgctgggctgagatagccaaactgctacctggtagaacggacaatgctattaagaatcattggaattctaccatgagaaggaaggttgagcaagagggttatcttcaggaatcatcaaaagcatcacagcccgctgtggccacctcctttcagaagaactcgcatctgatgggattcgcccaagcacctcctaccgcccaactacctgcaacaggccagcctacagtcaacaacgactatagttactatcacatctccgaggctcaaaacgtgagctcccacgtgccctatcccgttgctctccacgttaacattgtgaatgtgccccaacctgctgcggccgccatacagaggcactacaacgacgaggatcctgaaaaagagaagcggatcaaagagctggagctattactgatgagtaccgagaacgagttaaagggccagcaaactcagaatcacacctgctcttaccccggctggcatagcaccaccatcgcagaccataccaggccccacggagattccgcccccgtgtcttgtctgggcgagcaccatagtaccccgtctcttcccgcagacccgggcagcctccctgaggaaagtgcttctcccgcaagatgcatgatcgtacaccaggggacaattttggacaacgttaagaatcttctggagttcgccgagacactccagttcatagactcatttctgaatacctcttccaatcatgagaatagcgatctggaaatgccaagccttacttcgacacccctgataggccataagctcacggtgacaacgccttttcaccgcgatcagacagtgaaaacacagaaggaaaatactgttttcagaacccccgctatcaaacgctcaattcttgaatccagtcctcggacccctacacccttcaagcatgccctcgccgctcaggagattaaatatggccctctgaagatgctgccacaaacccccagtcatctggtcgaggatctccaggatgtgataaagcaagaaagtgacgagtcaggtatagtcgccgagttccaggagaatggtcctcccttactgaagaaaatcaagcaggaggtagagtcccctacagataaatctggaaatttcttctgctctcaccactgggagggcgactcgctgaacacacagttattcacacagacttcaccagtcgccgacgctcctaacatccttaccagttctgtgctcatggccccggcatccgaagacgaagacaatgtgttgaaggccttcactgtaccgaaaaataggagtctggcaagccccctccaaccttgctcttccacttgggagcccgcctcctgtggaaagatggaggaacagatgaccagcagttcacaagcccgaaagtacgtgaatgccttcagtgcacgtactctggtgatgtag

SEQ ID NO: 211308 - DNA, 240 bp, synthetic construct
  misc_feature 1..240: note = Description of Artificial Sequence: Synthetic coding sequence
  source 1..240: mol_type = other DNA
atggcccggcggccccggcacagcatctacagcagcgacgaggacgacgaagacttcgagatgtgcgaccatgattatgacgggttgctgcctaagagcgggaaaaggcaccttggaaaaacccgatggacccgagaagaaaaccgcacagacgtgcagtgtcaacaccggtggcagaaagtgctcaaccccgaactcattaaagggccctggaccaaggaggaagatcagaggaattag

SEQ ID NO: 211309 - DNA, 312 bp, synthetic construct
  misc_feature 1..312: note = Description of Artificial Sequence: Synthetic coding sequence
  source 1..312: mol_type = other DNA
atggcccggcggccccggcacagcatctacagcagcgacgaggacgatgaggactttgagatgtgcgatcatgactacgacggcctcctgcctaagagtggaaagagacacctgggtaagacacggtggacaagagaagaagacgaaaagctgaagaaactggtcgaacagaacggtactgacgattggaaagtgattgccaattatctgcccaaccgcactgacgtccagtgccagcacaggtggcaaaaagtgttgaatcccgagctcataaaaggcccctggaccaaggaagaggaccagagaaactag

SEQ ID NO: 211310 - DNA, 1818 bp, synthetic construct
  misc_feature 1..1818: note = Description of Artificial Sequence: Synthetic coding sequence
  source 1..1818: mol_type = other DNA
atggcccggcggccccggcacagcatctacagcagcgacgaggacgacgaggacttcgaaatgtgcgaccacgactatgatgggttgctgcctaagtccggcaagcggcaccttggcaaaacaaggtggacacgggaagaggacgagaagttaaagaaactggtggaacagaacggcaccgatgactggaaagtgatcgccaattatctgcccaatcgcactgatgtccagtgccaacacaggtggcagaaagtgctcaaccctgagctgattaagggcccctggaccaaagaggaagatcagcgagtgatagagttagtacagaaatatggtccgaagcggtggagcgtgattgccaagcatttaaaggggcgaattggcaaacagtgtcgcgaacgttggcacaatcaccttaacccagaggtcaaaaaaacatcttggaccgaagaagaggataggattatctaccaagcacataagcggcttggaaatcggtgggccgagattgcaaaactgctccccggccggactgacaatgctatcaaaaatcattggaactccaccatgagaagaaaggttgagcaagaggggtacctgcaagaatcaagtaaagcctcacagcccgcagtggccacctcattccagaaaaactcgcacctgatgggcttcgcacaggctcctcccaccgcccaactgcccgccacaggacagccaactgttaataacgactacagttactaccatatttccgaggcacaaaatgtgagcagccacgtaccataccctgtcgcactccacgtcaatatagtgaatgtgccacagcccgccgctgcagccatccagactcagaatcacacctgttcgtaccccggctggcactcaacaactattgcggatcacactagaccacatggcgattctgctcctgtgtcatgtctgggggaacaccactccacacctagcctccctgccgaccctggcagtttacctgaggagagcgcctctccagctcgctgcatgattgtgcatcaggggaccatcctcgataatgtaaaaaaccttctcgaatttgccgaaaccctgcagttcatcgattcttttttgaatacctcgtccaaccatgagaatagtgatctggaaatgcctagtttgacatccacacccctaatcgggcataagctcacagtcaccactcccttccacagggaccagaccgttaaaacccaaaaagagaacacagtatttagaacgcctgccataaagaggtctatcttggagtcttctccgcgtacgcccacaccgtttaagcacgcattggcggcccaggagatcaaatatggacccctgaagatgctcccccagactccctcccaccttgtagaggacctgcaagatgtgattaaacaggaaagcgacgagtcgggcatcgttgcggaattccaggaaaacggaccgcctctgcttaaaaagatcaagcaggaggtggaaagtcctacagataaatctggcaacttcttctgttcacaccactgggagggtgactcactcaacacccaactgttcacgcagacctcacctgtggcggacgctcccaacattttgactagtagtgtgcttatggccccggctagcgaggatgaagataacgtgctgaaggcgttcaccgtgccgaaaaatcgatctctcgcctctcctctacagccttgttcgtctacatgggaacccgcttcatgtggcaaaatggaagaacagatgactagctcctcccaggcgaggaagtatgtgaacgcatttagtgcgcgtacattagtgatgtag

SEQ ID NO: 211311 - DNA, 717 bp, synthetic construct
  misc_feature 1..717: note = Description of Artificial Sequence: Synthetic coding sequence
  source 1..717: mol_type = other DNA
atgctgaccaccctgctgcccatcctgctgctgagcggctgggccttctgtagtcaagacgcaagcgacggcttgcaacgtctgcacatgttgcagatatcctatttccgcgacccgtatcacgtgtggtaccagggtaacgctagtctaggtggccacctgacccatgtgctcgaagggccggacacaaacacaacaatcattcaactccaacctctgcaggaaccggaaagctgggcgcgaacccagagtggcctccagtcctatctgctgcaatttcacggcctggttcgtctggtgcaccaagagcgcaccctcgcgtttcccctgacaatcaggtgctttttaggttgtgagctgcctccggagggaagtcgcgcccatgtctttttcgaggtggcagtgaatggttcttccttcgtaagtttccgtccagaacgagcactgtggcaagccgacacacaggtaacttccggggtggtgacttttaccctgcaacagctcaacgcttacaatcgaacaagatatgaactgcgagagttccttgaggacacttgtgtacaatatgtccagaaacatatatctgctgagaataccaaaggttcccaaacgtctcggagttatacatccttggtgttgggagtgctggttgggagcttcattatcgcaggtgtcgccgtgggaatttttctctgcacagggggacggcgatgttag

SEQ ID NO: 211312 - DNA, 2031 bp, synthetic construct
  misc_feature 1..2031: note = Description of Artificial Sequence: Synthetic coding sequence
  source 1..2031: mol_type = other DNA
atgagccggcggacccggtgcgaggacctggacgagctgcactaccaggatacagactctgatgtccccgaacagcgcgactcaaaatgcaaggtgaagtggactcatgaagagaaccgtacagaccagcagtgccagtacaggtggttgcgggtgcttaatccagatctggtgaagggaccatggacaaaagaggaggatcagaaggtgatagaactagtcaagaagtatggcaccaagcagtggaccttgattgcaaagcacctcaaaggccgcctgggcaagcagtgtagagaaaggtggcataaccacctgaatcccgaagtcaagaagtcatgctggaccgaagaggaagacagaatcatttgcgaagcacataaagttctcggaaaccgctgggccgagattgccaaaatgctgccaggcaggacagataatgctgtcaagaaccattggaactcaaccattaaaagaaaagtagatacaggcggatttctgtctgaaagcaaggactgtaagccccctgtttacttgttgctggagctagaggacaaagacgggttacagtccgcccagcctacagaggggcaaggctccctgttaaccaactggccttccgtgcctcctacaattaaggaggaggagaatagtgaggaggagctggcagcagccacgactagcaaagagcaggagccgataggaacagatctggacgccgtcagaacgccagagcccctcgaagaattccctaagcgggaagaccaggagggctcccctcctgaaacaagtctgccatacaagtgggttgtggaggccgctaacctcctcatccccgcagttggatcctctctttccgaggcccttgatttaatcgaatcagaccctgacgcctggtgcgatctgagtaagttcgacctgcctgaggagcccagcgccgaggattccattaacaactcgctggtgcaattgcaggcgtctcaccaacagcaggtattgccaccccgacaaccaagtgcattggtgccttcggtcactgaatatcggctggatggacacacaattagtgatctgagtcgctctagtagaggtgagctgatcccaatttctccaagtacagaggttgggggatccggaatcggtaccccaccatcagtgctcaagagacagcggaagcgccgggtggcactatcaccagtgacagaaaactcgacaagcttgagcttcctcgattcatgtaactccctgacaccaaagagtactcctgtgaaaaccctgccctttagcccatctcaattcctcaacttctggaacaaacaggatactctcgagcttgaatcaccttccctcaccagtacaccagtctgtagtcagaaggtggtggtgaccaccccactgcacagagacaaaacaccactccatcagaagcacgctgcttttgttactccggatcagaaatacagcatggacaacacaccccatacaccaactccgttcaagaacgctttggaaaagtacggacctctgaaaccgctgccgcagactcctcacctggaagaggacctaaaggaagtgcttcgctctgaggccggcatagagttaattatcgaggacgatatcagacctgagaaacaaaagcgaaagcccggcctgagacgcagtcctataaagaaggtgagaaagtccctcgctttggatattgtggacgaagacgtaaaactgatgatgtctacactgcccaaatccctgagcttgcccaccacggccccatccaactccagttctctcaccctcagtggaattaaagaggataactctcttctcaaccagggttttctgcaagccaagcccgagaaagcggcagtcgcccaaaaacctcgctcacactttacgactccggctcccatgagttcagcctggaagacagtcgcatgtggaggaacaagggatcagctgttcatgcaagagaaggctcgacagctgttgggtaggctcaagccctcacacacctcccgaactctgattctctcttag

SEQ ID NO: 211313 - DNA, 1395 bp, synthetic construct
  misc_feature 1..1395: note = Description of Artificial Sequence: Synthetic coding sequence
  source 1..1395: mol_type = other DNA
atgcccagctgcagcaccagcaccatgcccggcatgatctgcaagaacccagacctggagttcgacagcctgcaaccctgtttttacccagacgaggatgatttttactttggaggccccgattccaccccccccggtgaggatatctggaagaagtttgagctgctgcctacccctccgttatccccctctcggggcttcgctgagcactcctcggagcctccaagttgggtcacagaaatgctgttggagaatgaactgtggggtagccctgctgaagaggacgcctttggattggggggcctgggtggcctcacccccaatcccgtgatcttgcaagattgtatgtggtccggcttctcagcaagggagaagttggaacgggcagtgagcgagaaactgcaacacggccggggcccccctaccgctggatccaccgcacaatcacctggggcaggcgccgctagtcctgctgggaggggacatgggggagctgccggcgctgggcgagcaggcgcagctctgcccgcagagctcgcccaccctgcggcagaatgcgtagaccctgcagtcgtatttcccttcccagtcaataagcgcgagccagcacccgtgccggctgccccggctagcgccccagcagcaggacctgccgtcgcatctggagcaggaatcgccgctcccgctggagcccctggggtggcaccccctcgcccggggggacgccagacttctgggggcgaccacaaagcactctcaactagcggagaagacaccctgagcgacagtgacgacgaggatgatgaggaggaagacgaagaggaggagatcgatgttgtcactgtggagaagagacggtcctcaagtaataccaaggcagtgactacattcacgatcactgtgcggcctaagaatgccgccctagggcccggccgagctcagagcagcgagcttatcctgaagcgctgcctgccgatacatcaacaacacaactatgccgcccccagtccttatgtcgagtcggaagacgcccctccccagaagaagataaaaagtgaagcctcccctcgacctctcaaaagtgtcatccctcccaaagctaagagcctgtccccgaggaactccgattcggaagactcggagagaagacggaatcacaatatactggagagacagcggagaaacgaccttaggagttcgtttctgaccctgcgggaccacgtccccgagctcgttaaaaatgagaaggccgcaaaagtggttattctgaaaaaagcaacggaatacgtgcactcactgcaagccgaggaacatcagttgcttttggagaaagagaaactgcaggctagacagcaacagctgctgaaaaagatagagcatgccagaacatgttag

SEQ ID NO: 211314 - DNA, 1149 bp, synthetic construct
  misc_feature 1..1149: note = Description of Artificial Sequence: Synthetic coding sequence
  source 1..1149: mol_type = other DNA
atgcccagctgcagcaccagcaccatgcccggcatgatctgcaagaatcctgacctggaattcgacagtctccagccttgtttttatcctgacgaagatgatttctatttcggtggcccagactctactcctccaggggaggacatatggaaaaaattcgagctgctgcctaccccacctttgtctccctcgcgagggttcgccgaacacagctccgaacctccctcatgggttacagagatgctgcttgaaaatgagttgtggggcagcccagcagaggaagacgcctttggcctagggggtctgggcgggctgactcccaatccggtaatactccaggattgtatgtggtccgggttctctgcaagagaaaaattagagcgggcggtgagcgagaagctacagcacgggcgtggcccccccacagccggtagcaccgctcagagccccggcgtggcacctccccggcccggaggtagacagactagcggtggtgatcataaggccctcagcacctcaggcgaggacaccctgagcgatagtgacgatgaggatgatgaagaagaagacgaggaggaggagatcgacgtggtgacagtggaaaagagaaggtcttcttccaacacaaaggccgtgactaccttcactatcacggtgcggcccaagaacgctgcactgggacccgggagggcccagtcaagcgaactcatcctgaagagatgtctgccaattcaccagcaacacaactacgcagcaccaagtccttacgtcgagagtgaagatgccccccctcagaagaaaatcaagagcgaggcgagcccacgacctttgaagtcagttattccccctaaggctaaaagcctgagccctagaaattctgactctgaggactccgagaggcgccgcaatcacaacatcctcgagcgacagcggagaaacgacctccgcagctccttcctgaccctccgcgaccacgtccccgagctcgtgaagaatgagaaagcggccaaagttgttattctcaaaaaggcaaccgagtatgtgcattcccttcaagccgaggagcaccaactcttgctggagaaggaaaaactgcaggcgcgacagcagcagctccttaagaaaatcgaacacgcccgcacatgttag

SEQ ID NO: 211315 - DNA, 852 bp, synthetic construct
  misc_feature 1..852: note = Description of Artificial Sequence: Synthetic coding sequence
  source 1..852: mol_type = other DNA
atggccgtgccccccacctacgccgacctgggcaagagcgcccgggacgtgtttacaaaaggatacggatttggactgattaagttggacctgaagaccaagtccgagaacggattggaattcaccagctctggatctgcaaacacagagacaactaaggtgaccggatctctcgagacgaaatacaggtggactgagtacggccttacctttaccgaaaaatggaacacagataacactcttgggacagagattactgttgaggaccagctggcacgagggcttaaattgacatttgattctagcttttctcccaacaccggtaaaaaaaacgcgaaaatcaagaccggctacaagcgcgaacatatcaatttgggatgtgacatggactttgatatagctgggccttccatcagaggcgctctcgttcttgggtacgaaggctggctggctggctatcaaatgaattttgagacagctaaatctcgagtgacccaatccaactttgccgtgggctacaagacagacgagttccaactgcacactaacgtcaacgacggcactgagttcggtggctctatttatcaaaaagtaaacaagaaattggagacagcagtaaatctggcttggactgctggaaactccaatacaagatttggaattgcggccaagtaccagatcgaccccgacgcatgctttagtgctaaggtgaataacagcagcctcatcgggctggggtatacgcagaccttgaaacccggcattaagctcacactgtcggccctgcttgatgggaaaaacgtgaacgcaggcggccataagcttggcctgggcctcgagtttcaggcatag

SEQ ID NO: 211316 - DNA, 852 bp, synthetic construct
  misc_feature 1..852: note = Description of Artificial Sequence: Synthetic coding sequence
  source 1..852: mol_type = other DNA
atggccgtgccccccacctacgccgacctgggcaagagcgcccgggatgtctttactaagggatatggctttgggctcatcaagctggatctcaagaccaaatctgaaaacggattggagtttactagcagtgggagcgcaaacactgagactacaaaagtaacaggatccctggaaactaaatacagatggacggaatacgggctgactttcacagaaaaatggaacacagacaatacattggggaccgagataacggtggaagatcaacttgcaagagggctgaaactaacctttgactcttcttttagtcctaacacagggaagaagaatgccaagattaaaactgggtataaaagggagcatattaatcttggctgtgacatggacttcgatattgccggtccaagtattcggggagccctggtcctcggctacgaagggtggttggccggctaccagatgaactttgagaccgctaaatctcgcgtcacccagtccaattttgccgtggggtataaaactgatgaattccagctccatacaaacgtgaacgatgggactgagtttggaggctcaatctatcaaaaagtgaacaaaaagcttgaaactgcagtgaacctcgcctggaccgcaggcaatagcaataccagattcggtatcgccgccaagtaccagatcgaccctgacgcctgcttcagcgctaaagtgaacaactctagtttaattggccttggttatactcaaaccctgaaaccagggatcaaacttactttatctgccctattagacggcaagaacgttaacgccggtggccacaagctgggcctggggctggagttccaggcgtag

SEQ ID NO: 211317 - DNA, 852 bp, synthetic construct
  misc_feature 1..852: note = Description of Artificial Sequence: Synthetic coding sequence
  source 1..852: mol_type = other DNA
atggccgtgccccccacctacgccgacctgggcaagagcgcccgggacgtgttcacaaaaggttacggctttggacttattaagctggatctaaagaccaagtccgagaacgggctcgagttcacttcgagtggttcagccaataccgaaactacaaaagtaacgggatctctggaaacaaaatacaggtggaccgagtacggcctgacattcaccgagaagtggaatactgacaataccctgggcacagaaatcacagttgaagatcaactcgccaggggcttgaaactaacattcgattcgtcctttagcccaaacaccgggaaaaaaaatgctaagattaagacaggctataagagagagcacataaatttgggctgcgatatggacttcgatatcgctggtccctccattagaggtgcactggtcctgggttatgaaggctggctggctggttaccagatgaattttgagacggcaaaatctagggtcacacagagcaattttgccgttgggtataaaactgacgagttccagctccacacgaacgtcaacgatggcactgagtttggaggaagcatttaccagaaagttaacaaaaagctggaaactgccgttaacctcgcatggactgcaggaaacagtaatacacggtttggaattgctgctaagtatcagattgacccagacgcctgcttctctgcgaaagtgaacaacagcagccttatcggccttgggtatacacagacactgaagcctggcattaaactcacgctctctgcccttcttgatggcaaaaacgtgaatgccggtggccataaactcggcctgggcttagagtttcaggcctag

SEQ ID NO: 211318 - DNA, 849 bp, synthetic construct
  misc_feature 1..849: note = Description of Artificial Sequence: Synthetic coding sequence
  source 1..849: mol_type = other DNA
atggccacccacggccagacctgcgcccggcccatgtgcatccccccgtcctatgctgacctgggcaaggccgccagggacatttttaataagggcttcggctttggcctcgtgaagttagatgtgaagaccaagagctgctccggggtagaattctccacctcaggatccagtaacactgacactggaaaagtcaccggtacgctcgagactaagtacaaatggtgcgagtatgggctcacatttacggagaagtggaacaccgataataccctcgggacagaaatagctatagaggaccagatctgccaagggttgaagttgacattcgacacaactttttctccaaacacagggaaaaaaagtggtaaaataaagagttcttacaagcgcgaatgcatcaacctgggctgcgatgtggatttcgacttcgctggacctgcgatccatggctcggccgtattcggatatgaaggatggctggcaggttatcagatgactttcgactcagcaaagtcaaaacttacacggaacaatttcgctgtcggttataggacaggagactttcagctgcatactaatgtgaacgacggtacagagttcgggggctcaatttatcagaaagtgtgtgaggatctggatacctcagttaacctggcctggacgagtggtacaaactgtacccggttcgggattgctgctaagtaccagctcgatcccaccgcctcaatctctgccaaagtgaataacagttccttaattggcgtgggctatacacaaactttgagaccaggggtgaaactgactctatcagcccttgtggacgggaaatctattaacgccgggtag

SEQ ID NO: 211319 - DNA, 930 bp, synthetic construct
  misc_feature 1..930: note = Description of Artificial Sequence: Synthetic coding sequence
  source 1..930: mol_type = other DNA
atgagctggtgcaacgagctgcggctgcccgccctgaagcagcacagcataggacgcggcctggaatcccacatcactatgtgtatcccaccctcttacgcagacctcggaaaagccgcacgggacattttcaacaagggcttcgggttcggactggtgaaactcgatgtgaaaaccaagtcatgttccggagtagagttctctacctcaggctccagcaatactgatacgggcaaagtcactggtaccctagagacgaagtataaatggtgcgagtatgggttgacctttaccgagaaatggaacaccgacaataccctgggaaccgagatcgcgatcgaggaccagatttgccaagggctaaaactgacattcgatacaacattcagtcccaatactggcaaaaagtcgggcaagatcaagtcatcatataagagagaatgtattaaccttgggtgcgatgtagattttgactttgccgggccggccatccatggctcagctgttttcggatacgaagggtggcttgctggataccagatgactttcgattcagccaagtcaaaactgactagaaacaactttgccgtggggtaccggaccggcgactttcagctacataccaatgtgaatgacgggactgaattcgggggctctatctaccagaaagtgtgcgaagatttggacacctccgttaatctcgcctggacctctgggaccaattgtacacgctttggtattgccgccaaataccagctagaccctacggcctctatttcagcgaaggtcaacaattcaagtctgataggagtgggatacacacaaactctgaggcctggtgtcaaactgaccctgtcagcgctggtggacggtaagagcatcaacgctggagggcacaaggttggtctggcactcgaattggaagcctag

SEQ ID NO: 211320 - DNA, 885 bp, synthetic construct
  misc_feature 1..885: note = Description of Artificial Sequence: Synthetic coding sequence
  source 1..885: mol_type = other DNA
atggccacccacggccagacctgcgcccggcccatgtgcatcccccccagctacgccgacttgggaaaagctgctcgggacattttcaataagggctttggatttggcctcgttaagctcgatgtgaagacgaaatcttgttccggagttgagttttccacctctggttcatctaataccgacaccgggaaggtgacaggcaccctagaaacaaagtataaatggtgtgagtatggccttacattcacggaaaagtggaataccgacaataccttgggaacagagattgccatcgaggaccagatatgtcaagggctcaaactcaccttcgacactactttctccccaaacacaggaaagaaaagcggaaagattaaaagctcttataagagggaatgcatcaatttgggatgtgacgtagatttcgactttgcaggtcctgcaatccatggcagtgccgtctttggctacgaaggctggctggcaggataccagatgacatttgactccgctaagagtaaactgacccggaataactttgccgtcggatacaggaccggggactttcagctacacaccaatgtcaacgatggaaccgagttcggcggatcaatctatcagaaggtgtgcgaggatctcgacacttccgttaacctagcctggacaagcggtactaactgcacaagattcggcattgctgccaaatatcagcttgacccaaccgcaagtatctctgctaaagttaataattcatccctcataggggtaggatacactcagacgctgcgacccggggtcaaacttaccttgagcgccctggtggatggtaagagcatcaacgccggaggacacaaggttggccttgcactcgagctagaggcctag

SEQ ID NO: 211321 - DNA, 588 bp, synthetic construct
  misc_feature 1..588: note = Description of Artificial Sequence: Synthetic coding sequence
  source 1..588: mol_type = other DNA
atggccacccacggccagacctgcgcccggcccatgtgcatccccccttcatacgcagacctgggcaaagcggccagagacatttttaataaagggttcggatttggcctcgtgaagctggacgttaagactaagtcttgttctggcgtggagttctccacctccggaagctctaacactgacacgggaaaggtaaccggtaccctggaaacaaagtacaagtggtgtgaatatggccttacctttacggaaaaatggaacacagataataccctggggacagaaatcgccattgaggatcagatctgtcaggggctgaaacttaccttcgatacgaccttctcccctaacacagggaaaaagtccgggaagattaagtcctcttataagagggaatgcattaacttgggctgtgacgtggatttcgacttcgctggcccggcaatccacggcagcgcggtctttggctatgagggttggctggctggatatcagatgaccttcgactccgcaaagtcaaagctgacccgcaacaatttcgccgttgggtacaggactggtgatttccagctgcacaccaacgtgtag

SEQ ID NO: 211322 - DNA, 330 bp, synthetic construct
  misc_feature 1..330: note = Description of Artificial Sequence: Synthetic coding sequence
  source 1..330: mol_type = other DNA
atgagctggtgcaacgagctgcggctgcccgccctgaagcagcactcgattggacggggactggagagccacattaccatgtgtattccaccctcatacgcagacctgggcaaggccgcccgtgatattttcaacaaaggcttcggcttcggcctagtgaagttggatgtgaagaccaaatcctgctctggcgtagagttctctacatccggctcatccaacacagacactggcaaagtgactggaacgctcgaaaccaaatataagtggtgtgaatacggtctgaccttcacggagaaatggaacaccgataacactcttggcacatag

SEQ ID NO: 211323 - DNA, 615 bp, synthetic construct
  misc_feature 1..615: note = Description of Artificial Sequence: Synthetic coding sequence
  source 1..615: mol_type = other DNA
atggccacccacggccagacctgcgcccggcccatgtgcatccccccaagttacgcagatctcggtaaagccgcccgtgatatttttaataaaggatttggcttcggccttgtcaagctggatgtcaagacaaagtcctgcagcggcgtcgagttctcaacgagcgggtctagcaataccgacaccggcaaagtcacaggaactctcgagaccaagtacaagtggtgcgagtacggtttgacattcactgagaaatggaacacggacaatacactgggcacagagattgcgatcgaggatcagatttgtcaaggcctaaagctcacctttgacacaacattctctccgaataccggcaaaaaaagcgggaaaatcaaaagttcctataaacgggagtgtatcaacctgggatgcgatgtggacttcgattttgccggccccgccatacatgggtctgcagtgtttggctatgaagggtggttagccggttatcagatgacgttcgatagtgcaaagagtaagctcacccgaaacaactttgcagtgggatataggaccggcgatttccagctgcacacaaatgtgaatgacgggacagaatttggtgggtcctag

SEQ ID NO: 211324 - DNA, 768 bp, synthetic construct
  misc_feature 1..768: note = Description of Artificial Sequence: Synthetic coding sequence
  source 1..768: mol_type = other DNA
atgctggtgatccccgccacccaggaggccgaggagttcagcacctctgggagcagcaataccgatactgggaaagttactggcacccttgaaactaagtacaaatggtgcgagtacggcctgacctttactgaaaagtggaatacggacaacacccttggcaccgagatcgccatcgaggaccagatctgtcagggattaaagctaacattcgacactactttctccccaaacacaggcaaaaagtcagggaagattaaatcttcatacaagagagagtgtattaacctcggatgcgacgttgatttcgatttcgctgggcctgctatccatggcagtgccgtttttggctacgaaggatggttagcaggataccaaatgaccttcgattccgctaagtccaagctcacccgaaacaacttcgctgttgggtaccgtactggcgatttccagttgcatacaaatgtgaacgatggcacagagtttggaggcagcatctatcagaaggtctgtgaagatctggacacatcggtgaatttagcctggacctcgggaacgaattgcacacgctttggcatcgctgccaaataccagttagatccaactgcttctatctctgcgaaagtgaacaactcctcactcatcggggtgggttacacacagacgctgcggcctggcgttaagctgaccctgagtgctctggtggatggaaagagcattaatgccggcggccacaaggttggcctcgccctggaactggaggcctag

SEQ ID NO: 211325 - DNA, 885 bp, synthetic construct
  misc_feature 1..885: note = Description of Artificial Sequence: Synthetic coding sequence
  source 1..885: mol_type = other DNA
atggccacccacggccagacctgcgcccggcccatgtgcatcccccctagttacgctgacttaggtaaagctgcacgcgatatttttaacaaggggttcggattcgggcttgtgaagttggacgtaaaaacgaaatcttgcagcggcgtcgagttttccacctccggctcaagcaatacagacaccgggaaagtgacagggaccctcgagaccaagtataagtggtgcgaatatggcctcaccttcacagaaaagtggaatactgacaacactcttggcacagagatagccatcgaagaccagatttgtcaagggctgaagttgacattcgacacaaccttcagtcccaataccggtaaaaagtccggtaagattaagtctagttataagagggagtgcattaacctcggttgcgacgtggattttgatttcgcagggcctgcgattcacggaagtgccgtgtttggttacgagggttggcttgctggttatcagatgacattcgactccgcgaagagcaaactcacccggaataatttcgccgttggttatagaaccggagacttccagctgcacactaatgttaacgatggtacggagttcggaggtagcatctatcagaaagtgtgtgaggacctggacaccagtgtgaacctggcatggacatccggtactaattgcacaaggtttggcatcgctgctaagtaccagttggatccaaccgcaagtatcagcgctaaggtgaataacagctccttaatcggagtcggatacacacagacccttcggcccggtgtcaaattgacgctttctgcactcgtagacgggaaatcaatcaatgcaggaggccacaaggttggcctggcactagagctggaggcttag

SEQ ID NO: 211326 - DNA, 852 bp, synthetic construct
  misc_feature 1..852: note = Description of Artificial Sequence: Synthetic coding sequence
  source 1..852: mol_type = other DNA
atgtgcaacacccccacctactgcgacctgggcaaggccgccaaggatgtgttcaacaaaggctacggctttggaatggtgaagatcgaccttaaaacgaaaagctgtagcggggttgaattctcaacatccgggcacgcttacactgacacgggaaaggccagcgggaatctggagacaaagtataaagtgtgtaattatgggttgacgtttactcagaagtggaacactgacaacacgctcgggactgaaatctcttgggaaaacaaactggctgaagggttaaagctgacactcgacacgatttttgttcccaacacagggaaaaagtcggggaaactcaaagcatcctacaagcgagattgctttagcgtgggatcgaacgtggatattgacttctcagggcctaccatttatggatgggccgttttggcatttgaaggctggcttgccggttaccagatgtctttcgatactgccaaatccaaactgagccaaaataacttcgcactgggatacaaagcagctgactttcagctacatacccatgtcaatgatggcactgagttcggcggatccatctaccagaaagtgaacgagaaaattgaaacgagcatcaatctggcttggaccgccggaagtaataacactaggttcggcattgccgccaagtacatgctggactgtcgtacttcactgtccgccaaggtgaataatgcgtccctcatcggcctgggctacacacaaacactgcgacccggagtcaaactgaccctgagcgctttaatcgacggcaaaaatttctctgcaggaggtcataaggtgggattgggattcgagcttgaggcatag

SEQ ID NO: 211327 - DNA, 855 bp, synthetic construct
  misc_feature 1..855: note = Description of Artificial Sequence: Synthetic coding sequence
  source 1..855: mol_type = other DNA
atgtgcaacacccccacctactgcgacctgggcaaggccgccaaggatgtgttcaacaagggttacggcttcggaatggtcaagattgacctgaaaacaaagtcatgttccggagtcgttgaatttagtaccagcggacacgcctatactgacaccggaaaagcaagtggtaacctagaaacaaagtacaaggtctgcaactacgggttaacattcacacagaagtggaacaccgataatacgctgggaacagaaatatcctgggaaaacaagctcgcggagggattgaaactcaccctggatacgatttttgtgccaaacacaggtaaaaagagcggcaagctgaaggcctcttacaagcgagactgcttcagtgtcggaagtaatgtcgatattgacttcagtgggccaaccatctatggatgggccgtgctggccttcgaagggtggctggccggatatcagatgagctttgatacagccaagtcaaaactttctcagaacaactttgctctcggatacaaggccgcagactttcagttacacacacatgtcaatgatgggacagaatttggcggctctatttatcagaaggtgaacgaaaaaatcgaaactagcatcaacctggcttggaccgcgggcagtaataacacccggtttggtattgctgcaaaatatatgcttgattgtcgtacttcacttagcgcgaaagtgaataacgcttcactaattggcctcggctatactcagactcttagacccggggtaaagctgacactcagcgccttaattgatgggaaaaacttctctgcaggaggtcacaaggttggtctggggttcgaactggaagcctag

SEQ ID NO: 211328 - DNA, 498 bp, synthetic construct
  misc_feature 1..498: note = Description of Artificial Sequence: Synthetic coding sequence
  source 1..498: mol_type = other DNA
atgtgcaacacccccacctactgcgacctgggcaaggccgccaaggacgtgttcaataaaggctacgggtttggcatggtgaaaattgacttgaagaccaaatcatgtagcggggttgagttctccacaagcggtcacgcgtatactgataccgggaaggccagcgggaacctggaaactaagtataaagtttgcaattatggtctgacgtttacgcagaagtggaatactgataacactctgggaacggagatctcatgggaaaacaaactggctgaggggctaaagttaacgctggacaccatctttgttcctaatactggtaaaaagtctgggaagcttaaagcttcttataagcgggactgtttctcagtgggatcaaatgtagacatagatttcagcgggcctaccatttacgggtgggctgtgttggccttcgaaggctggttggccggctatcagatgtctttcgacaccgctaagtctaagttgagctag

SEQ ID NO: 211329 - DNA, 855 bp, synthetic construct
  misc_feature 1..855: note = Description of Artificial Sequence: Synthetic coding sequence
  source 1..855: mol_type = other DNA
atgtgcaacacccccacctactgcgacctgggcaaggccgccaaggatgtgtttaataagggttatggattcggaatggtgaaaatcgacctaaaaacaaaatcctgttctggagtcatggagtttagcacttcagggcatgcctatactgataccggcaaggctagcggaaatctcgagaccaagtacaaggtgtgcaattacggcttgacattcactcagaagtggaatacagacaacacactggggactgaaatctcgtgggaaaacaagctagccgagggccttaaactgactttagacactatatttgttcctaacactggcaagaaatcagggaagctgaaggcctcgtacaaacgggactgtttctctgttggatccaacgtggatatcgatttttctggtccaactatctacgggtgggcagtgctcgccttcgagggatggttggccggttatcagatgagtttcgacacagccaaatctaaacttagtcagaataattttgctctgggctacaaggctgccgactttcagctgcatacccatgtgaacgacggaactgagttcggaggtagcatttaccagaaggtgaacgaaaaaatagagacttccattaacctagcgtggaccgccggctctaataatacacgttttggcattgccgcaaagtatatgctggattgtaggacttctctttccgctaaagtaaacaacgcgagcctgattggactgggatatactcaaaccctgcgccctggcgtcaagttgacactttctgcgctaatagacggcaaaaatttttccgcaggcggtcacaaggtaggattaggcttcgagctggaggcctag

SEQ ID NO: 211330 - DNA, 480 bp, synthetic construct
  misc_feature 1..480: note = Description of Artificial Sequence: Synthetic coding sequence
  source 1..480: mol_type = other DNA
atgtgcaacacccccacctactgcgacctgggcaaggccgccaaggacgtatttaacaaagggtacgggttcggtatggtcaaaatcgacctgaaaaccaaaagttgctccggcgtggagtttagcacctctggccacgcttacaccgacacgggaaaagcaagtggcaatcttgagactaaatacaaggtctgtaattacggtcttacattcactcagaagtggaataccgacaacacacttggaactgaaatcagctgggagaataagctggcggaaggcttgaagctgactttggatacaattttcgtgccgaacacaggtaaaaaaagcggcaagttgaaggcctcatataaaagggattgttttagcgtcggctccaacgttgatatagatttttctgggccaacaatttacggttgggccgtgttagcctttgaaggctggctggccggttatcagatgtctttcgatacctag

SEQ ID NO: 211331 - DNA, 1062 bp, synthetic construct
  misc_feature 1..1062: note = Description of Artificial Sequence: Synthetic coding sequence
  source 1..1062: mol_type = other DNA
atggtgggcgacaccctgaagctgctgagccccctgatgacccggtatttcttcctgctgttttacagcacagacagcagtgacttaaacgaaaaccagcaccccctcgattttgatgagatggcttttgggaaggtgaagtccggaatctcattcctgatccaaacaggcgttggcatcctgggcaactcattcctcctgtgcttttataatctgatcctgttcacaggccacaagctcaggccaaccgatctcatcctatctcagcttgcccttgcaaacagcatggtgctgttcttcaaaggtatccctcagactatggcagccttcgggttgaagtatttgctcaatgacaccggatgcaagtttgttttctactatcatcgggtcggcactcgggtgtccctcagcaccatttgcttgttaaatgggttccaggcaattaagctaaatccatcaatatgccgctggatggaaatcaagatcagatctccccgatttatagacttttgttgcttactctgctgggcccctcacgtgctgatgaacgcttctgtcctgttgctggtgaacggtcccctgaatagcaaaaacagcagtgctaagaacaactatggctactgctcgtacaaggccagcaaacgcttcagttccctgcatgccgtgctgtatttcagtccagacttcatgtccctgggcttcatggtgtgggcttccggcagcatggtgttcttcctgtaccgtcacaaacagcaggtgcagcacaatcactccaacagattgagctgccgccccagccaagaagcaagggctacacatacaataatggtcctagtgtcctccttctttgttttctactcagtccattcttttctcactatttggacaacagtggtagcaaatccgggccaatggatcgtaactaatagtgtgcttgtcgccagctgcttccccgctcgctcaccttttgtactgatcatgtcggacacccatatatcccagttttgttttgcctgccggaccaggaagacccttttccccaatttggtcgtgatgccttag

SEQ ID NO: 211332 - DNA, 594 bp, synthetic construct
  misc_feature 1..594: note = Description of Artificial Sequence: Synthetic coding sequence
  source 1..594: mol_type = other DNA
atggccgccgtgaaggacagctgcggcaagggcgagatggccaccggtaatgggcgcagactccatctgggcatccccgaagctgtattcgtagaagacgttgatagttttatgaaacagcccggcaacgaaactgccgacaccgtcttgaaaaagctcgatgagcagtaccagaagtataagtttatggagctgaatttggctcagaaaaaacgacgcttgaaaggacagatccccgagatcaaacagaccttggaaatcctcaagtacatgcagaagaaaaaggagtccaccaacagcatggagacacgctttttgctggctgataacctttattgtaaggctagtgtcccgcccaccgataaaatgtgcttgtggctcggggcaaatgtgatgctggaatacgacattgacgaagctcaggctctgctggaaaagaacctaagcacagccaccaagaatctcgatagcctggaagaagacttggactttcttcgcgatcagttcacaactacagaagtgaacatggcaagggtatacaactgggatgtgaagcgcaggaacaaagatgacagcactaaaaacaaagcatag

SEQ ID NO: 211333 - DNA, 579 bp, synthetic construct
  misc_feature 1..579: note = Description of Artificial Sequence: Synthetic coding sequence
  source 1..579: mol_type = other DNA
atggccccccagcccatgatccacacccagcagggcctgcggacctcaagcccctctacgccctctccggaacaccaagaggatgtggatagtttcatgaaacagcccgggaatgagactgcagataccgtgcttaagaaactggacgaacagtatcagaaatacaagttcatggagctgaacttagcacagaagaaacgacggctgaagggccagatccctgagatcaaacaaacactggaaatactgaagtatatgcaaaaaaagaaagagtctacaaacagcatggaaacccgattcctgctagctgataatctctactgcaaagcatcagttccgcctaccgacaaaatgtgtttgtggctgggggctaatgtgatgttagagtacgatattgatgaggcccaggccctcctagagaagaatctctccacggctaccaaaaacctggacagcttagaggaagatctggactttttaagggaccagttcacaacaacagaggtcaacatggcccgggtctataattgggacgttaaacggcgcaacaaggacgatagtaccaaaaacaaggcatag

SEQ ID NO: 211334 - DNA, 702 bp, synthetic construct
  misc_feature 1..702: note = Description of Artificial Sequence: Synthetic coding sequence
  source 1..702: mol_type = other DNA
atgcggccccagcagctgcacgccaccgagatcaccagcagcggcttccgccttgcctggcctcctctgttgactgctgacagtggctactacgtcctggaattagtgcccagcgctcagcccggcgccgcccgccggcaacagctccctgggaacgccacagactggatttgggcgggcttagatccagacacagattatgatgtggcattagtgcccgaaagcaacgtgaggctattgcgtcctcagatactaagggtgagaacccggcccggagaggccggacctggtgcctctggtccagagagcggtgccggcccagccccaacccagctcgcagcgctgccggcaccggaagaggcaggacccgagcgcatcgtcatttctcatgcgcgacctcgctccctcagggtttcctgggcaccagccttgggcagcgcagctgctcttgggtaccatgtccagttcggtcctctgagaggaggggaggcgcagcgcgtcgaggtgccagcaggtcgaaactgcaccacccttcagggcctcgcccccggtactgcatatctggttacagtgacggcagcctttaggagcggacgggagtctgctttaagcgctaaggcatgtaccccagatggcccccgccccagaccacgccccgtcccacgagcccctacccctggcactgcatctcgcgagccttag

SEQ ID NO: 211335 - DNA, 1338 bp, synthetic construct
  misc_feature 1..1338: note = Description of Artificial Sequence: Synthetic coding sequence
  source 1..1338: mol_type = other DNA
atgctgccctggaccgccctgggcctggccctgagcctgcggctggccttggctaggtccggagccgagaggggaccaccagccagcgcccctcggggcgaccttatgtttctactggattcctccgccagtgtgtcacactatgagttcagcagagtccgggagttcgtgggacagctggtcgcccccctgcccctaggcaccggagctcttagggcctctctggtccacgtagggagccgaccgtatacggaatttccttttggtcagcattctagcggagaggctgcgcaggacgctgtccgagcctctgctcagagaatgggagatactcatacagggttggcgctggtctacgcgaaggagcagctctttgctgaggcctctggggcccgccctggcgtgccaaaggttctggtgtgggtcacggatggtggcagctccgatcctgtaggcccacctatgcaagagttgaaggatctgggggtaaccgtgttcatagtatccacgggccgcggcaatttcctggagctcagcgccgccgcgagcgcgccagctgagaaacacttgcacttcgtggatgtggatgatttacacatcatcgtgcaagaactccgaggatcgatcttggacgctatgagaccacagcagctgcacgccacagagatcacatcttcaggattccggttggcttggccacctctcttgaccgccgacagcgggtactatgtgctagaactggtgccctcagcacagccaggggctgcgagaagacagcaactgcccggtaacgctacagactggatctgggcaggcttggatcccgataccgattatgacgtcgccttggtgcctgagtcaaacgtgaggctgttaaggccccagatcctgagagtgcggacaaggcctggtgaagccggacccggagcttctggcccggagtctggcgccggcccagcccccacacagctggccgctctccccgcaccagaagaagcaggccccgagcgaatcgtcattagccacgcaagaccacgatcacttcgggtaagctgggccccagctctcggaagtgccgccgcacttggctaccatgttcaatttgggccgctgcgagggggcgaagcacaacgtgtggaagtcccagcgggtagaaactgcaccacgctgcaggggctggcacctggaaccgcttatttagtgaccgtcaccgctgcttttcgatcaggtagagagtcagcgctgtccgccaaagcatgtacccccgatggacctaggccaagaccaagacctgtccccagggccccaactccaggcaccgcgagcagagagccatag

SEQ ID NO: 211336 - DNA, 195 bp, synthetic construct
  misc_feature 1..195: note = Description of Artificial Sequence: Synthetic coding sequence
  source 1..195: mol_type = other DNA
atgctgccctggaccgccctgggcctggccctgagcctgcggctggcgttagccagaagcggtgccgagagaggagctcagggccccgggcggcatcgcgtgcactgtcagcacaggccgcggcagctgcccggcgcggtgtctcgctgccttagcccctgtagggaggctcccgctctttgtggccggggatag

SEQ ID NO: 211337 - DNA, 978 bp, synthetic construct
  misc_feature 1..978: note = Description of Artificial Sequence: Synthetic coding sequence
  source 1..978: mol_type = other DNA
atgcccagcagcaccgccatggccgtgggcgccctgagcagcagcctcttggtgacttgctgtctaatggtggccctttgcagcccttccattccgctggagaaactggcccaggcccctgagcagcccgggcaggagaagagagaacacgcttcccgggacggcccaggcagggtcaatgaattaggacgaccagcccgcgatgaggggggcagcgggagagattggaaatctaagtccgggagaggccttgctggtcgagaaccatggtccaagctgaaacaggcttgggtaagccagggcggaggtgccaaagctggcgatctccaagtgcgcccacggggagacaccccgcaggcggaggcccttgccgctgccgcccaagatgccatcggccccgaactcgcgccgaccccggagcctcccgaggagtacgtttatccagactaccgcgggaaggggtgtgtggatgaatccggtttcgtctatgccatcggagaaaagtttgcccctggtccaagtgcatgcccgtgtctctgtactgaggaagggccgttatgtgctcagcctgagtgccctcgcctgcacccccggtgtatccacgttgatacctcccagtgttgcccgcagtgtaaggaaagaaaaaattactgcgagttccggggaaaaacctaccagacactagaagagtttgtagtctccccgtgtgagagatgcaggtgtgaggccaacggagaagtcttgtgcacagtttctgcatgtccacaaaccgagtgtgtcgatcccgtatacgagcccgaccagtgttgcccgatatgtaagaatggaccaaattgtttcgccgagaccgccgtaattcctgccggaagagaagttaaaacggatgagtgtacgatatgtcactgcacatacgaggaaggaacatggcgtattgaacgtcaggccatgtgtacacgccacgagtgcaggcagatgtag

SEQ ID NO: 211338 - DNA, 750 bp, synthetic construct
  misc_feature 1..750: note = Description of Artificial Sequence: Synthetic coding sequence
  source 1..750: mol_type = other DNA
atgaccagcgagaccctgtggtggctgatcaccctgaagaagcagctcggcgacaacgaagccattactcaggagattgtgggatgtgcccacctggaaaattacgcactcaagatgttcttgtacgccgataacgaagaccgagctggccgtttccacaaaaacatgattaagagcttttacaccgcttccctgctgattgacgtgattaccgtgttcggggaactcactgacgagaacgttaagcacaggaagtatgcaaggtggaaggctacttacatacataattgtctgaaaaacggggaaacccctcaggccggacccgtaggtatagaagaagataacgatatcgaagaaaatgaggacgccggggcggcttcattacccactcagccgacacagccctcttcctcatccacctatgatccgtcaaacatgccgagcggcaattataccggtatacagatccctccaggagctcatgcacccgccaacactccagcagaagtgccacactccactggcgtggcctcaaatacaattcagcctactcctcagaccattcctgcaattgacccagccctgtttaacacgatcagtcagggtgacgtcaggctgacccctgaggactttgccagggcgcagaagtattgtaagtacgcgggaagcgctctgcagtacgaggacgtatcaaccgcagtacaaaacctccaaaaggcactaaaactgctgacaaccgggagagagtag

SEQ ID NO: 211339 - DNA, 924 bp, synthetic construct
  misc_feature 1..924: note = Description of Artificial Sequence: Synthetic coding sequence
  source 1..924: mol_type = other DNA
atggccgccctggcccccctgccccccctgcccgcccagttcaagtccattcagcaccatctgcgaactgcgcaagaacacgacaagcgtgaccctgtggtggcatactactgccggctctatgccatgcagactgggatgaaaattgattccaagacacctgagtgccggaagttcctttccaaacttatggatcaactggaagccctcaaaaaacaacttggagacaatgaggctatcactcaggagatcgtcggctgcgcacatcttgagaactatgctttgaaaatgttcctctacgccgacaacgaagaccgcgccggacgctttcacaagaatatgattaagtctttctacaccgcttcacttctgattgatgtcattaccgtattcggcgagttgacagatgagaacgttaaacaccggaaatacgcccgctggaaagctacttatatccataactgtctaaagaacggtgaaactccacaggctggtcccgtgggcatcgaggaggacaacgacatagaagaaaacgaagatgccggagccgcaagccttccgactcaacctactcaaccctcgagctccagcacctatgacccatctaatatgccatccggaaattatacaggcatccagatccctcctggagctcacgcacctgccaacacacccgccgaagtcccccactctaccggggttgcctctaatactatacagccaactccccagacgattcctgccatcgatccagctttatttaatacaattagccagggtgatgtgcggcttactcctgaggactttgctcgcgcacagaagtactgtaaatatgcggggagcgctctccaatacgaggacgtgtccactgcagtgcagaatctgcagaaggcactaaaattgttaactacaggtagggaatag

SEQ ID NO: 211340 - DNA, 663 bp, synthetic construct
  misc_feature 1..663: note = Description of Artificial Sequence: Synthetic coding sequence
  source 1..663: mol_type = other DNA
gagatggccgccctggcccccctgccccccctgcccgcccagttcaagtccatccagcatcatctaagaaccgcccaggaacacgataaacgtgatcccgttgtggcttactattgccgtctttatgccatgcagactggtatgaagatcgacagcaaaacgcctgagtgtcggaagttcttgtccaaactgatggatcagttggaggctcttaagaagcagttgggggataacgaggcaatcacccaggaaattgtgggatgcgcccatctggagaattatgctcttaagatgtttctctacgccgacaacgaggatcgtgcagggcggttccacaaaaatatgatcaaaagcttttatacggcttctctactcatagacgttatcaccgtcttcggcgagctgaccgatgagaatgttaagcatcgcaagtatgcgagatggaaagcgacttatatccacaattgtaaagaatggggcgatagttcatctagaccatgttggttaaaaaaaatcatgattctgaaaaaaatgaaaatgctcgagcagccactgtgtccgttatcgcagctgtctcatcatcatctacagctgatgacccagcatgccattcgccagttatactggaatacagacagtagcgggtgtacccggagtagctag

SEQ ID NO: 211341 - DNA, 669 bp, synthetic construct
  misc_feature 1..669: note = Description of Artificial Sequence: Synthetic coding sequence
  source 1..669: mol_type = other DNA
atgaccagcgagaccctgtggtggctgatcaccctgaagaagcagctaggtgacaacgaagccatcacgcaagaaatagttggatgtgcccacctggagaactacgccctgaagatgttcttgtacgctgacaacgaggatagagccggtaggtttcacaaaaatatgatcaagagcttctatacagcatctcttttaattgatgtcataacagttttcggcgagttgactgacgagaatgtgaagcacaggaagtatgctcggtggaaggcaacctacattcacaactgtctgaagaatggcgaaaccccacaggctggacccgttggcattgaagaagataatgatattgaagaaaatgaggatgccggggctgcctcactcccgacccagcctactcaaccatcaagtagcagtacctacgaccccagcaatatgccctcgggcaactataccggaatccagatcccccccggcgctcatgctccagcaaatacaccagccgaggtaccccatagcaccggagatgtaagactcacacctgaagacttcgcaagagcgcaaaaatattgtaaatatgcgggatcagcgttgcaatacgaggatgtgtccacagcggttcagaacctgcagaaggctctgaaactgcttacaaccggccgagagtag

SEQ ID NO: 211342 - DNA, 621 bp, synthetic construct
  misc_feature 1..621: note = Description of Artificial Sequence: Synthetic coding sequence
  source 1..621: mol_type = other DNA
atggccgccaacaagcccaagggccagaacagcctggccctgcacaaggtgattatggtgggcagcgggggggtcgggaaatctgcactcactcttcagttcatgtatgacgagtttgttgaagactacgagcctacgaaggccgatagttaccggaaaaaggtcgttctggacggggaggaggtacagattgatatcctggataccgcgggacaggaggattatgccgctattagggacaactatttccgtagcggagagggctttctctgcgtgttctctatcacagaaatggagtcatttgccgcaacggctgattttcgcgagcagatcctccgggtgaaggaggacgagaacgtgcctttcctccttgtgggaaacaagtctgatctagaagataagcgtcaggtctctgtggaagaggcaaaaaacagagctgaacaatggaatgtaaactatgttgaaacatcagccaaaacacgtgcgaatgtcgataaagtcttcttcgacttaatgagagaaattcgggctcggaaaatggaagactctaaagagaaaaacggcaaaaagaagaggaaatctcttgcgaaacgcatccgggaacggtgttgcatactttag

SEQ ID NO: 211343 - DNA, 306 bp, synthetic construct
  misc_feature 1..306: note = Description of Artificial Sequence: Synthetic coding sequence
  source 1..306: mol_type = other DNA
atggccgccaacaagcccaagggccagaacagcctggccctgcacaaagtcatcatggttggaagcggaggcgttggtaagtccgcgttgaccctacagtttatgtacgatgagttcgtggaggactatgagccaaccaaagcggatagctacaggaaaaaggtggtgcttgatggggaagaagttcagattgacatccttgatactgccggacaggaggattatgcagccatacgtgataactacttcaggtccggcgaaggcttcctttgtgtgttctcaataacagagatggaatccttctag

SEQ ID NO: 211344 - DNA, 621 bp, synthetic construct
  misc_feature 1..621: note = Description of Artificial Sequence: Synthetic coding sequence
  source 1..621: mol_type = other DNA
atggccgccaacaagagcaagggccagagcagcctggccctgcacaaggtgattatggtaggctccgggggagtgggcaagtcagccctgactttgcagtttatgtacgatgaattcgtggaggactacgaacccacgaaggctgactcgtatagaaaaaaggtcgtgttggatggagaagaagtccaaatcgacattctcgataccgctggccaggaggattacgctgcaattagggacaattattttcgctcgggagagggttttctgctggtgttctcaatcaccgagcatgaaagctttacagctacagctgagtttagagagcagatcctgcgagtgaaggctgaggaggacaaaataccactgttagtcgtggggaacaagtccgacctggaagagaggcggcaagtgcctgttgaggaggctcgatctaaagctgaggagtggggtgtccagtatgtggagacatccgctaaaactagagctaatgtggacaaagtgtttttcgacctgatgagagagatccggaccaagaagatgtctgaaaataaagataaaaatggcaagaaaagttcgaaaaataaaaaatcattcaaagaaagatgttgtctcctgtag

SEQ ID NO: 211345 - DNA, 684 bp, synthetic construct
  misc_feature 1..684: note = Description of Artificial Sequence: Synthetic coding sequence
  source 1..684: mol_type = other DNA
atggccgccaacaagagcaagggccagagcagcctggccctgcacaaggttatcatggtaggctcagggggcgtgggcaaatctgccctgacgttgcagttcatgaatgtgtctaagtcactggcctatgacaaaaaaaaatacacagccaataagaaggtggaaggaattctggaatttgtggaggactacgagccaaccaaggccgattcctatcgcaaaaaggtggtcttggatggcgaggaggtccagattgacatcctcgatacagcaggccaggaggactacgccgccattagggataactacttcaggtcaggggagggtttcttgctggtattctccataacagagcacgaatcatttactgccaccgccgagttccgagagcagattctgagggtcaaggcggaggaagataagatcccacttttggtcgtcggaaacaaatccgacctcgaagagaggcgacaagtgcccgtggaggaagcgaggtctaaagccgaggagtggggcgtgcaatacgtcgagacttctgcaaaaacacgcgcaaacgtagataaagtgttcttcgacttgatgcgtgagatcagaacgaagaaaatgagtgagaacaaggacaaaaacggaaagaagagctcgaagaataaaaagtcatttaaggaacgatgctgcttactttag

SEQ ID NO: 211346 - DNA, 504 bp, synthetic construct
  misc_feature 1..504: note = Description of Artificial Sequence: Synthetic coding sequence
  source 1..504: mol_type = other DNA
atggccgccaacaagagcaagggccagagcagcctggccctgcacaaagtcatcatggttggatcaggcggcgtcggcaagagtgcattaacactccagttcatgtacgacgaattcgtggaggattatgaacccaccaaggcagactcatataggaaaaaggtagtgctcgacggtgaggaagtgcagatcgacatcctggacactgccggtcaggaggactatgctgctatccgagacaactattttagatcaggagagggattcctgctcgtcttctccataactgaacacgagagctttactgcaactgccgagtttcgcgaacagatacttagggtgaaggcggaggaggacaagataccccttttggtcgtgggaaacaaaagcgacctggaggagcggcggcaggttccggtggaggaagcaagatctaaggcagaagagtggggagttcaatacgtcgaaacctctgcgaagactcgagctaatgtggacaagtag

SEQ ID NO: 211347 - DNA, 621 bp, synthetic construct
  misc_feature 1..621: note = Description of Artificial Sequence: Synthetic coding sequence
  source 1..621: mol_type = other DNA
atggccgccaacaagagcaagggccagagcagcctggccctgcacaaagttattatggttggctccggcggggttggcaaaagcgcattgacgctgcaatttatgtatgacgagtttgtagaagactatgaaccgaccaaggctgatagctaccgtaaaaaggtggtgctggacggagaggaagttcagattgacattctggacacggccgggcaggaggattacgctgccatccgcgacaattactttcgttccggcgaaggctttctcttggttttcagcataactgagcacgaatcattcactgccacagctgaattccgagagcagattctgcgggttaaagccgaagaggataagatccctcttcttgtcgttggtaacaagtccgacttggaagaacgacgccaagttccagtggaggaggcacgttcaaaagcagaggagtggggtgttcagtatgttgagaccagcgccaaaacccgcgcaaatgtagacaaggtgtttttcgatctgatgcgggaaatccgcactaagaaaatgtcggagaataaagataaaaatggaaagaaaagtagcaaaaataagaagtcttttaaagagcgttgctgtctactctag

SEQ ID NO: 211348 - DNA, 687 bp, synthetic construct
  misc_feature 1..687: note = Description of Artificial Sequence: Synthetic coding sequence
  source 1..687: mol_type = other DNA
atgaagcagcggcagagcgccctgcagtgggtgatctgcgtgagccaacctcagaagacatccgagatggcagcaaataagagtaaaggtcagagctccttggccctgcataaagttatcatggtcgggtctggcggcgttgggaaatcagccctgaccttacagtttatgtacgacgagttcgtcgaagactacgaaccgaccaaggccgattcgtatcgtaaaaaggtcgtgctggatggcgaggaggtgcagatcgatatcctcgacacagcgggtcaagaagactatgcagcaatcagggacaattacttccgatctggcgaagggtttcttttagttttctctataactgagcatgaatcttttaccgccacagctgagtttagagaacagattctgcgagtcaaggctgaggaagataagatcccactcctggtcgtgggcaataagtccgacttagaggaaaggaggcaagtacctgtagaagaagcgaggtccaaggccgaggagtggggcgttcaatatgtggagaccagcgccaaaaccagagcgaacgtggataaggtgttttttgatctcatgcgcgagatccgtactaaaaaaatgtccgagaataaagacaagaacggcaaaaaatctagcaaaaacaaaaagtccttcaaagagcggtgctgtctgctttag

SEQ ID NO: 211349 - DNA, 1860 bp, synthetic construct
  misc_feature 1..1860: note = Description of Artificial Sequence: Synthetic coding sequence
  source 1..1860: mol_type = other DNA
atggccagcggcgcctacaacccctacatcgagatcatcgagcagccacgtcagcgcggaatgaggttccgctataaatgcgaggggaggtcagctggcagcataccaggcgagcactccacggacaacaacaggacatacccctcgatccagatcatgaactattatggaaagggcaaggtgcgaattactctggttactaaaaatgacccttataaaccacacccccacgaccttgtgggcaaggattgcagggatgggtactatgaggctgaattcggccaggaacgtagacccctgttcttccagaatctgggaatccgttgcgtgaaaaagaaggaggtcaaggaagcgatcatcacacggatcaaagctggaataaatcctttcaatgttcctgagaagcagctgaatgatattgaggactgcgatttgaatgtcgtccggctctgttttcaagtattcttgccagatgagcatgggaatctgaccaccgcacttcccccagtggtgagtaaccccatttacgacaaccgggctcccaatactgccgaattacgaatctgcagggtgaataagaattgcggatcagttcgcgggggtgacgaaatctttcttttatgtgacaaggtccagaaagatgatatagaggtgcgtttcgtcctgaacgattgggaggcaaagggtatcttctcccaggcggacgtgcacagacaggttgcaattgtcttcaaaacccctccctactgcaaggctatcactgagcctgtgactgtcaaaatgcagctgaggcggcccagcgatcaggaagtctcagagtctatggactttcggtatctgcctgatgagaaagacacctatggcaataaggctaagaagcagaaaaccaccctgttgttccagaagttgtgccaggatcacgtggagactggcttccgccatgtggatcaagacggcctggaacttttaacctcaggcgaccccccaacacttgccagtcagagtgctggaattaccgtcaatttccctgaaaggccccggccagggcttctcgggagcataggggagggtcgctacttcaaaaaggaaccgaatttattttcccatgacgctgttgtgcgagaaatgccaacgggcgtaagctctcaggccgagagctactatccttcacctggccccattagcagcgggctgagccaccacgcttcaatggccccactgccatcttcctcgtggagctccgtggcccatcccacccctaggtccggaaacacaaaccctctgagcagtttcagtactagaaccctgccttccaacagccaggggatcccaccctttttgagaattccagtcggtaacgatctgaatgcttccaacgcatgtatttacaataatgctgacgatattgtgggaatggaagcttcctcaatgccctcagctgacctttacgggataagcgaccctaacatgctttctaactgctctgtcaatatgatgactacgtcaagcgatagcatgggagagaccgacaatccccgcctgttaagcatgaacctggaaaacccgagctgcaatagtgtgctggatccgcgcgatcttcggcaactccaccagatgagtagcagttctatgagtgctggggcgaactctaacaccactgtgttcgtttcgcagtctgacgccttcgagggcagcgacttttcttgtgcagacaatagcatgataaatgagagtggtccaagcaactctaccaaccctaactcccacggttttgtgcaggattcgcagtactccggaattggctcaatgcagaacgaacagctttccgacagttttccgtacgaattttttcaggtctag

SEQ ID NO: 211350 - DNA, 1764 bp, synthetic construct
  misc_feature 1..1764: note = Description of Artificial Sequence: Synthetic coding sequence
  source 1..1764: mol_type = other DNA
atggccagcggcgcctacaacccctacatcgagatcatcgagcagcctaggcaacgggggatgagattcaggtacaaatgtgaggggcgatccgccggtagcatccccggtgagcacagtaccgacaataataggacatatccctcaatacaaatcatgaactattacggcaaagggaaggttcggatcacattggtcaccaaaaacgatccatataaaccgcacccacatgacctcgtgggcaaggattgtcgggatgggtactatgaggctgaattcgggcaagagcgccgtcccctgtttttccagaatttgggcatcaggtgtgttaagaaaaaagaagtgaaagaggccatcatcacacgcattaaagctgggatcaatccgtttaacgttccggagaaacagctcaatgatattgaggattgtgatctcaatgtagtaagactctgctttcaggtctttcttccagacgaacacggcaatctgaccactgccctgccaccagtggtctccaacccaatatatgataacagagcccctaacacagcggagctccggatttgcagggttaataagaactgcgggagcgtgcgtggcggcgatgaaatcttcctgttgtgcgataaggtccagaaggacgacatcgaggttaggttcgtccttaatgactgggaggcgaaaggcatctttagtcaggcagacgtacaccgccaagtcgcaattgtctttaaaaccccgccatattgtaaggcaataacagaaccagtaaccgtgaagatgcagctgagacgcccgtctgaccaggaagtgtccgaatctatggattttagatacttgcctgacgagaaggacacctacggtaataaggcaaagaaacaaaagaccactctgttgttccagaaactgtgccaggatcacgtgaacttccccgagcggcccagacctggtctgctgggcagcattggagaggggcgatattttaagaaggagccaaacctgttctcccatgacgccgttgtccgggagatgccgaccggagtgtctagccaggccgaatcatactaccccagcccaggcccaatcagttccggtctcagccaccacgcaagcatggccccattgccatcatcctcttggtccagtgtggctcaccctactcccagatcaggcaacactaatccgcttagctctttctcaacaagaactctgccgagcaatagtcaggggatcccccccttcctgagaatccctgtcggcaatgacctgaacgcctccaacgcatgtatctacaataatgctgatgacatcgttggtatggaggccagttcaatgccttccgctgacctttatggtatctctgatcctaacatgttaagcaactgtagtgtgaacatgatgacaacgagtagcgactcaatgggagagacagacaatccgagattgctcagcatgaacctggagaacccatcctgtaattctgtgctggaccctcgtgacctgcgtcaactgcaccagatgtcatccagctccatgtctgccggcgcaaatagcaatacgaccgtgttcgtaagccagtccgacgcatttgaggggtctgatttctcatgcgctgataatagcatgattaacgagagcggaccaagcaattcgactaatccaaactcccacgggttcgtgcaagactcccaatactctggtattggaagtatgcagaacgagcagctcagtgactccttcccctatgagtttttccaggtttag

SEQ ID NO: 211351 - DNA, 1647 bp, synthetic construct
  misc_feature 1..1647: note = Description of Artificial Sequence: Synthetic coding sequence
  source 1..1647: mol_type = other DNA
atggacgagctgttccccctgatcttccccgccgagcccgcccaggccagtgggccttatgtggagattattgaacagccaaagcagcgtggcatgcggtttagatataagtgtgagggccgatctgccggctccattcccggggagaggagcaccgacactaccaagacacatccgaccattaagattaatggctataccggccctggaaccgtccgcatctcccttgtgactaaggatcctccacatcgacctcatcctcatgaattggtcggcaaggattgccgtgacggattctacgaagcagaattgtgccccgaccggtgtatccacagtttccaaaacttgggcattcaatgtgttaaaaagcgggatctggaacaagcaatatcccagcggatccagactaataataatcctttccaggaggagcagcgaggggactatgacttgaacgcggtccggctgtgctttcaagttaccgtgcgagatccctcaggaagacccctcaggctgccccctgtgttgtcacaccccatatttgacaaccgggcccctaataccgcagagcttaagatctgtagagtgaaccgcaattcaggctcctgtctcggcggcgacgagatttttctcctctgcgataaggttcagaaagaggacatcgaagtctatttcaccggtccaggctgggaagcccgcgggtcatttagccaggccgatgtgcataggcaggtggcaattgtcttcagaacaccaccctacgccgatccctccctgcaggccccagtgagagtgtctatgcaactgaggcggccgtccgatagggaactctcagagcctatggagtttcagtacctgcccgatactgatgaccgtcaccgaatagaggagaagaggaagaggacttatgagacattcaaatccataatgaaaaaatcccctttttcaggacccaccgatcctagaccaccccctcgccgaattgccgtgcccagccgctccagcgctagcgtccccaagccggcacctcagccgtacccttttacttcgagtctctctacaatcaattatgacgagtttcccaccatggtctttccatccggacagatctctcaggcgagtgcgctggccccagcccctcctcaggtgctgccacaggctcccgcccctgcaccagctccggccatggtgtccgcactggcgcaagcgcctgcccctgtcccagtcctggccccaggaccaccacaggcagtggcaccaccagcacccaagccgacgcaggctggcgagggaacacttagcgaagctctcctgcagctccagtttgatgacgaggaccttggtgcactgcttggtaacagcaccgaccccgccgtgttcacagacctggcctctgtggataattctgagttccagcagttactgaaccaagggatccccgtggcaccacacactaccgagcccatgctgatggagtaccctgaggctataacccgcctcgtcaccggggcacagaggcctcctgacccagccccagcaccacttggagcacccggcctgccaaacgggttacttagtggagacgaggatttttctagtattgccgatatggacttctccgcacttctgtcacagatctctagttag

SEQ ID NO: 211352 - DNA, 1656 bp, synthetic construct
  misc_feature 1..1656: note = Description of Artificial Sequence: Synthetic coding sequence
  source 1..1656: mol_type = other DNA
atggacgagctgttccccctgatcttccccgccgagcccgcccaggcctccggaccatatgtggaaattatcgagcagccgaagcaaaggggcatgaggtttagatataaatgtgagggccgctcggcgggctcaattcctggtgagcggtccacagacaccactaaaacacaccccactataaagatcaacggctacaccggccccggtaccgtacgaatcagtctggtgaccaaagatccccctcatcggcctcacccgcacgaactagtggggaaagattgtcgagacggtttctacgaagctgaattgtgccctgaccgctgcattcacagtttccagaatctgggcatacagtgtgtcaagaaacgtgacctcgaacaggctatttcacagagaatacaaaccaataataaccccttccaggtaccaatcgaggagcagagaggagactatgatcttaacgccgttcggctgtgctttcaggtgactgtgcgcgacccgagcggacgccctctgagactcccccctgtcctctcacatcctattttcgataatcgcgcacccaataccgctgagttaaagatttgtagggtaaataggaattccggatcctgcctcggcggcgacgagatctttctgctctgtgacaaggtccaaaaagaggacattgaagtctatttcactggaccagggtgggaggcccgtggctctttctcccaggccgacgttcatcgacaggttgctatcgtctttcggacccctccctacgctgatcctagtttgcaggctcctgttcgggtttcaatgcagctgcggagaccgtctgatagagaactaagcgaacctatggagtttcagtacttacctgatacggatgaccggcaccgcatcgaggagaagcgtaagcggacttatgaaacattcaaaagcatcatgaagaagtctccattttcagggccaactgaccctagacctccccctaggcgcatcgcagttccctcgaggagcagcgcaagtgtgcctaaacctgcaccccagccatatcctttcactagctcccttagtacaataaattacgacgaattcccaactatggtctttcccagtgggcagataagtcaagcttcagcccttgctcctgctccgccgcaggtcttacctcaagctccagctcccgctcccgcccctgcaatggttagcgccctggcccaggctcccgcaccagtacccgttctcgcaccaggccctccacaggctgtggccccacccgctccgaaacctacccaggccggagaagggaccctcagcgaggctcttctccaacttcagtttgatgacgaagatctcggggccctgctgggcaattctactgacccagccgtgttcacagatttggcatccgttgataattccgagttccagcaactgctgaaccaggggataccagtcgctccccacaccaccgaacctatgctcatggagtaccctgaggctattacccgcctggtgacgggggcccagcgccctccagatcctgcaccggccccacttggggctccggggctgcccaacggactgttaagtggagatgaagacttcagctccattgctgatatggacttctctgcactgcttagccaaatttccagctag

SEQ ID NO: 211353 - DNA, 741 bp, synthetic construct
  misc_feature 1..741: note = Description of Artificial Sequence: Synthetic coding sequence
  source 1..741: mol_type = other DNA
atggacgagctgttccccctgatcttccccgccgagcccgcccaggcttccggcccttacgtagagattatcgagcagcccaagcaaaggggcatgcggtttagatacaagtgcgagggtagatcagcaggtagcatcccgggcgaacggtccactgatacaacaaaaacacatcccaccatcaagatcaacggttacacagggcccggaacggtgcggatatccttggtcacgaaagatcccccacaccgccctcaccctcatgagctcgtaggtaaggattgtcgagatggcttctacgaggcagaattgtgcccggaccgctgtatccatagcttccagaacctggggattcagtgcgtgaagaaacgagacctggaacaagccatctcccaacgtatccaaacgaacaataaccctttccaggtacctatcgaggagcagcggggcgactatgatctgaacgcagtccggctgtgcttccaggttaccgttcgcgacccctccggcaggcctctgcggcttccacctgtgctatcccatcctatcttcgacaacagggctccaaacactgcagagctaaagatttgtcgtgtgaatcgtaacagcggatcatgcctggggggggacgaaatcttcctattatgtgacaaagtccaaaaggaggatatagaggtgtgcccccaggcctcaacaccagcactatccctgtacgtgatccctgaacaccaccaactgtag

SEQ ID NO: 211354 - DNA, 1134 bp, synthetic construct
  misc_feature 1..1134: note = Description of Artificial Sequence: Synthetic coding sequence
  source 1..1134: mol_type = other DNA
atggacgagctgttccccctgatcttccccgccgagcccgcccaggcctctggaccctatgtggagattatcgagcaaccaaagcaacggggtatgcgatttcggtacaaatgtgagggtcggagtgcaggctccattcccggggagagatcaacggacactactaaaacacaccctaccattaagattaatggatatacaggacccggtactgttagaatatccctcgttaccaaggacccccctcaccggccccacccgcacgagctggtgggtaaagattgccgggacggattctatgaagcagaactgtgccctgaccgatgcatccactcatttcagaatctcggcatccaatgcgtcaaaaaaagggatcttgagcaggctataagccagagaatccagaccaacaataacccctttcaggtgcctatcgaggaacagcggggggactatgatctgaacgccgtcaggctatgtttccaggtaacagtccgagatccctcaggcagacctctgaggctccctccagttctgtcgcacccaatcttcgacaacagagcacctaatacagctgagctgaaaatttgtcgagtgaaccgcaatagcggttcctgtttaggaggggacgagattttcctgctctgcgataaggtgcagaaggaggacattgaagtgtatttcaccggccccgggtgggaggcacgaggtagtttcagtcaggcagacgttcacagacaggtcgccattgtctttaggacacccccctacgccgatccctccctgcaggcccccgtgagggtgagtatgcagctaaggcggccttccgacagggagctgagcgaacccatggagttccagtacctcccagatacagacgacagacaccggattgaggaaaagcggaagcggacatatgagactttcaagtccatcatgaaaaaatcaccattttctggcccaacggatcctaggcccccccccagaagaattgccgttccctcaagatccagcgccagcgtccctaagcctggtaaagacttcctccttagtcactggaacgataggttcagctccgttcagctcagaagcagtggtgacgaggactcttgggctcccctccagacctactag

SEQ ID NO: 211355 - DNA, 714 bp, synthetic construct
  misc_feature 1..714: note = Description of Artificial Sequence: Synthetic coding sequence
  source 1..714: mol_type = other DNA
atggacgagctgttccccctgatcttccccgccgagcccgcccaggccagcggcccttacgtggagattattgaacagcctaaacaacggggaatgcggttccgctataaatgcgagggccgcagtgcgggctcaatccccggcgaacgcagtaccgacacaacaaagacacaccccacgatcaaaatcaacggatatacagggcctggtaccgttcgcatcagcctcgtgacgaaggacccgccacatcggccccacccgcacgagctagttggcaaggattgccgcgacggcttctacgaggctgagctatgtccagacagatgcatccatagcttccagaatctcggcatccagtgcgtaaagaagcgcgaccttgaacaggctatcagccagaggatccagacaaataacaatccatttcaggtgcccatcgaggagcagcgcggcgattatgatttaaacgcagttagactttgctttcaggtgactgtgagggacccaagcgggaggcctctgcgactgcctccggtactgtcacacccgatctttgacaatcgagcccctaacacagcggagctcaagatctgccgagtgaacaggaacagcggctcctgccttggcggcgatgaaattttccttctgtgcgacaaagtccaaaaggcgcacggaatcccagttcctgctcgttacaggcggtcgtcacccgattag

SEQ ID NO: 211356 - DNA, 1278 bp, synthetic construct
  misc_feature 1..1278: note = Description of Artificial Sequence: Synthetic coding sequence
  source 1..1278: mol_type = other DNA
atggacgagctgttccccctgatcttccccgccgagcccgcccaggccagcgggccgtacgtcgaaataatcgagcaaccaaagcagagaggcatgcgattcagatacaagtgcgagggcagaagcgccggttccatccctggtgagcgttcgacagataccacgaagactcaccctaccatcaaagtgtggatgtcaggacctctgtattttggtcaaataaacggctatactggaccaggtacggtccggattagtctggtgacaaaggacccccctcataggccacatccccacgagctcgtaggtaaagattgtagagatggcttttatgaggcagagttgtgcccagacaggtgcatacactcattccagaatctcgggattcaatgcgtgaagaaaagagacctggagcaggccatcagtcagaggattcagactaataacaatccatttcaggtccctattgaagaacagcggggtgactacgacttaaacgccgtgagactctgtttccaagtgaccgttcgggacccttcaggcaggccactccgactgcccccggtcctgtcacacccaatatttgacaatagggctcctaacaccgctgaactgaaaatttgtagagtgaacagaaactctgggagttgtcttggcggcgacgaaatctttctgttgtgcgacaaagtccagaaggaggatatcgaagtctatttcaccggacccgggtgggaagccaggggcagcttctcccaggctgatgtgcatagacaggtggccatcgtgtttagaacccctccatacgccgatccctcacttcaagctccagtacgcgtctccatgcaactgcgcaggccatctgatcgggaactctcagagcccatggaatttcagtacctgcccgacacagatgaccgccaccgcatcgaggagaagaggaagcgaacgtacgagacctttaagtcaatcatgaagaaatcacccttcagcggacccaccgatccacggcctccgcctcgccgcatcgctgtgcctagtcgaagctccgcttctgtccctaaaccagcacctcagccgtatccctttacatcttctttaagcacaattaactatgacgagtttcccaccatggtattcccttccggccagattagccaggccagcgcactcgctccggcacctcctcaggtgctgccccaggcccccgcccccgccccggcgcccgctatggtgagcgccctggcgcaagccccggaacattgggtggcgggggactag

SEQ ID NO: 211357 - DNA, 1314 bp, synthetic construct
  misc_feature 1..1314: note = Description of Artificial Sequence: Synthetic coding sequence
  source 1..1314: mol_type = other DNA
atgacccagttcctgccccccaacctgctggccctgttcgccccccgggatccaattccttatctccctcctctcgagaagctacctcatgagaagcatcacaatcagccgtactgcggcattgctccctatattagagagttcgaggatccccgggacgcccccccaccgactcgggccgagacgcgtgaggagaggatggaaaggaagaggcgcgagaaaattgagcgccgccagcaggaagtcgagaccgaactcaagatgtgggacccacacaacgacccaaacgcccagggagacgctttcaagactcttttcgtagctcgtgtgaattacgatacaaccgagagtaagctccgcagggaatttgaagtgtacgggccgattaagcgtatccatatggtgtattcgaagaggtcaggcaaacctaggggttatgcgttcatcgaatatgagcatgaacgggatatgcactcagcatacaaacatgccgacggaaaaaagatcgacggtcgaagggtgttggtggatgtggaacgagggcggacagtgaagggctggcggccaaggagactaggcggtggccttggcgggacgcgaagggggggggccgatgtgaatatcagacactccgggagggatgacacttccaggtacgatgaaagaccagggccgtcacccctgccacatagggatagagacagggacagagagagagagagaagggagagatcaagagagcgggataaggagcgcgagagaaggcggtcccgcagcagagaccggcggcgaagatcaagatctagggacaaggaagaacggcggcgaagccgggaacgatcgaaagacaaagaccgggatcgcaagcgaagatcatctaggtcacgcgaacgggccagacgcgagagggagaggaaagaagagctgagagggggcggaggtgacatggctgaaccaagcgaggccggggacgccccccccgacgatgggcctcctggagaactggggcccgatgggcccgacggtcctgaagaaaagggcagggaccgggatcgcgagcggcggcgatctcatcgctctgagagagaacgcagaagggatcgagatagagaccgggacagagatcgggagcataaacgtggtgagaggggttctgagagaggaagggacgaagccaggggaggcggcggcgggcaggataacggcctcgagggcctcggtaacgactccagagatatgtatatggaatctgaaggcggagacggatatttggctcctgagaatggatatttgatggaggctgctcccgagtag

SEQ ID NO: 211358 - DNA, 1731 bp, synthetic construct
  misc_feature 1..1731: note = Description of Artificial Sequence: Synthetic coding sequence
  source 1..1731: mol_type = other DNA
atgctgcggagcggccccgccagcggccccagcgtgcccaccggccgtgctatgcccagccgccgggtggctcgaccacctgcagcgcctgaactgggggccttggggagcccagacttgagctccctgagcctagcagtaagtcggtcgaccgagatcatcgacgagtatatcaaggagaacggatttgggttggatggagggcagccgggcccgggtgaaggattgcctcgccttgtgtcgcgtggcgccgccagtctatccacagtgactctcggtcctgtggcaccccccgctaccccccctccttggggatgcccccttgggagactcgtttctcctgccccaggtccagggccgcagccacatctcgtgatcaccgaacaacctaagcagcgtggcatgaggtttcgctatgaatgtgagggacgaagcgccgggtccattctgggagagagcagcactgaggcttctaagaccctcccggccatcgagcttcgtgactgcggtgggttgagggaggtcgaagtgactgcatgcctcgtctggaaggactggccacaccgagtccacccccacagtttggttggcaaggactgtaccgatggcatctgccgcgtgagattgcggccccatgtgagtcctcgtcattcttttaacaatctcgggatccagtgtgttcggaagaaggaaattgaggccgctattgagagaaagatccagctgggaattgatccctacaatgccggtagcctcaagaatcaccaggaagtcgatatgaatgtggtcaggatttgcttccaggcctcctaccgggatcagcagggccagatgcgtagaatggatccagtcctctctgagcctgtgtacgataagaaaagtacaaatactagcgaactgcgtatctgccgcataaacaaggaaagcggcccatgcaccggcggcgaagaactgtacctgctttgtgacaaagtccagaaggaggatatatctgtagtcttttctcgggcctcatgggaaggccgggccgattttagccaagcagacgtccaccgccagatcgccattgttttcaagacaccaccatatgaggacctggagattgtggaacctgtcactgtaaatgtcttcctccaaagactgaccgacggggtgtgttctgaacccctgcccttcacatacttgcctagggatcacgactcctatggcgtcgacaagaagagaaaaaggggtatgccagacgtgctgggggagctgaattcatccgaccctcacgggattgaatcaaaacgaagaaaaaaaaagcctgccatacttgaccactttttgccaaatcacggtagcggtccatttcttccaccaagcgcactgctgccagaccctgatttcttttcaggaacagtcagcctccccggtctggaaccccctggtgggccagatctgttggacgacggttttgcttatgatccaactgcccccacactattcacgatgttggatctcctcccccctgcgcctcctcacgcatccgctgttgtgtgtagcgggggagctggggctgtggtaggggagacacccgggcctgagcccttgacactggactcctatcaggctcccgggccgggagatgggggcactgcctcattggttggcagcaacatgttccctaatcactatcgggaggcagcattcggaggcggcctattgagtccaggccccgaggcaacctag

SEQ ID NO: 211359 - DNA, 1740 bp, synthetic construct
  misc_feature 1..1740: note = Description of Artificial Sequence: Synthetic coding sequence
  source 1..1740: mol_type = other DNA
atgctgcggagcggccccgccagcggccccagcgtgcccaccggccgcgccatgccttcgcggagggtggctcgcccccccgcagcccccgagttaggggccctcgggagtcccgacctcagttcactcagtcttgctgtttctagaagcaccgacgaactcgaaattatcgacgagtacatcaaggagaacggtttcgggttggacggggggcaacccggacccggagaggggctaccaaggttggtgtccaggggcgctgcatctctttcgactgtgactcttggcccagtcgctccgcccgctaccccaccaccgtggggttgcccactgggacgactggtttcaccagcgccagggccaggcccacaacctcacctggtaatcaccgaacagccaaaacagagaggaatgcgcttcagatatgagtgtgagggcagaagtgccggctcaatcctaggtgaaagctctaccgaggcaagcaaaaccctccctgcaatagagctgcgggactgtggaggcctacgcgaggtggaagtgacggcgtgtctagtatggaaagactggccacatcgagtacatccacattctcttgtaggcaaggactgcactgatggcatttgtcgcgtgcgcctgcgcccgcacgtatccccccggcatagcttcaacaatctaggaattcagtgcgtccgcaaaaaagaaatcgaagccgccatagaacggaagatacagctagggatcgacccttataatgccgggtctttaaagaaccatcaagaggtcgacatgaatgtggttagaatctgctttcaagcatcctatagagatcagcagggacagatgcgtcgcatggaccccgtgctgagcgagcccgtttatgacaagaagtccaccaacacatccgaactgcggatttgtcgcatcaacaaagagagtgggccgtgcaccggaggagaggagctctacttgctctgcgacaaagtgcagaaagaggatataagcgtagtcttttcaagggcttcatgggaaggtagagccgacttctcacaggccgacgttcaccggcagattgcaattgtgtttaaaacccccccctacgaagatctggagatagtggaaccagttactgtgaatgtgttcttgcaaaggctgactgacggggtatgctccgagcctctgcctttcacctacctaccccgcgaccacgattcctacggagtggacaaaaagagaaaaagggggatgcccgatgtgctcggggagctcaattcctcagacccacatggcatcgagagcaagcggcgtaagaaaaagcctgcgattctcgaccacttcctgccaaatcatggctccggcccatttctcccgccctccgcactgctccctgacccagactttttcagtggcactgtcagcctgccggggttagaacctcctggcgggccagatttgctggatgacgggtttgcctatgatcccactgcccccactctgttcacaatgctggatttactgcctccggcaccgccgcacgccagcgccgtcgtctgcagcggaggggccggggctgtggtcggggagacaccaggtccggaacccttgacacttgactcttaccaagcccccggtcctggagacgggggaaccgcatcgttggtgggaagcaatatgtttcccaatcactaccgtgaagccgccttcggaggaggcctgctgtccccaggtccagaggctacatag

SEQ ID NO: 211360 - DNA, 2187 bp, synthetic construct
  misc_feature 1..2187: note = Description of Artificial Sequence: Synthetic coding sequence
  source 1..2187: mol_type = other DNA
atggaggccgccgccggcggccggggctgcttccagccccaccccgggctccagaagaccttggaacaattccatcttagctcaatgtctagccttggcggaccagccgccttcagcgcacggtgggcgcaggaggcttacaaaaaggaaagcgccaaagaagctggcgctgcagctgtaccagcccccgtgccagctgcaacagaaccgccccccgtgttacatttacctgctatacagccacccccacctgtactgcctgggccattcttcatgccgtccgataggagcacggagaggtgtgagactgtgttggagggcgaaacaatttcctgttttgtggtgggcggggagaaacggctgtgtctgcctcagatcctaaacagtgtgctgagagacttttccctgcagcaaataaatgcggtatgcgacgagttgcacatatactgctcaagatgcaccgccgaccaactcgagatcctgaaggttatggggattctgcctttttctgctccaagctgtggactaattaccaagactgatgcggagaggttgtgtaatgccctgttatacggcggcgcataccctcctccatgcaaaaaagagctagccgcatccctcgcactaggtctggaactgtccgaaagatcagttagggtgtatcatgaatgtttcgggaaatgcaagggactgctagtacctgagctatactctagccccagcgcagcgtgcattcagtgcctggattgccgcctgatgtatccaccacacaaattcgttgtgcacagccacaaggcactcgaaaacagaacttgccattggggtttcgatagtgccaattggagggcatacattctgctttcgcaggattacactggaaaggaagaacaggcgcgacttggcaggtgtctcgatgacgtaaaagagaaattcgactacggcaataaatacaagcggagggttccacgtgttagctcagagcctcctgcatctatccgacccaaaacagatgacacttctagccagagtccagccccatccgagaaagacaaacctagcagctggctgaggaccctcgcagggtctagcaataaaagtcttggatgcgtgcatccacggcagaggctgagcgcgtttcgaccctggtcccccgcagtgtctgcctctgaaaaagaattaagcccgcacctgcccgctttgattcgagactctttctactcatacaagtcttttgaaacggcagttgccccaaatgtcgccctagctccgcccgcccagcagaaggtcgtgtccagccccccgtgtgcggcagcagtgtcgagagctccggagccactagccacctgcacgcagccacggaagaggaagctgactgtggatacccctggggcacccgaaaccctcgctcccgtcgccgcccctgaggaagacaaggactcagaggctgaagttgaagtggaaagcagggaagagtttaccagtagcttgtcttctttgagcagtccctcttttacctcttccagttcagccaaggaccttggctcaccaggtgctcgggcgctgccaagcgctgtgcccgatgcggccgctcccgccgatgcccccagtggactggaagccgaactcgagcatctgagacaagctctggagggaggactggacactaaggaagcaaaggaaaagtttttacatgaggttgtgaagatgcgcgttaagcaagaggagaaactgagcgccgctcttcaggccaagcgctctttgcatcaggaactggagttcctaagggtggcaaaaaaggagaaactgcgtgaagccacagaggccaagcgtaatttacgcaaggagattgaaagactgagagctgagaacgaaaagaagatgaaagaggccaacgagagcaggctgagactcaaacgggagcttgagcaggcacgccaggctcgcgtgtgcgacaagggttgtgaggccggaagactgagggccaaatactctgcgcagattgaggacttacaggtgaagctgcagcatgctgaagcagatcgggaacagttaagggccgacctcctgcgggaaagagaagccagagagcacctcgaaaaagttgtgaaggagcttcaggaacagctttggcccagggcccgtcctgaggcggctggctccgagggcgccgcagagttggagccatag

SEQ ID NO: 211361 - DNA, 1632 bp, synthetic construct
  misc_feature 1..1632: note = Description of Artificial Sequence: Synthetic coding sequence
  source 1..1632: mol_type = other DNA
atgggctgcatcaagagcaaggagaacaagagccccgccatcaagtacaggcctgaaaatactcctgaacctgtgtcgaccagtgtatctcactacggtgctgagccaaccaccgtttccccatgccctagttcctcggcgaaaggcacggctgtcaatttcagtagcctgtcaatgactccgttcggagggtcctctggagttacccccttcggtggcgcaagcagcagcttcagtgtggtgcccagctcctatcctgcaggcctcacggggggggtgaccatcttcgtcgcactgtatgattatgaagccagaacaacagaggatttatcttttaagaagggcgagaggttccagatcatcaacaacacagagggcgattggtgggaggcaagatccattgccacgggtaaaaatggctatatccctagcaattacgtcgccccggccgactcaattcaggcagaggaatggtatttcggcaaaatgggcaggaaagatgctgagaggctgctgcttaacccgggcaaccaacggggcatatttttagtgcgcgagagcgaaaccaccaagggagcatattcattatcaatcagggattgggacgagatacgtggagacaacgttaagcactataagatccggaagctggataacggtggttactacataacaaccagggcccaattcgacacccttcagaaacttgtgaagcactacacggaacatgccgacggtctctgtcacaagttaaccacggtttgtcccacagttaagccccagactcaggggctggccaaggatgcatgggagatccctagagagtcactgagactggaggtaaagctgggacagggctgctttggtgaagtttggatgggaacatggaacggaacgacaaaggtggcgatcaaaacgttgaaacctggcacaatgatgccagaagccttcttacaggaagcacagattatgaagaaactccgtcatgataaactggttccactgtatgcagtcgtctcggaagagcctatatacatagtcactgagttcatgtctaaaggctccttactagacttcttgaaggaaggcgacggcaaatacctgaagcttcctcagctggttgatatggcggctcagatcgccgacggtatggcctatattgagagaatgaattacatccatagagacctcagagccgccaatatcctggtcggggaaaacctagtctgcaagatagctgatttcggcttggcccgtctcatcgaagataacgaatacaccgctcgtcagggcgccaaatttcccattaaatggacagctcctgaagctgctttatatggcaggtttaccattaaatcagacgtatggtcctttggaatattacagaccgaactcgtcactaagggtagggtcccctatcctggtatggtcaatcgggaagtgttggaacaagtggaacggggctatcgtatgccttgcccacaaggatgccccgagagtctgcacgaactgatgaatctttgttggaagaaagatccggacgagcgtcccacatttgagtacatccaatccttccttgaggactatttcactgccacggagccacaatatcaacctggtgagaatttatag

SEQ ID NO: 211362 - DNA, 1632 bp, synthetic construct
  misc_feature 1..1632: note = Description of Artificial Sequence: Synthetic coding sequence
  source 1..1632: mol_type = other DNA
atgggctgcatcaagagcaaggagaacaagagccccgccatcaagtaccggccagagaatacacccgaacccgtgtcgactagcgtgagccactacggcgcggaacctactacagtatccccctgtcccagctctagcgccaagggtacggccgtaaacttcagctctctgtcgatgaccccctttggggggagttccggcgtgacccccttcggaggagcctcatcttctttttccgtggttccctcttcatatcccgccggtctaaccggtggcgtgacgatttttgtcgctctctatgattatgaggccaggacaacagaggatctgagctttaagaagggtgaacggttccaaatcattaataatacagagggcgactggtgggaagccagaagtatcgccactggaaaaaacggatacatccctagcaattatgtcgcgcccgccgattctattcaagccgaggaatggtactttgggaaaatgggacggaaagatgcagagcgcttgttgttaaaccctgggaaccagcgagggatctttctcgtgcgtgaatccgaaaccacaaaaggcgcttacagcctgagcattcgagattgggacgaaatccggggcgataacgtgaaacattataagatcagaaagctggacaatggcggctactatattaccacaagggcccagtttgacacgctccagaagctagttaaacactacaccgaacatgccgacgggctatgtcataagttgaccacagtttgccctacggttaagccacagacacaggggctggcaaaggatgcctgggagataccaagggaatcactgagactggaggtgaagctaggacaaggttgtttcggcgaagtatggatgggtacttggaatgggaccaccaaggtggccatcaaaacactgaagcccggaacaatgatgcctgaggcctttctgcaggaagcacaaataatgaaaaagctgcgccacgacaaactggtgcccctgtacgctgtggtgagcgaggaaccaatttatattgtcacggagtttatgtccaagggatcgctgctcgatttcctgaaagagggagacggaaaatacttaaaacttccccagctcgtagatatggccgcccagatcgcggacgggatggcttatattgagagaatgaattacattcacagggacctgcgcgccgccaacattcttgtcggagagaatcttgtctgtaaaatcgccgattttggcctggcccgcttaatcgaggacaatgaatacactgctaggcagggggctaagtttccaatcaagtggaccgccccagaggccgctctttatggcagatttacgatcaagtccgatgtatggagcttcggcattttgcaaaccgaactggtgaccaagggaagggttccctaccccggcatggtcaacagagaagtactggaacaggtcgagcgaggttaccgcatgccatgcccacaggggtgtccagaatcactgcatgagttgatgaacctctgttggaagaaggatcccgacgaaagaccaacatttgaatacatacagtcatttttggaagactattttaccgccaccgaaccacaatatcagccaggggaaaatctttag

SEQ ID NO: 211363 - DNA, 1632 bp, synthetic construct
  misc_feature 1..1632: note = Description of Artificial Sequence: Synthetic coding sequence
  source 1..1632: mol_type = other DNA
atgggctgcatcaagagcaaggagaacaagagccccgccatcaagtaccgccctgagaacactcctgagcccgtgtctacatccgtgagtcattatggcgctgaacccaccacggtgagtccctgcccgtcttctagcgctaaaggcactgcagtgaatttttcaagcctctccatgaccccgttcgggggatcttctggcgttacaccttttgggggtgcctcaagctcattctccgtagtccctagtagttaccctgccggccttacgggcggagtgacaatttttgtcgccctctatgattatgaggccagaacaacagaagatttatccttcaaaaagggagagcggttccagatcatcaacaatacagaaggggactggtgggaagccaggagtatagcgactggcaagaacggttacattcccagcaactatgtggcacctgccgactcaatacaggcagaggagtggtatttcggaaagatgggaagaaaggatgccgagcggctgctcttaaatcccgggaaccagaggggaatctttctcgtgagggaaagcgagacaaccaaaggtgcctactcactttcaatacgcgactgggatgaaatccgcggcgacaatgtgaagcactataaaatccgcaaactggacaatggcggctactatatcacgactcgtgcccagtttgacactctgcagaagctggttaaacactataccgagcatgctgatggtctctgccacaaactgaccacggtctgtccgacagtcaagcctcaaactcagggcctggccaaagacgcttgggagataccaagggagtccctgagattggaggtgaagcttgggcaggggtgcttcggagaggtctggatgggaacctggaatggaaccaccaaggttgcaatcaagactcttaagcccgggacgatgatgcctgaggcatttttgcaggaggctcagatcatgaagaagttgagacatgataaactggtgccactttatgctgtggtgtcggaggaaccgatttatatagtcaccgagtttatgtcaaaggggagccttctcgattttttgaaagagggcgatggaaagtacttaaaactgccccaactggtggacatggccgctcagatagctgatgggatggcatacatcgaacgcatgaattacatacaccgcgacctcagagcagcaaacattctcgtaggcgaaaatttagtgtgtaagatcgccgacttcggtctggccaggctcatcgaagacaatgagtataccgctagacaaggggccaagtttccaatcaagtggacggccccagaggccgctctgtacggacgctttaccatcaaatccgacgtgtggtctttcggaatcctgcagacagaactggtcactaaaggtcgggtgccttatcctgggatggttaaccgcgaggttttagagcaggtcgaacgcggctatcggatgccttgtccgcagggttgtccagaaagccttcacgagctgatgaacctctgctggaagaaggatcccgacgaaagaccaaccttcgagtacattcagagcttccttgaagattactttaccgctaccgaaccccagtaccagcccggcgaaaatctgtag

SEQ ID NO: 211364 - DNA, 1539 bp, synthetic construct
  misc_feature 1..1539: note = Description of Artificial Sequence: Synthetic coding sequence
  source 1..1539: mol_type = other DNA
atgggctgcatcaagagcaagggcaaggacagcctgagcgacgacggagtcgacttaaaaacgcagcctgtcaggaatacagaacgaacaatctacgtcagggaccccacatctaataagcagcagagaccggtccccgaatctcagttgctgcctgggcagaggttccaaacgaaagatcccgaggaacagggcgacatcgtcgtggcgctgtatccatatgacggaatacatcctgatgacctctccttcaaaaaaggagagaagatgaaggtgttggaggaacacggagaatggtggaaagctaaatccctcttaaccaagaaagagggattcataccgtcaaactacgtcgcgaaacttaataccctggagactgaggagtggttcttcaaggacattactcgaaaagacgctgagaggcagttgttggcccccgggaactctgcaggcgcatttctgatcagagagtccgaaacacttaaaggctctttctccctgtctgtgcgcgactttgatccagtacatggggacgttatcaagcattacaaaattcgctccttggacaatggcggctactacatcagcccccggatcacctttccatgtattagtgatatgattaagcattatcagaagcaggctgacggactgtgcaggagacttgagaaagcttgcatctctcctaagccacaaaaaccttgggacaaagacgcctgggaaatccctcgggaatcgattaagttagttaaaagacttggcgcgggacaatttggtgaggtgtggatggggtattacaacaatagcactaaggtggctgtgaaaactctgaaaccaggaacaatgagcgtgcaagccttcctggaggaagccaacctgatgaagaccctgcagcatgacaaacttgtgcgcctatatgccgtggtgactagagaggaacccatctatattattacagaatatatggccaaaggcagcttattagactttctgaaatctgacgagggaggcaaagtactgctgcccaagctgatcgattttagcgcccagatcgccgagggcatggcgtatatcgagagaaaaaactatatccacagagacctccgagccgcaaacgtactggtgtctgagtctctcatgtgcaagattgcggacttcgggctggccagggtgatcgaggataacgagtatactgcaagagaaggagccaagttccccatcaagtggactgcacctgaggccatcaacttcggctgttttacaattaaaagcgacgtgtggagcttcggcatcctgctctacgagattgtaacatatggtaagattccctacccaggccgcacgaacgcggatgtgatgacagcattaagccaaggctatagaatgccacgggtagaaaactgccctgacgaactgtacgatatcatgaaaatgtgctggaaagagaaagctgaagaacgacccacattcgattatttgcagagtgttcttgacgacttctacaccgccacggagggtcagtaccaacaacaaccttag

SEQ ID NO: 211365 - DNA, 453 bp, synthetic construct
  misc_feature 1..453: note = Description of Artificial Sequence: Synthetic coding sequence
  source 1..453: mol_type = other DNA
atgggctgcatcaagagcaagggcaaggacagcctgagcgacgacggagtggacctaaagacccagcctgtccggaatacagagcgcacaatatacgttagggatcctacatctaataagcagcaaagaccagtcccagagtctcaattgttgccaggacagaggtttcagacgaaggaccccgaagagcaaggagatatcgtggttgctttgtatccttatgacggcatacacccagatgatttaagcttcaagaagggggagaaaatgaaggttcttgaagagcacggcgaatggtggaaggctaagtcgctgttgaccaaaaaggagggtttcattccgagcaattatgttgcaaaattgaacacattggaaactgaggagtggtttttcaaggatatcacaagaaaggacgctgaacgccagttgctggctcctgggaattctgcttag

SEQ ID NO: 211366 - DNA, 1476 bp, synthetic construct
  misc_feature 1..1476: note = Description of Artificial Sequence: Synthetic coding sequence
  source 1..1476: mol_type = other DNA
atgggctgcatcaagagcaagggcaaggacagcctgagcgacgacggggtggacctcaagacacagccggtccctgaaagccagctgctcccaggtcaaagattccagacgaaggacccggaggagcagggcgatattgtggtggctctgtatccttacgatggtattcatcccgatgatctctccttcaagaaaggagagaaaatgaaggtcctggaggagcacggggaatggtggaaggccaagtccctcctgacaaaaaaggagggctttatcccgtctaattacgtcgccaaattgaacacactggaaactgaggaatggttctttaaggatattacccgcaaagacgccgagcggcagctgctggccccaggaaacagcgctggtgcgtttttaatcagggagtcagagactctgaagggcagctttagcttaagtgtcagagatttcgacccggtacacggcgacgtgattaagcactataaaatcaggagccttgataatggggggtattacattagtcctcggataaccttcccgtgtataagcgacatgatcaagcactaccagaaacaggcggacggcttgtgcaggcggctcgaaaaggcctgtatcagcccgaagccacagaagccctgggataaggacgcatgggaaattcctagagaatccatcaaattggtaaagagactaggcgccgggcaattcggcgaggtatggatgggatactataataactcaactaaggttgccgtgaagacactgaagccaggcaccatgtccgttcaggcctttcttgaggaggctaaccttatgaaaacattgcagcacgacaaactggtgagactttatgccgttgtcactcgggaggaacccatttacataattactgagtatatggccaaaggctctctgctggactttttaaagtcggatgagggggggaaagtgcttctgccgaagttaattgacttctctgcgcagattgccgagggcatggcttatattgaacggaaaaactatatccacagggatctgagagcagccaatgttctggtgagtgagtccttaatgtgcaagatcgcggactttggacttgcccgcgtgattgaagataacgagtatactgcccgagaaggcgccaagttcccaatcaagtggaccgcaccggaagccataaactttggttgttttaccattaagtcagatgtgtggtccttcggcattctcctttacgagattgttacgtatggcaagataccctacccaggcaggactaatgctgatgttatgactgcactttcccaagggtatagaatgccccgggtcgaaaattgccccgacgaactttatgatatcatgaagatgtgctggaaagaaaaagctgaggagcgtcctacgtttgattacttgcagtcggtcctagatgatttctacaccgcgaccgaaggacaatatcaacagcagccttag

SEQ ID NO: 211367 - DNA, 993 bp, synthetic construct
  misc_feature 1..993: note = Description of Artificial Sequence: Synthetic coding sequence
  source 1..993: mol_type = other DNA
atggccgccgtggacagcttctacctgctgtaccgggagatcgcccggagctgcaattgttacatggaggccctggctctcgtaggggcctggtacaccgctcggaagtcaattacggtcatttgcgatttttactccctgatcagactccacttcataccgcgcttgggatcccgggccgacctgatcaagcagtatggacgctgggcagtggtgtccggagcaactgatgggattggcaaagcctatgccgaagagctcgcttcacgcggactgaacatcattctgatttcccggaatgaagagaagctgcaggtggtggctaaggacatcgcggacacttacaaggtcgagactgacattattgtggctgatttctcgtcgggccgcgagatctacctgccaatacgggaagcattgaaagataaggacgtcggtatccttgtgaacaacgtcggtgtcttctacccttacccccaatacttcacccaactgtctgaggataagctgtgggacatcatcaatgtcaatattgcagctgcatcactcatggtgcacgttgtgcttccaggcatggtggagaggaaaaagggtgccattgttactatctccagcggctcttgctgcaagcccacacctcagttggccgcttttagcgcttcaaaagcatatcttgatcacttttcaagggccctacagtatgagtatgcgtccaagggtatatttgtgcaaagcttaatacccttttacgtggccacttctatgaccgccccctccaacttcctgcacaggtgcagttggctagttcctagcccaaaggtgtacgcccatcatgccgtatcaaccctaggcatctctaaaaggacaacaggatactggtcacattctattcagttcctgtttgctcagtacatgccagagtggctgtgggtgtggggggcgaatatactcaatagaagcctgaggaaggaagctctcagttgtacagcttag

SEQ ID NO: 211368 - DNA, 336 bp, synthetic construct
  misc_feature 1..336: note = Description of Artificial Sequence: Synthetic coding sequence
  source 1..336: mol_type = other DNA
atgggcagcagcagcttcctggtgctgatggtgagcctggtgctggtcacattggtggccgtggaaggggtcaaggagggaatcgaaaaagccggagtgtgccccgcagacaacgtgcggtgttttaagtcagatcctcctcagtgccataccgaccaggattgcctgggcgagcgaaagtgttgttatctgcactgtggatttaaatgtgttattcccgtcaaagagcttgaggaaggtggtaacaaagacgaggacgtgtcgaggccttatccggagccaggatgggaagccaaatgtcccggatcttcaagcactagatgcccccagaaatag

SEQ ID NO: 211369 - DNA, 675 bp, synthetic construct
  misc_feature 1..675: note = Description of Artificial Sequence: Synthetic coding sequence
  source 1..675: mol_type = other DNA
atgcggacccagagcctgctgctgctgggcgccctgctggccgtgggcagccaattaccagctgtctttggccggaagaagggcgaaaaatcaggcggctgcccccctgacgacgggccatgcctgctcagcgtcccagaccagtgcgtggaggacagtcaatgccccctaaccagaaagtgctgttatagggcttgtttccggcagtgtgttcccagggtttccgtgaagctgggaagctgcccagaggatcagctccgatgccttagccccatgaaccacctatgtcacaaggattccgactgctcaggaaagaaaaggtgttgccactccgcctgtgggcgggactgtcgtgaccccgctaggggcactgcgccaggctgtcccggacaagctaattccgatctaggtagcgttgccctgcatctctcgtggggaccaaccgagcgcgttcacgatggccgtcctggggctttgcctgctgggcaacactatctctaccagcgctggttccagccgtcagacaatcactggccagcagacactagccttcagcccatccatccttggtttctgctgcttggtgtgaaggtgcattcgctgagcagcgaggaaggtttatgcattactccagtcctgtgtacaactgctattagagctagccacccatcatag

SEQ ID NO: 211370 - DNA, 372 bp, synthetic construct
  misc_feature 1..372: note = Description of Artificial Sequence: Synthetic coding sequence
  source 1..372: mol_type = other DNA
atgcggacccagagcctgctgctgctgggcgccctgctggccgtggggtcacaactgcctgcggtgtttgggcgtaagaaaggagagaaatccggtgggtgtccgccggatgacggaccctgcctgctgtctgtccccgaccaatgcgtcgaggactcgcagtgtccactaaccaggaaatgctgctaccgtgcctgtttccgtcagtgcgtgccacgcgtctccgtaaagttaggtagttgtcccgaggaccagcttcgatgtctcagcccaatgaatcatctatgtcacaaggactcagactgctcaggtaaaaaacgttgctgtcactccgcctgtggccgcgattgtagagatcctgctagagggtag

SEQ ID NO: 211371 - DNA, 1647 bp, synthetic construct
  misc_feature 1..1647: note = Description of Artificial Sequence: Synthetic coding sequence
  source 1..1647: mol_type = other DNA
atgcccgccctgcggcccctgctgcccctgctgctgctgctgcggctcacaagcggcgccgggctgctgccgggcctgggttctcacccaggcgtgtgtcctaaccagctttctcccaacctctgggtggatgcccagtccacctgcgaaagagagtgttctagggatcaggactgtgcggcagctgaaaaatgctgcatcaacgtctgtgggctgcattcatgcgtggccgcacgctttccggggagtccagcagctcccaccacggccgccagttgtgagggattcgtgtgcccacagcagggatcggattgtgacatctgggacgggcagcctgtctgccggtgccgggatcggtgtgagaaagaaccatcattcacatgcgcctccgacgggctcacctattacaataggtgctatatggatgccgaagcctgcctgagaggcctgcatctgcatatagtcccctgtaaacatgtgctgtcatggcctccatcctccccgggtcctcccgagacaacggcccggcccactccgggtgcagccccagttccccctgcgctgtattccagtcccagtccccaggcagtgcaggttggaggcacagcctctttacactgcgatgtaagtgggcgccccccccccgcggttacctgggaaaaacagagccaccagcgggagaatttgatcatgaggcctgaccagatgtacggcaacgtggttgtgacgtctatagggcagctggttctgtataacgcccggcccgaggatgcgggcctgtatacttgtacagcgcgcaacgccgccggcctgcttcgcgctgatttccctcttagtgtcgttcagcgggaacccgcccgggacgcagccccttcaattccggcccctgcagagtgcctgcctgatgtccaagcctgcacaggcccgactagcccccatctggtcctgtggcattatgaccctcaaaggggtgggtgcatgacctttcccgctagaggttgtgatggcgccgcgcggggatttgagacctatgaggcgtgtcagcaggcctgtgcgagaggcccaggggacgcctgcgttctccctgccgtgcagggcccgtgccgaggttgggagccccgatgggcctacagtcccctcctgcagcagtgccacccattcgtgtacggaggatgtgagggcaacggcaacaactttcacagtagagagtcatgtgaggacgcctgccccgtaccacgcaccccaccctgtcgtgcctgtagattgcgctcgaagttggcactctccctttgtaggtcagatttcgcgatagtggggcgactcacggaggtcctagaagaaccagaagcagcaggagggatcgctcgagtggccctcgaagatgtgttgaaggacgataagatgggcctgaagttcctgggaaccaagtacctggaggtgactttaagcgggatggactgggcatgcccttgccccaacatgacggccggggacgggcccttggtgatcatgggagaggtgcgggacggggtggcagtcttagacgctggttcatacgtgcgtgctgcctcagagaaaagagttaagaaaatcctggagctactggagaaacaggcatgcgaactgctcaaccgctttcaggattag

SEQ ID NO: 211372 - DNA, 1731 bp, synthetic construct
  misc_feature 1..1731: note = Description of Artificial Sequence: Synthetic coding sequence
  source 1..1731: mol_type = other DNA
atgtgggccccccggtgccggcggttctggagccggtgggagcaggtcgccgcgttgcttcttctgctgttactgctgggggtgccgccgcgcagcttggccctcccacctatcaggtattcacacgcgggaatctgtccaaatgatatgaatcctaatttgtgggttgatgcccagtctacgtgccggagggagtgtgagaccgatcaggaatgtgaaacatatgagaaatgttgccctaatgtgtgtggcaccaagtcctgtgtcgctgcaagatatatggatgtgaaagggaagaaaggcccagtgggcatgccaaaggaggctacttgcgaccacttcatgtgtctgcaacaggggtcagagtgcgatatctgggacggccagcctgtatgtaagtgcaaagatagatgcgagaaggaaccttcttttacttgcgcgagtgatggacttacctactacaaccgatgttacatggatgccgaggcctgcagcaagggcatcactctggccgtggtaacatgcaggtaccatttcacctggcccaacacctccccaccacccccggagaccaccatgcatccaaccacagcttcaccagagactccagaactggatatggctgcaccagccctgttaaacaatcctgtccatcagtccgttaccatgggcgagactgtcagcttcttatgtgacgtggtgggtcgccctcgcccggagataacctgggagaaacagcttgaggaccgcgaaaacgtggtgatgaggcctaatcacgtgcgggggaacgtggtggtgaccaacatcgcccagttggtgatctataatgcccaactccaggacgccgggatttatacatgtacagcccggaacgtggcaggggtgctgagggccgacttcccattgtccgtggtcagagggcatcaggcggccgctactagcgagtcctccccaaatggcactgctttccccgccgctgagtgtcttaaacccccggatagcgaggactgcggggaagaacagacccgttggcacttcgacgcgcaggccaataactgtctaacattcaccttcgggcactgtcaccggaatttaaaccactttgagacttacgaagcgtgtatgctggcatgcatgagcggacctttggcagcttgttcactaccagcattgcaaggcccttgcaaagcctatgcaccacgttgggcctacaatagccagacaggccagtgtcagtccttcgtctacggcggatgcgaagggaacggcaacaactttgaaagcagagaagcttgcgaggagagctgtccgttcccgcggggaaatcagcgatgtcgtgcttgtaagccacgacagaagctggttacaagcttctgtaggagtgacttcgttattttgggaagggtgagcgagctgacagaggagccagatagcgggagggccctcgtaacggtcgatgaggtcctgaaggatgagaagatgggacttaagttccttggccaagagccccttgaagtcaccttgttgcatgtcgactgggcctgcccctgccccaatgtgaccgtgagtgaaatgccattaatcattatgggagaagtcgatgggggtatggcaatgttacggcccgattcatttgtcggggcttcaagcgcaaggagggtcagaaaactcagagaagtgatgcacaaaaaaacttgtgacgtgttgaaagagttccttggcctccactag

SEQ ID NO: 211373 - DNA, 849 bp, synthetic construct
  misc_feature 1..849: note = Description of Artificial Sequence: Synthetic coding sequence
  source 1..849: mol_type = other DNA
atggacgtgaagggcaagaagggccccgtgggcatgcccaaggaggctacttgtgatcactttatgtgtctgcagcaagggtccgagtgtgatatttgggatggccagcccgtctgcaaatgcaaggaccgttgcgagaaggaaccttcttttacctgcgctcaggccaataactgccttacgtttacttttggccactgtcatagaaacctgaaccactttgagacctatgaggcttgcatgctcgcatgcatgtccggacctcttgcagcctgcagcctaccagccctgcaaggcccctgtaaagcctacgctccacgctgggcctataacagccagaccgggcaatgccagagctttgtctatggcgggtgtgaaggaaacggcaacaacttcgagtcgcgggaggcgtgtgaagaatcctgcccttttccccgcggcaaccagcgctgtagagcatgcaagccgcgtcaaaagttggtgacttccttttgccgcagcgacttcgtgatactgggacgcgtcagcgagcttaccgaggagcctgacagtgggcgcgccctcgtgactgttgatgaggtattgaaggacgaaaaaatggggttaaagtttctgggtcaggaacctctggaggttacactgctacacgtggactgggcatgcccatgcccgaacgtgacagtgtcagaaatgccccttatcataatgggagaggtcgacggtggcatggccatgctgcgtccggactccttcgtcggcgcttctagcgccagaagagtgagaaagctgcgcgaggtgatgcacaagaaaacatgtgatgtgctgaaggaattcctcggactgcattag

SEQ ID NO: 211374 - DNA, 1509 bp, synthetic construct
  misc_feature 1..1509: note = Description of Artificial Sequence: Synthetic coding sequence
  source 1..1509: mol_type = other DNA
atgcccctggtgaagcggaacatcgagccccggcacctgtgccggggggccctccctgaaggtattactagcgagctagaatgtgtcactaactcaacccttgcagccattattcgccagctgagcagcctttcaaaacacgcagaagacatctttggcgagttatttaatgaagccaacaacttttatatcagggcaaactcactccaagaccgtatcgatagactcgccgtcaaagttacgcagctggactcaaccgtggaagaggtttctctacaagatatcaatatgaaaaaggcatttaaaagttcaaccgttcaggatcagcaagtggtcagcaaaaactccattccaaatcctgtggcagatatctataatcagtctgataagcccccaccattaaacattcttaccccctatcgtgacgacaagaaggacggactgaagttttacacggaccccagttattttttcgatctgtggaaagaaaagatgctccaggacaccgaggacaaacgaaaggagaagcgcaggcaaaaggagcagaaaagaattgacggcaccaccagagaggtcaaaaaggtgaggaaagcgagaaaccgaagacaagaatggaatatgatggcatacgacaaagagctccgacccgacaatcgtcttagtcagtcggtctaccacggggccagctccgagggatctctgagtcccgatactcggagtcacgctagtgacgttactgattactcgtaccctgcgacgccaaaccactcgttacacccccagccagtcaccccttcctacgccgccggggatgtgcccccacatggacctgcttcacaagctgctgagcacgagtaccgtcccccttctgccagcgccaggcacatggctctcaatagaccacagcagccaccaccacctccccctccccaggccccagagggaagccaggcatccgccccaatggctccagcagattatggtatgttacctgcacagatcatcgaatactacaatccatcgggacctccgccgcccccacctccccccgtgatccccagcgcccaaactgcatttgtaagtcccctccagatgccgatgcagcctccattccctgcctcagcctcatccacacacgccgctcctccccacccacccagtacagggctgttagtcactgcacctccccctcctggaccacctccacctccccccgggccccccgggcctggctcgagcttgagtagctcgcctatgcatggcccgccagtggctgaggctaagagacaggagcccgctcagccccctatatctgatgcaagaagcgatctgctggccgccattcgcatggggattcagctgaagaaggtgcaagaacagcgcgagcaggaggccaagagggagcctgttggcaacgacgttgccactattctgagtcggagaatcgcagtcgagtattccgacagcgatgacgattcagagttcgatgagaatgactggagtgactag

SEQ ID NO: 211375 - DNA, 1500 bp, synthetic construct
  misc_feature 1..1500: note = Description of Artificial Sequence: Synthetic coding sequence
  source 1..1500: mol_type = other DNA
atgcccctggtgaagcggaacatcgagccccggcacctgtgccggggggctctgcccgaggggatcacctccgaacttgaatgcgtgactaattcgacactggcggccattatccggcaactatcgagtctgtcgaaacacgccgaggatatttttggtgagctctttaatgaggctaacaacttctatatacgggccaacagcctgcaggatcggatagatcgtctggctgtgaaggtgacacagttagatagcactgttgaggaggtgtcattgcaggatataaatatgaaaaaggcgtttaagtcatctactgttcaggaccagcaggtggtctctaaaaactcaattccaaaccccgtcgctgatatttacaaccaatctgacaagcctcctcccctaaacattttgacgccctatcgggacgataagaaggatggactgaagttctatactgatccctcctatttctttgacctctggaaggagaagatgctgcaggacactgaagacaaacgcaaggaaaaacgccgacagaaacgcgagaagcataagctgaacccgaacaggaatcagcaagtgaatgtcaggaaggtgcgtacccggaaggaagaatgggagagacgcaaaatggggatcgagttcatgagtgatgcaaaaaagctggagcaggctgggagcgcaaaagaggacagggtcccttctgggtcccacgcgtccgacgtcacagactattcctatccagctactccaaatcactctctccaccctcagccagtgacacccagttacgctgctggcgacgtgcctccacacgggccagcttcccaagcagcagagcatgagtacagacctcctagcgcatctgctcgccatatggctctcaaccgtccacaacagccacctcccccaccccccccacaagcaccagaaggcagccaagcaagtgctcccatggcacccgcagattatggtatgctgcccgctcagattatcgagtactacaacccgtccggcccgccacctccgccacccccccccgtcataccctcagcgcagacagcatttgtttctcccctgcaaatgccaatgcaaccgccatttcctgcttctgcgtcatccactcatgcagctccacctcacccgccatctaccggtttgctggtcaccgcaccaccgcctccaggccccccgccgccacccccaggaccccccgggcccggaagcagcctgagttcttcacctatgcacgggccccctgtggccgaggcaaagagacaggaaccagcccagcccccaatatccgatgcacgatctgatctgctggcggcaatcaggatgggcatacagctgaagaaggtccaggagcagagggaacaggaggcaaagagggagcccgttggtaatgacgtagccactatcctgtcccggcggattgccgtggagtattcggatagcgatgacgattccgagttcgatgaaaatgactggtcagattag

SEQ ID NO: 211376 - DNA, 786 bp, synthetic construct
  misc_feature 1..786: note = Description of Artificial Sequence: Synthetic coding sequence
  source 1..786: mol_type = other DNA
atggagggcggcctgggccgggccgtgtgcctgctgaccggcgcctcacgcggatttggcaggacactggctcccctgttggcttccttactttcccctggaagcgtacttgtcctttcggccaggaacgatgaagccctccgacagctggaagccgaattgggggctgagagatcaggactgagagtagtgagagtgccggcagatctcggagcagaggccggcctgcagcagttattaggtgcattacgcgagcttccccgccccaagggactacagcgcttgctattgattaacaatgccggcagcctcggagatgtgagcaagggattcgtagacctctccgatagtactcaagtcaataactattgggccctaaatctgaccagcatgttgtgtcttaccagctcagtccttaaggcttttcctgacagccctggcctgaacaggaccgtcgtgaacattagctctctctgcgcattgcagccctttaaaggttgggcactgtactgcgccgggaaagcggcacgggatatgctctttcaggttctcgcactggaagaacccaatgttagggtcctgaattatgcccccggccctctcgacactgatatgcagcaactggcacgggagacctctgtggaccctgatatgcgcaaggggctgcaggagttaaaagcaaaaggcaagcttgtcgactgcaaagtatctgcccaaaagctcctcagtctactggagaaagatgagttcaagtctggcgcccatgtggacttttacgacaagtag

SEQ ID NO: 211377 - DNA, 2430 bp, synthetic construct
  misc_feature 1..2430: note = Description of Artificial Sequence: Synthetic coding sequence
  source 1..2430: mol_type = other DNA
atggaggacgagcagcccgacagcctggagggctgggtgcccgtgcgggaggggctgttcgcggagcctgaacgccatcggctcagatttctggtcgcatggaatggagcggagggtaaatttgcagtgacttgccatgaccgcactgcacagcagcgtcggctgcgggaaggggccagactggggccagagcccgaacctaagccagaagctgctgtctcacctagcagctgggccggcctgctgtcagcagcggggctcaggggtgcacacaggcagctcgctgcactgtggccacccctcgagcggtgtttccccaggcttcctcccgagttagacgtggggggaggcggagcctggggtcttggtttgggcttgtgggctcttctgtggccaacaagggccggacctggtgaagccgcgctgcaggaactgtgcgggcagttagaacgctacttgggagctgccgccgatgggtgcgggggtgcaaccgtccgggacgcactattcccagctgagggaggggcagcagattgtgagtctccgcgtgagttcagagaaagagccctgagggctcgttgggttgaggccgatgcccgactgagacaggtcattcagggccacggaaaagccaatacaatggttgcgcttatgaacgtatatcaagaggaagatgaagcctatcaggaactggtgacggtggctaccatgttcttccaatacctgctccagcccttccgtgccatgagagaggtggccacactgtgcaagcttgacatattgaaatcattggatgaggacgacctggggccgagacgggtggttgctttggagaaagaggctgaagaatggacaaggagggctgaggaagctgttgtgtcgatccaggatataactgtgaattacttcaaagagaccgtgaaggcactggccggcatgcagaaggaaatggaacaggatgcaaagcgcttcggtcaggcagcgtgggccactgccatcccaagactggagaagcttcagcttatgctggcacgggaaacgctccagctcatgagggctaaggagctgtgtctgaaccataagcgggccgagatccagggaaaaatggaggacctgccggagcaggagaagaacaccaatgtggtcgacgaacttgaaattcagttttacgaaatccagctcgagctgtacgaagttaaatttgagattctgaagaacgaggagatactcctaacgacacagcttgattcgctgaaaaggctaatcaaagagaaacaggacgaggtggtttactatgacccatgcgagaatcccgaggaattgaaggtgatcgattgtgtggtcggtcttcaagacgataagaatcttgaagtcaaggaattgaggagacagtgtcagcagctggaatcgaaacgcgggagaatatgtgcaaagcgtgcttcgcttcgttctcggaaagaccagtgtaaagagaaccacaggtttcgactgcagcaggcggaagagtctatcaggtatagcaggcagcaccattccatccagatgaagcgagataaaatcaaagaggaggaacagaaaaagaaggagtggattaatcaagaaagacagaagacgcttcagaggcttagatcctttaaagataagagactggctcagtcagtgaggaacacctctggaagtgagccagttgccccaaatctgccctccgacctgtcacagcagatgtgtctgccagcaagccacgccgtcagcgtgattcaccccagctctcgaaagacccgtggagtccctttatccgaggctggaaacgtaaagtccccaaagtgccagaattgccacgggaacattccggttcaggtgttcgtgcccgtcggtgaccagacacactcgaaaagttcagaagagctgagcttacccccacccccaccaccaccaccgcccccaccccctccacctccccctccgccccccccactaagggcactttccagctcgtcccaggccgctacccaccagaatctcggatttagggctccggtgaaagacgatcagccccggcctctagtttgcgaaagcccagccgagaggccaagagatagtcttgagtcttttagctgtcctggctctatggacgaggtgctcgctagcttgcggcatgggagggctccactccgcaaggtggaggtccccgccgtgcggccgcctcacgccagtataaacgaacacatacttgctgccatccggcagggcgtcaagctgaagaaggtgcacccagacctgggccctaacccatccagcaagcctacctcaaaccgcaggacctctgatctggagaggagtatcaaggcagccctccagcggataaagcgggtgtccgccgacagtgaagaagactccgacgagcaagaccctggccaatgggacggctag

SEQ ID NO: 211378 - DNA, 1452 bp, synthetic construct
  misc_feature 1..1452: note = Description of Artificial Sequence: Synthetic coding sequence
  source 1..1452: mol_type = other DNA
atgcccgtgcccccccccccccccccccccctgccccccccccccccaccacttggtgcgcctccaccgccaccgccttcagcccccccggtgtccacagatacgtcaagcctcaggcgcgccgaccccaagggccgctctgccctcctcgctgacattcaacagggtacccgcctgcgaaaggttacacagatcaacgatagatccgccccacagatagaaagcagtaaagggactaacaaggaaggcggaggatccgctaacactagaggggcttcaacccctcctacgctgggagacctttttgccgggggctttccagtgctgcgacctgcgggccaaagagacgtcgccggtgggaagaccggacagggaccgggctctcgtgctccatcccctcgactcccgaacaagactatttcaggccctctgatcccacccgcgagtcccaggttgggaaatactagcgaggcccatggcgccgctcgcacagccccacccaggcctaatgtgcccgcgcccccacccccgacccccccaccgcctccccctcccctgccacctcccctcccctcctcttcccctatcaagacccctctggtgtcacccccaggccctctgacaaaggggaacttgcctgtggttgcccctccagtaccttgtgcacccccaccccctcctcctccccccccaccgactccaccacccctccctcccgcttctgttttatcagacaaagccgtgaagccccaactggcgccactccatctaccaccaattccaccaccactgcctctgctcccaccctgcggctacccgggccttaaagcggagcctgcaagccccgcacaggatgctcaggaaccacccgcgcctccgccccctttgcccccttatgcttcctgttctcccagagcctcgttacctgcaccacccctgccaggcgtgaactcttcctcagagactccccctccccttccacctaaaagcccgtcgttccaggctccccctcagaaggccggtgcgcaagccctgcccgctcccccagcccctcctggaagccagccatttctgcagaaaaagcggcatggtagacctggggccgggggcgggaaactgaacccgccacccgcacctcccgccaggtcaccaactaccgaattgagctcgaagtcacagcaagctaccgcttggacccctacccaacagcccggcggccagctgcggaacggcagcttgcatattatcgacgacttcgaatcgaaattcacatttcatagcgtggaagatttcccacctcctgacgagtacaagccctgtcagaagatttacccatccaagatccccagatctcggacacctggtccatggttacaagccgaggctgttggacagtcctctgatgacatcaaaggccggaacagccaactgagtctgaagaccctgagatag

SEQ ID NO: 211379 - DNA, 1452 bp, synthetic construct
  misc_feature 1..1452: note = Description of Artificial Sequence: Synthetic coding sequence
  source 1..1452: mol_type = other DNA
atgcccgtgcccccccccccccccccccccctgcccccccccccccctcctctgggcgccccccctccccccccccccagtgcacccccggtcagcacagacacatcctctctgcgtagggctgatccaaagggccgaagtgcacttttggccgacatccagcaaggcacgcgacttcgaaaggtgacacagattaacgaccggagcgctccacagatcgagtctagtaagggaaccaacaaggaagggggcggttccgcaaacactcggggagccagcacccctccgaccttaggggatctgtttgccggcggtttcccagtgctgcgccctgccggacagcgggacgtagcagggggtaagacagggcagggtcctggtagccgcgctcccagcccccgtctgcccaataagactatctccgggccgctgattccccctgccagccctcgtctcggcaatacttcagaggcccatggcgcagcccgcactgcccccccccgcccaaacgtgccggccccaccacccccgacccctccaccccccccaccaccattaccccccccccttccctcctcatctcccatcaagactcctttagtgtctccaccggggcccctgacgaagggaaaccttcctgtggtcgcacctccagtgccatgcgcaccaccgccacctcctcccccccccccccccacccccccacctctgccccccgcaagcgtgctcagcgacaaggccgtgaagcctcagttggctccattgcacttgccaccaatcccgccgccactgccacttctcccaccttgcggatatcccggcctgaaggccgagcccgcttctcctgcacaggacgcccaggaacctcctgcgccccctcctccactcccgccttacgcctcatgctcacccagggctagtctcccggcaccccccttacccggagtcaactcttccagtgagacaccaccgcctctgccgccgaagtctcccagtttccaggcacccccccaaaaggccggggctcaggccctgcctgccccaccagcaccacctggcagccagccattcttacagaagaaaagacatggtagaccaggcgccggtgggggaaaactcaatccgccccccgcccccccagcccgctctcccactactgagcttagctctaaaagtcagcaggccactgcctggacgcccacccaacagccaggtgggcagctgagaaacggcagcctccatatcatcgatgacttcgaatcaaagttcacatttcattccgtcgaagactttccacccccagatgaatacaaaccttgtcaaaagatctacccctcaaagattccacgaagtcgcacacccgggccatggctccaggcggaagccgtgggccagagctctgatgatattaaaggtcgtaacagccaggtcacacaggcctcctgcttgtag

SEQ ID NO: 211380 - DNA, 1452 bp, synthetic construct
  misc_feature 1..1452: note = Description of Artificial Sequence: Synthetic coding sequence
  source 1..1452: mol_type = other DNA
atgcccgtgcccccccccccccccccccccctgcccccccccccccctcccctgggtgcccctccccctccccccccatctgcccccccagtgtccacagacacttccagtctgcgccgagccgaccccaaaggcaggagtgcactcctggccgacatccagcaggggaccaggcttagaaaagtgacccagatcaacgataggagcgcccctcagatcgaaagctccaagggcactaacaaggaaggagggggaagcgccaacacacggggagccagcacacctcctaccctgggggacctgttcgccggcggtttcccggtgcttcggccagctggccagagggacgtagccggcggcaaaaccgggcagggcccaggtagcagagctcccagcccaagactccctaacaagaccatctcaggccccttaatccccccagcatccccccgtctcggaaacacctcggaggcccacggggcagctaggaccgccccgccccgacccaacgttcccgccccccctccacccactcccccaccaccacctccccctctccctccccctctcccttcgtcttcccctatcaagaccccattagtttcaccacccggcccgttgaccaagggaaacctacccgtggtggcccccccggttccttgcgctccgccgccaccccccccccctccaccccccacgcctccgccgctgcctcccgcttctgttctctccgataaagccgtcaaacctcagttggcacctttgcacctcccccccattccccctcccctccctttactgcctccatgtggttaccccggactcaaggctgagccggcttctccagcccaagacgcccaggagccccctgcgccccccccgccccttcctccctacgcatcatgttccccacgagccagccttccagctccacccttgcccggtgtgaattccagctctgagaccccgccgcccctgcccccaaagtctccaagctttcaggcaccgccgcaaaaagcgggagcccaggccctgcctgctcccccggcccctcctggctctcagccatttctccagaagaagcggcacggacgtcctggggccggaggggggaaacttaacccaccccctgcccccccagctaggtccccaacaacagaactctctagcaagagccagcaagctaccgcttggacgcctacccagcagcctggaggccagctgaggaacggatccttgcacataattgatgattttgaatcgaaattcactttccatagcgtcgaagactttcccccgccagatgaatacaagccatgccagaagatataccccagtaaaattccgcgatcccgcactccgggtccctggctgcaggcggaggctgtaggacagtcttcagacgacattaaaggacgtaatagtcaagtaacccaggcttcctgtctctag

SEQ ID NO: 211381 - DNA, 930 bp, synthetic construct
  misc_feature 1..930: note = Description of Artificial Sequence: Synthetic coding sequence
  source 1..930: mol_type = other DNA
atggccgtgaaccagagccacaccgagaaccggcggggcgccctgattcccaatggcgagagtctcctgaagaggtcacccaacgttgaattgtcctttccgcaacgaagtgagggctccaacgtcttttccggccgaaaaaccggcactttgttcctcacttcgtacagggtgatttttatcacctcctgttccatcagcgatcctatgctgtcctttatgatgcccttcgatctgatgacaaatctgacagttgaacagcccgtgtttgccgcaaactttattaaaggaaccatacaggctgctccttatggcggatgggaaggccaggccacctttaagctggtgtttcgtaacggcgatgcaatcgagtttgcacagctgatggtgaaagccgccagcgccgctgcgcgtggatttcctttgcgcaccctgaatgattggttctccagcatgggaatatacgttatcactggcgagggcaacatgtgtaccccccaaatgccctgcagcgtcatagtttacggggcacctcctgccggatacggggcccctcctccaggctatggggcaccacccgctggctacggcgctcaacccgtgggtaatgaggggccccctgtgggctatcgggcatcgccggtgcggtatggtgctccccccctcggatatggagcacctccagcgggttatggtgctccccctcttggatacggcgcaccacctcttgggtacggaactccacccctcggatatggggctccacctcttggatacggtgcaccccctgcaggcaatgaagggccccccgcaggatacagggcttcaccagcaggttctggcgccagacctcaggaaagcaccgcagctcaggcacctgaaaacgaggcatcactgcctagcgctagcagtagtcaggtgcatagttag

SEQ ID NO: 211382 - DNA, 930 bp, synthetic construct
  misc_feature 1..930: note = Description of Artificial Sequence: Synthetic coding sequence
  source 1..930: mol_type = other DNA
atggccgtgaaccagagccacaccgagaaccggcggggcgccctgatccctaatggcgagtctctgctgaagcgctctcccaacgttgagctgagcttcccacagagatccgagggttctaacgtgttttcaggtcgcaagacgggaactttgtttctgaccagctacagagtcatctttattacatcctgcagtatcagcgatcccatgctgtccttcatgatgccattcgatttgatgactaatctaacggtggagcagcctgtgtttgccgccaactttattaaagggactatccaggccgccccatatggtgggtgggaaggacaggccaccttcaagcttgtttttagaaacggcgacgccatcgaattcgctcagcttatggtaaaggctgcgtccgccgccgctaggggcttccctctgcgtaccctgaacgactggttcagcagtatgggcatctacgtgatcactggagaaggcaatatgtgtacaccccagatgccctgctccgtcatagtttacggcgcacctcccgcggggtacggagccccccctcccggctatggcgccccgccagccggatacggcgcccagccggtgggaaatgaggggcctccggtcggttatagagcctctcctgtccggtacggagctcccccgctaggctatggggcaccgccagccggatatggcgccccccctctggggtacggcgcacctcctctgggatacggaacaccaccactggggtacggcgccccccctctcggttatggggcccctccagctggcaacgaaggacctcccgccggatatcgtgcatcccctgccggatctggggctagaccccaggagtccacagcggcacaggcccccgaaaacgaggccagcttaccctccgcctccagctctcaggtgcacagttag

SEQ ID NO: 211383 - DNA, 930 bp, synthetic construct
  misc_feature 1..930: note = Description of Artificial Sequence: Synthetic coding sequence
  source 1..930: mol_type = other DNA
atggccgtgaaccagagccacaccgagaaccggcggggcgccctgatccccaacggagagtccctcttaaaacggtcacccaatgtagagctcagctttccacagcgttcagagggctccaacgtgttcagtggacggaagactggaaccctgtttctcacatcctatcgagtcatattcatcacatcctgtagcatcagtgacccaatgctgagcttcatgatgcccttcgacctgatgaccaacctgacggtggagcaacccgtatttgcggcaaattttatcaaagggactattcaggcagccccttatgggggatgggaaggccaggctacttttaagcttgtcttcaggaatggggatgctatagaattcgcacagctcatggtgaaggccgcttccgcagccgccagaggattcccactccgcaccctaaatgattggtttagtagcatgggcatctacgtcatcaccggtgagggaaacatgtgtacaccgcagatgccatgctccgtgatcgtgtacggcgccccgccagcaggctatggggcccctcctccaggatacggcgcccccccagcaggctacggggcccagcccgtcggcaatgagggcccaccagtggggtacagagcaagcccggtgcgatacggcgccccccctctcggctatggagctcctccagccggctacggagccccaccgttgggctacggggctccgcccctgggttatggcacacctccacttggatacggggctccacctctcgggtacggggcaccaccagcaggcaacgagggcccaccggctggatacagggcctctccagccggctcaggcgcgcggcctcaggaatctactgccgcccaagctcccgagaacgaggctagtctgccttctgctagttcgagccaagtgcattcatag

SEQ ID NO: 211384 - DNA, 708 bp, synthetic construct
  misc_feature 1..708: note = Description of Artificial Sequence: Synthetic coding sequence
  source 1..708: mol_type = other DNA
atgcccttcgacctgatgaccaacctgaccgtggagcagcccgtgtttgccgcgaacttcattaaaggaaccatccaggcggctccatacgggggatgggaaggccaggccactttcaagctggtgttcagaaatggggacgctatcgagtttgcccagttaatggtgaaggcagctagtgcagcggctcgggggtttcctcttcgaactctcaatgattggttctcatccatggggatatacgtgatcaccggcgaaggaaatatgtgtactccacagatgccctgctccgttattgtgtatggagctcctcccgccgggtacggtgctccaccaccgggctacggtgctcccccggctggttacggagctcagccggtaggtaatgagggacctccagtggggtaccgggcaagtcctgtgcgatacggtgcacctccacttgggtacggagcacctcccgccgggtacggggccccccccctcggatacggcgcgcctcccctgggctatgggactccccctctcggctacggggccccccccctgggctacggtgctccccccgcggggaatgaaggccctcctgccggttacagagcctcccccgctggaagtggcgccaggccccaggagtctactgcggcccaggcacccgagaatgaagcatcgctgccttcagcatctagctcacaagtgcattcctag

SEQ ID NO: 211385 - DNA, 1401 bp, synthetic construct
  misc_feature 1..1401: note = Description of Artificial Sequence: Synthetic coding sequence
  source 1..1401: mol_type = other DNA
atgccctacgagatcaagaaggtgttcgccagcctgccccaggtggagagaggggtgtcaaagattattggaggagaccccaaaggaaacaactttctgtatactaatggaaagtgcgtgatcctgcgtaatatcgatgaccacagccgctttgtgaactgcgtgcggttttcccccgacggtaatagatttgccacggccagtgctgacgggcagatctatatttacgatggtaaaacaggggagaaagtgtgtgcactgggcggatcgaaggcccacgacgggggtatatatgccatatcgtggtcgcccgacagcactcaccttctgtctgccagcggagacaagacgagcaagatttgggacgtgtctgtgaattccgtcgtgtccaccttcccgatggggagtaccgttcttgaccaacagctcggctgcctttggcagaaagaccacctccttagtgtgagtcttagtggctatattaactatctggatcgcaacaatccttccaaacctcttcacgtgatcaagggccattccaaaagcattcagtgcttgaccgtgcacaaaaatggcggaaagtcgtatatttatagtgggtctcatgacgggcacattaattactgggatagcgagaccggcgagaacgacagtttcgccggaaaaggacataccaaccaagtttccagaatgaccgttgacgaaagtggtcagctgattagttgttcgatggacgacacggtgcgctatacaagcttgatgctgcgcgattatagtgggcagggcgtcgttaaattggatgtgcagccaaagtgtgtcgctgtggggccagggggctatgctgtggtggtgtgtatcggccagattgtgttgctgaaagaccagaggaagtgtttctccattgacaaccccggctatgaaccagaggtggtggccgtgcatccaggcggcgacactgtggctatcggaggggtcgacggtaatgtgaggctgtattcaatccttgggacaactcttaaagacgaaggaaagcttctggaggctaaagggcccgtcacagacgtggcctacagtcacgacggcgcattcctggccgtgtgtgacgctagcaaagttgtcaccgtgttctctgttgccgacggatatagtgagaacaatgtgttttacgggcaccacgctaaaattgtatgtctggcctggagcccagataatgagcactttgcttccggcgggatggacatgatggtgtatgtatggacactgagtgatcctgaaacgcgggtgaagattcaggacgctcatcgtttgcaccacgtcagctctctcgcctggttggacgagcacaccctagtcacaacatctcatgatgccagtgtgaaggaatggaccattacctattag

SEQ ID NO: 211386 - DNA, 1821 bp, synthetic construct
  misc_feature 1..1821: note = Description of Artificial Sequence: Synthetic coding sequence
  source 1..1821: mol_type = other DNA
atgccctacgagatcaagaaggtgttcgccagcctgccccaggtggagagaggggtgtctaagatcatcgggggagatcctaagggcaacaattttctgtacaccaacggcaagtgcgtgatcctgcgcaatattgacaaccccgctttagctgacatctatacggagcacgcgcaccaggtcgttgtggccaagtatgcgccgagtggcttttacatcgctagtggcgatgtctcggggaagctgcgcatatgggacacaacccagaaggaacatcttctgaaatatgaataccagcctttcgcagggaaaattaaagatattgcatggaccgaggacagcaaaaggattgccgtggtcggggaaggaagagaaaagttcggcgcagttttcctgtgggactccggaagctccgtgggcgagatcaccggtcataacaaggtcattaactcagtcgacattaaacagagtcggccgtacagattggcaaccggaagcgacgacaattgcgctgcattttttgaaggaccccctttcaagttcaagtttactattggggaccactccaggtttgttaattgcgtgcgctttagcccggatggcaacaggtttgcaacagcttctgcagatggacagatctacatctatgacggcaagactggagagaaagtctgcgctctcggtggatcaaaggcccatgatggcgggatttacgctatctcctggtcacccgattcgacccatcttctaagcgctagcggagataagacttctaagatctgggatgttagtgtgaactccgttgtgagcacattccctatggggagtactgtgttagaccagcagttggggtgtctttggcagaaggatcaccttctgtccgtaagtctgtcaggctatattaattatctcgatcgcaacaaccccagcaagccacttcacgttattaaaggacacagcaaatccattcaatgtctaacggtgcacaagaatggcggcaaaagctacatatatagtgggtcacacgacggacacatcaactactgggattccgagaccggggaaaacgacagttttgcagggaagggacatactaatcaagtctccagaatgaccgtggacgaatccggtcagctcatttcctgctctatggacgacacagtgaggtacacatctttgatgctgcgtgattattcgggccagggagttgtgaagctggacgtgcagccgaagtgcgtggccgtgggtcctggtgggtatgccgtggtggtatgcatcggacaaatcgtgcttttgaaggaccagcgaaagtgtttttcaatagacaaccctggctacgagccagaggtggtggccgtacaccccgggggcgacaccgtggctattgggggagtagatgggaatgtgcgactttattcgatcctggggacaactcttaaagacgaagggaagctcctcgaggccaagggcccagttaccgacgtggcatattctcacgacggagcgttcctggccgtgtgtgatgcctctaaagtggtgactgtgttcagcgtggcggatggctactcagagaacaatgtgttttatggacatcatgctaagatcgtatgtctcgcttggtctccggacaacgaacattttgcctccggggggatggacatgatggtgtatgtatggacattgtccgaccctgaaacaagagttaagattcaagacgcccaccgccttcaccatgttagttcattggcatggctggatgaacacacactggtgaccacatcccatgatgcgagtgtgaaagagtggacaataacatactag

SEQ ID NO: 211387 - DNA, 1326 bp, synthetic construct
  misc_feature 1..1326: note = Description of Artificial Sequence: Synthetic coding sequence
  source 1..1326: mol_type = other DNA
atgctgacctgggtgtggtacctgatcatgaccagcgtgctgcaggccagtgtatcctccgtggaccattcaaggtttgtaaactgtgtgcggttcagccctgacggcaatcgcttcgccacagcttccgccgacggacagatatatatttatgacggaaaaaccggcgaaaaagtttgcgccctcggaggaagcaaggcccatgatgggggaatctacgccatcagctggagccccgacagcacacacttactgtccgcttccggcgataagacatcaaagatatgggacgtaagcgtgaattcggtggtgagcaccttcccgatggggtcaaccgtgctagatcaacagctcggttgcctatggcagaaggaccatcttttgtcggtatccttatcaggctatataaattacttggaccgaaataacccttcgaagcccctgcatgtgattaagggccattctaagtccatacagtgcctgaccgtgcataaaaatggcggaaagtcatacatttattctggctcacacgatggccatatcaattactgggactccgaaacaggagagaacgattcctttgccgggaaaggacacactaatcaagtgagtcggatgactgtcgatgagtctgggcagttaatctcttgttctatggacgacacagtgcgttatactagcctcatgttgagggattacagtgggcagggcgtcgtgaagcttgatgtgcagcccaagtgtgttgccgtcggccccggtgggtacgctgtggtggtgtgcataggccaaatcgtcttgctgaaagatcaacgtaaatgcttcagcattgataaccccggatacgagcccgaagtcgtggcagtccatcctggcggagataccgtggccattgggggggtggatggcaatgttaggctgtattcaatcctgggcactacactgaaggacgagggcaaattgcttgaagcaaagggccctgtaaccgatgtggcatactcccatgatggagctttcctcgctgtgtgcgatgccagcaaagtggtcacagttttttccgtggccgacggctattcagagaacaacgtgttctatggccatcacgcaaagattgtgtgcctcgcatggtccccagacaacgagcattttgcgagtggggggatggacatgatggtgtacgtgtggaccttgtctgacccagaaacccgcgtcaagatacaagatgctcaccggctgcaccacgtgtcctccctagcctggctggacgaacacaccttagtgacgactagtcacgacgcctccgtgaaggagtggacgatcacatattag

SEQ ID NO: 211388 - DNA, 531 bp, synthetic construct
  misc_feature 1..531: note = Description of Artificial Sequence: Synthetic coding sequence
  source 1..531: mol_type = other DNA
cccgccgagaccgagaaggtgttcgccagcctgccccaggtggagcggggtgtgagtaagataattggcggcgacccaaaggggaacaactttctctataccaatggcaagtgtgtcatcctccgcaatatcgacgatcattcacggtttgtcaactgtgtgcgattttcacctgatggcaaccgcttcgctactgcctccgcggatggccagtgtcttcctgcccctgtgaccgcccagtcacgacggctacccaacgcttcacccgacatgcagaacttggatatcgctttacccaccagtgcagattcatctagcgagcctaagccacagtccatggagaagctgcccccttggtccgcccacttcccatgggctcctaggttttggacttcttcatgggcggcctatggccgccggacaacatgcagcgtttccccgtgtcctggcacaagtactatttggaccgagaccactcccgcaagcccctgcacgagctcccgtgtcacagttaataggtccagtgtgtag

SEQ ID NO: 211389 - DNA, 1821 bp, synthetic construct
  misc_feature 1..1821: note = Description of Artificial Sequence: Synthetic coding sequence
  source 1..1821: mol_type = other DNA
atgccctacgagatcaagaaggtgttcgccagcctgccccaggtggaaaggggggttagtaagattatcggaggtgatcccaaaggaaacaatttcctttacaccaatggcaaatgtgtgatactgcggaacatcgataacccagctctggcggatatatacaccgagcacgcgcatcaagttgtggttgccaaatacgctccatctggcttctatatcgccagcggagacgtatctggaaaattgcgaatttgggataccactcaaaaggagcatttgttgaagtatgagtaccaaccctttgctggaaagatcaaagacattgcatggactgaggacagtaagaggattgctgtagtaggcgaagggcgcgaaaaattcggcgcggtcttcctgtgggactccggatccagcgtaggagagattaccggccacaacaaggtaatcaactccgtagatatcaagcagtctcgcccctataggttagccactggttctgacgacaactgtgccgccttttttgaagggccaccttttaaattcaagttcactataggggatcactctcgattcgtaaactgcgttagattctcgcctgatggaaaccgtttcgcaactgcctctgcagatggccagatctacatctacgatgggaagacaggggagaaggtgtgcgcactgggtggctccaaggctcatgacggagggatatacgcaatctcatggtcccccgattctacccatctgctttccgcaagtggagataaaaccagcaaaatttgggatgtctcagtaaactctgtcgtgagcacattccccatggggtctacagtactcgatcagcaactgggttgcctgtggcagaaggatcacctcctgtctgttagcctctcaggttacatcaactatttggatcggaacaacccgagtaaacccctgcatgtcattaagggtcactctaaatccatccagtgtctgaccgtccacaaaaatggcggcaagagctacatttattcggggagtcatgatggtcacatcaattactgggacagcgaaactggcgagaatgattccttcgccggaaaaggccatacaaatcaggtcagcagaatgactgtcgacgagtcaggccaattgatcagctgttcaatggacgatacagttaggtatactagcctcatgctgagggattattccggacagggcgtggtgaagctcgacgtgcagcctaagtgcgtggcagtcgggcccggaggatatgccgtggtcgtgtgcatcgggcagattgttctgctaaaggatcagcgaaagtgcttctctatcgacaacccaggctacgagccagaggtagtagctgttcaccccggtggagatacggtggctatcggcggagttgatggaaacgttcggctctacagtatcctggggaccactcttaaagacgaagggaagctgttggaagcaaagggccctgtcacagacgtggcttactctcacgacggagcgtttctggctgtgtgcgacgccagcaaggtcgtgactgtattcagcgtcgcggacggctacagtgagaataacgtcttctatggtcaccacgccaaaatagtatgtctcgcttggtctcctgacaatgaacattttgcaagtggaggcatggatatgatggtgtacgtttggacattatccgacccagaaacccgcgtcaaaattcaggacgctcaccggctacatcatgtatcttctctggcctggcttgacgagcataccttggtcacaaccagtcacgatgcctctgtgaaagagtggaccattacatactag

SEQ ID NO: 211390 - DNA, 1401 bp, synthetic construct
  misc_feature 1..1401: note = Description of Artificial Sequence: Synthetic coding sequence
  source 1..1401: mol_type = other DNA
atgccctacgagatcaagaaggtgttcgccagcctgccccaggtggaaagaggagttagcaagattattggtggagatccaaaggggaataacttcctctatactaatggaaaatgcgtcatcttacgcaatatcgacgatcactcacggttcgtcaactgcgtgcgctttagcccagatggcaaccgctttgctactgcaagcgctgacgggcagatatacatttacgatggcaagaccggtgagaaagtctgtgcccttgggggttctaaggcgcatgatggaggcatttacgctatctcctggagccccgactctacacatctgctatcagcctctggcgataagacatcaaaaatttgggacgtgtccgtgaactccgtggtcagtacgtttccgatggggtcaacagtgctggaccagcagctgggatgtctctggcagaaggaccatctgctgagcgttagcctttccggatacatcaattatctcgaccggaacaatccatctaaacccctccatgttatcaagggccactcgaaaagtatccaatgcctcacggtccataaaaatggaggaaaaagttatatatacagcggctcgcacgatggccacataaattattgggactccgagaccggcgaaaatgatagctttgctggtaaaggccacaccaaccaggttagtcggatgactgtggacgagtctggacagctgataagctgcagtatggatgacaccgtccgctatacatccctcatgctcagggactactctggacagggagtcgtaaagctcgacgtccaacctaaatgcgtagctgtgggccccgggggctatgctgtggtggtctgtatcgggcagattgttcttctcaaagaccaaaggaagtgtttctcgattgacaatcctggctatgaacccgaggtcgtcgccgtgcaccctgggggagacaccgttgccatcgggggagttgatggcaacgttcggctttactccattctgggcacaacactgaaggatgaggggaagctcctggaggcaaagggcccagtcacagacgtcgcttacagtcacgacggcgcgttcctggcagtgtgcgacgcttctaaggtcgtaacggtgtttagcgtcgctgatggatactcggagaataacgtgttttacggacatcatgccaagattgtgtgcctggcttggagtcctgataacgaacacttcgcaagcggtgggatggacatgatggtttacgtttggacgctcagcgaccctgagaccagggtcaaaatccaggatgcccatcgcctgcatcatgtgtcttccctcgcctggttggacgaacacacactggttaccacatcccatgacgcatcggtcaaggaatggactataacatactag

SEQ ID NO: 211391 - DNA, 3675 bp, synthetic construct
  misc_feature 1..3675: note = Description of Artificial Sequence: Synthetic coding sequence
  source 1..3675: mol_type = other DNA
atgctgccctacaccgtgaacttcaaggtgagcgcccggaccctgaccggcgccctgaacgcccataacaaagctgctgttgactggggttggcagggcctgatagcctatgggtgtcatagcctcgtggtcgtcattgattccattactgcccaaaccctacaggtcctggagaaacacaaggctgacgtcgtgaaggtaaagtgggcaagagagaattaccatcacaacattggctcgccatactgtttgcggctcgcgagcgctgatgtgaatggcaaaattatcgtgtgggatgtggccgccggagttgcccagtgcgaaattcaggagcacgcaaagcctatccaggacgtccagtggctctggaaccaagatgctagcagagacttgttgctggctatacacccacccaactacatcgtgctgtggaacgccgacactgggacgaagctgtggaagaaaagctacgcggacaatatcctgtctttttcttttgatccctttgatccctcacaccttacgctcctgacatctgagggtatcgtgtttatcagcgatttttcaccgtctaagcccccaagcgggccaggcaaaaaagtgtatatcagctcaccacattcatcccccgcacacaataaactggcaaccgctacaggagccaaaaaggccctaaataaggtcaaaatcctaatcacacaagagaagcccagcgccgaattcatcaccctgaatgattgtctgcagctggcctacctgccgtctaagaggaatcacatgcttctcttatatcccagggaaatcctgatattggacctggaggtgaaccaaacagtcggggtcatcgctatcgagaggacaggcgttccctttctgcaagttatcccctgttttcaacgagatggtttgttctgtctgcacgagaatggttgcattaccctgcgtgtccgccggagttataataatatcttcaccactagcaatgaggaaccagaccctgatccggtccaggagctgacttacgacttaaggtcccagtgtgacgcaattagggtgacgaaaaccgtgagaccattcagtatggtctgctgtcctgtgaatgaaaatgcagctgctctcgtggtgtctgatgggcgagtaatgatttgggagttgaagagtgctgtctgcaacaggaattcacggaactcttctagtggggtctctcccctctattcaccagtgagcttctgcgggattcctgtcggcgtcctgcaaaataaattgccagatctaagtctggataacatgatcggccaatcagccattgcaggagaagaacaccctagaggatctattcttcgggaagttcatcttaagttcttgctgacaggtctcctgtctgggctgccagcgccccagtttgccatacggatgtgcccacccctgaccaccaaaaacattaaaatgtaccagcctctgctcgcggtaggtaccagcaatggatctgtcctggtgtatcacctgaccagtggtctcctgcacaaggagctgtccattcactcctgcgaggttaaggggattgaatggacttcccttactagtttcctgtcctttgcgactagcactcccaacaatatgggtctggtacgcaacgaattacagcttgttgacctgcccaccggaagatccattgcctttaggggagagcggggcaacgacgaaagcgcaatagagatgattaaggtgtcccacctcaagcagtatcttgctgtggttttccgcgataaacctctggaactgtgggacgtccgcacttgtacacttctgagagaaatgtctaagaatttccctacgataacagcgttagaatggagcccttctcataacctaaagtccctgagaaagaagcagctggccactcgagaagctatggccagacagactgtcgtaagtgataccgagctgagcattgtggaatcctctgtgatctccctgctgcaggaagctgaaagcaagtccgagctctctcagaatatcagcgcccgtgagcatttcgtgtttacagatatcgatggccaggtctaccacctgacagtagaagggaactcagtgaaggatagcgctagaattccgccagatggctcaatgggctccattacctgcattgcctggaagggggacacactcgtgctgggggacatggacggcaatctgaacttctgggatctgaagggtagagtcagcaggggaatccctacacatcgctcctgggtgcgcaaaatcaggtttgcacccggtaagggcaaccagaaacttatcgccatgtataacgatggtgcagaagtatgggatacaaaggaagtccagatggtgagcagcctcagatctgggcgaaacgtcaccttcaggatcttggacgtcgattggtgcacctctgataaagtgattctcgcatcggatgacggctgcatacgggtgcttgagatgtccatgaaatcagcctgcttccgcatggacgagcaggaactgacagagcccgtgtggtgcccttacctcctcgtgcctagggcctcacttgccctgaaagcgttcctcctacaccagccttggaatggacaatattccctcgacatatctcatgtagattatcccgagaacgaggaaattaagaatctgctacaggagcagttgaattccctctctaacgacatcaaaaaacttctactggatccggagtttaccctcctccaaaggtgcctgcttgtcagcaggttgtatggtgatgagtccgagctacatttctggaccgtggcggcccattacctgcactcactctcccaggagaagagtgctagtaccaccgcccctaaggaggcggcgcctagagataaacttagcaatcctttggatatctgctacgatgtcctgtgcgagaacgcctacttccagaagtttcagctggaaagggtcaacttacaggaagtgaagagaagtacttatgaccatacccgcaaatgcacggaccaattgttgctgctcggccagactgacagggcagtgcagctactccttgagacttctgcagacaatcaacactactattgtgatagcctaaaagcctgtctcgttaccacggtgacttccagcggccccagccagtcgaccataaagttggtggcaaccaacatgattgcaaacggcaaactagcggagggtgtgcagctcctgtgtttgatcgacaaagccgctgatgcctgccgctacctacaaacctatggagagtggaaccgcgcagcctggcttgccaaggtcaggttaaatccggaggagtgtgcagatgtcctgcgccgatgggtcgaccacctctgctctcctcaggtgaatcagaaaagtaaggccctgttagtgctgctgtcacttggttgttttttcagcgtggccgaaacactccactcaatgcggtatttcgatcgcgccgcgctctttgtggaggcttgtctgaagtatggcgccttcgaagtaacagaagacactgaaaagctgattaccgccatttacgctgattacgccagatccctgaagaacctcggcttcaagcagggcgcggtgctgtttgcgagcaaagccggagccgcagggaaagacttgctgaacgaactcgagagtccgaaagaagagccgatcgaggaatag

SEQ ID NO: 211392 - DNA, 1371 bp, synthetic construct
  misc_feature 1..1371: note = Description of Artificial Sequence: Synthetic coding sequence
  source 1..1371: mol_type = other DNA
atgcggaagaagtggaagatgggcggcatgaagtacatcttcagcctcttatttttcctgctgttggaagggggcaaaactgaacaggtcaagcattcggaaacctattgcatgttccaggacaagaagtatcgggtgggagagcgttggcatccgtatctagaaccctacgggctcgtgtactgcgtgaactgtatctgctccgagaacggcaatgtgctctgttcaagggtgcggtgccccaacgtgcactgtttgtctcctgtacacatcccacatctatgctgcccacgctgccccgattctctccccccagtcaataacaaggttacgtccaagtcttgtgaatacaacgggaccacctaccagcatggtgaactctttgtggctgagggtctgtttcagaaccgccagccaaaccagtgcacgcagtgtagctgctccgagggaaacgtctactgtggcctgaagacctgtccaaaactgacctgcgccttccccgtgtccgtgccagattcctgttgccgagtgtgccgtggggacggcgaattatcttgggaacattctgatggcgacatctttcgccagcctgccaaccgagaggcccggcacagctatcataggtctcactacgaccctccaccatcacgccaggcaggaggcctgtccagattccccggtgcacgctctcaccgcggagccttgatggattctcagcaagcttcggggacaatcgtgcagatcgtcattaataacaagcacaagcacgggcaggtatgtgtttccaatggtaagacgtactcccatggggagtcatggcaccccaacctgcgggcctttggaattgtcgaatgtgtgctgtgcacatgcaatgttaccaaacaggagtgcaaaaagatccactgtccaaatagatatccttgtaagtatccacaaaaaatcgatgggaaatgctgtaaggtatgtcctggcaagaaggctaaggagcttcccggccagtccttcgacaataaagggtacttctgcggtgaagaaacaatgccggtatacgaatcggtattcatggaggacggagagaccactcggaagattgccttggagacagagcgcccaccgcaggtagaggttcacgtgtggactattcgaaagggaattctgcaacatttccacatcgagaagatctccaagcgcatgtttgaggagctgccccacttcaagctcgttaccaggacgactctcagccagtggaagatcttcactgaaggagaggctcagatctctcaaatgtgtagttctcgggtgtgcagaacagagctagaggatttagttaaggtcctgtatctggagaggtcagagaagggtcactgttag

SEQ ID NO: 211393 - DNA, 1458 bp, synthetic construct
  misc_feature 1..1458: note = Description of Artificial Sequence: Synthetic coding sequence
  source 1..1458: mol_type = other DNA
atggccgccgtgtggcagcaggtgctggccgtggacgcccggtacaatgcatatcgaactcccacattccctcagtttcgaactcagtacatcaggcgcagaagccagctcctgcgggagaacgccaaagcaggacatcccccagccctgaggaggcaatacctgagactgcgcggccagctcttggggcagaggtacggtccacttagtgagccaggttccgccagagcatatagtaacagtattgtgcggagctccaggacaactctcgaccgaatggaggattttgaagatgacccgcgggctctgggcgcccgcggtcatcgtcggagtgtgagccgcggctcataccagttgcaggcacagatgaatcgcgctgtttacgaggatagacccccaggctcagtggtgcctacctcagccgcggaggcctctcgagccatggccggcgacacctcactgagcgaaaactatgcctttgccggtatgtaccacgtgtttgaccagcacgtagacgaggcagtgcctcgggtgcgcttcgccaatgacgaccgccacagactggcttgttgttcgctcgacggcagcatctctctgtgtcagctcgtccccgcccctcccacggttctgcgtgtcctaagaggccacacccgaggggtaagcgattttgcctggtccttgtccaatgacatcctggtttcaacatcccttgacgccacaatgaggatatgggcctccgaagacggtaggtgcatccgggagattccggaccccgactccgcagaactgctctgctgtacctttcaacccgtcaataacaacctcactgtcgtgggaaatgctaagcacaatgtgcacgtgatgaacatttccacggggaagaaagttaagggcggtagtagtaaactgaccggccgagttttggccctctcattcgacgcccctgggcgactcctgtgggctggggacgatcacgggtctgtgttcagcttcttgttcgacatggccaccggaaagctgaccaaagccaaacgcctcgttgtgcatgaagggtcccctgtgaccagcatttctgctcgctcctgggtgagtcgggaggcaagagatccctctctgctgatcaacgcttgtctgaacaagctgctgttatacagggtggtggataatgaggggacccttcaactgaagcggtccttccccatcgaacaatccagtcatcctgttcggtctattttctgccctcttatgagctttcgccagggggcctgtgtagtgacaggttctgaagacatgtgtgtgcatttcttcgatgtcgagcgcgcggcaaaggcagctgtgaataagctccagggccatagcgcccccgtcctcgatgtgagctttaactgcgatgaaagcctcctagccagctccgacgcctccgggatggtaatcgtgtggagaagagaacagaagtag

SEQ ID NO: 211394 - DNA, 1893 bp, synthetic construct
  misc_feature 1..1893: note = Description of Artificial Sequence: Synthetic coding sequence
  source 1..1893: mol_type = other DNA
atggaggccgtggtgctgccctggcagatcttcggcgtgcgggagcttcctgtcgaaagaggcgtgaccatgaaaggcccccggctgtttagagcccctgggcacgtaccgaccgggcttaagtgtcacccagaccaggagcacatgatctacccacttgggtgcactgtgctcatccaagctattaataccaaagagcaaaacttcctccaggggcacggaaataatgtttcttgcctcgcaatcagcaggagtggcgaatatatcgccagtgggcaggtgacattcatggggtttaaggcagacatcattctttgggattacaaaaacagggagctactggctagactgtctctgcacaaagggaagatcgaagccctcgccttttcaccgaacgatttgtatcttgtcagtctcggtggacccgacgacggcagcgttgtggtgtggagcattgcaaaaagggatgccatttgtggttccccagctgccggtctgaatgtggggaacgcgaccaatgtcatcttctctcggtgtcgcgatgaaatgttcatgactgccggaaatggcacgatacgagtgtgggagctcgatttgcccaatcggaaaatatggcccaccgaatgtcaaactggtcagctcaagcgaattgttatgtccattggcgttgacgatgacgacagcttcttctatctgggtacaactacaggagatattctaaagatgaatcctcgcacaaagctgctgaccgacgtggggcctgctaaggataaattctccctgggtgtgtccgccataagatgtctaaagatgggcggattactggtcggttccggggcagggcttctcgtgttctgtaagagtcccggttataaaccaatcaagaaaatacagctgcaagggggtattaccagcatcacacttcggggcgaaggacaccaattcctggttggcactgaggaatcccatatctatcgcgtgtcgtttactgacttcaaagaaacactaatcgccacctgtcacttcgacgccgtggaggacatcgtgtttccttttgggactgcggagctgttcgcaacctgcgcgaaaaaggacatccgagtttggcatacttccagtaatcgagagttactgagaattacagtccctaatatgacctgccacggaatcgacttcatgagagacgggaaatccatcatctccgcctggaatgatggtaagatcagggcctttgctcccgagacaggtcgcctgatgtacgtgattaacaatgcacatagaataggggttaccgccatcgccaccacgtcagattgcaagcgagttatcagtggaggtggcgagggggaggtgagggtgtggcagatcggctgccagacccagaagctcgaggaggcgctgaaagaacacaaaagtagtgtttcatgtatccgcgtgaagcgcaataatgaagaatgtgtgactgcttccacagacgggacctgcatcatttgggacctagtgcgcctacggcggaatcagatgattctggccaatacgcttttccaatgtgtttgctatcaccccgaggagttccaaattattacaagtggtaccgaccgcaaaatcgcttactgggaggttttcgatggcacggtgattcgggaacttgagggctccctcagcggttctatcaatgggatggatattactcaggagggcgtccacttcgttacgggcggaaatgatcaccttgtcaaggtctgggactataacgagggcgaggtcacacacgttggagtgggacacagcggcaacattacacggatcagaatttcaccaggtaaccaatacatagtttctgttagcgccgacggtgctatactgcggtggaagtacccctatacttcctag

SEQ ID NO: 211395 - DNA, 1863 bp, synthetic construct
  misc_feature 1..1863: note = Description of Artificial Sequence: Synthetic coding sequence
  source 1..1863: mol_type = other DNA
atggacaacaagatcagccccgaggcccaggtggccgagctggagctggacgcagtgataggatttaacggccacgttcctactggactgaagtgtcacccggatcaagaacacatgatatatccgctgggatgtaccgtgttaatccaggcaatcaatacgaaagagcaaaatttcctgcagggtcacgggaacaatgttagctgcctggccatctctcggagcggggagtatattgctagcggacaggtcacattcatgggatttaaagccgacattatactgtgggactacaaaaaccgggagctgctggcccggctgagtctccataagggcaagatcgaagccctggctttctcacccaatgacttgtaccttgtgtcacttggtgggcctgacgatggtagcgtcgtggtttggagcattgcgaagcgtgacgccatctgtggctccccggctgcaggcttaaatgtgggcaatgccaccaacgtcattttttcacgatgtagagatgagatgttcatgaccgcaggcaatggtaccatccgggtgtgggaacttgatctccccaatcgcaaaatatggccgaccgagtgccagacaggtcagttaaaaaggatagtgatgagcataggtgttgatgacgatgacagtttcttctacctaggcactactactggtgacatcctgaagatgaacccccgaactaaactcctgactgacgtaggacctgccaaggataaattctctctcggcgtgagcgcaattcgatgtctcaagatgggcggtctcctggtcggttccggtgctggactactagttttctgcaagtctcccggctataagccaattaaaaagatccagcttcagggcgggattacatcaattactcttaggggcgaaggacaccagttcctcgttggcaccgaagagagccatatctatagagttagcttcacagattttaaagagacactgatcgccacctgtcacttcgacgccgtcgaggatattgtgttccctttcggcacagccgagctgtttgctacctgcgccaaaaaggacattcgagtgtggcacaccagctctaatcgagagcttcttcgcatcacagtcccaaatatgacctgtcacggcattgactttatgcgcgatgggaaatctattattagtgcctggaacgatggaaagatacgggcctttgcccctgaaactggtaggttaatgtacgtcattaacaacgcgcacaggattggggtgacggcaattgcgaccacatccgattgtaagcgggtcatttctggtggtggcgaaggagaagtgcgtgtttggcagatcggatgtcagacccaaaaattggaagaggctcttaaagaacacaagtcttcagttagctgtatcagagtgaaacggaacaacgaagagtgtgtgacagcatccacggatggtacttgtattatctgggatctggtgcggcttcggagaaatcaaatgatcctcgcaaacaccctgtttcagtgtgtgtgctaccacccggaggagttccagatcatcacttcaggaacagaccgcaaaatagcctactgggaagtgtttgacggcacagtaattcgcgagctcgaaggaagcctgtcgggctctattaacggcatggacattactcaggaaggggtgcactttgtcactggcggcaatgaccatctggtcaaggtctgggactataacgaaggtgaggtgacgcatgtaggcgtaggtcattcaggcaacattacgcgcatccggatttcaccagggaatcaatacatcgtgtccgtatctgccgacggcgctattctgcgctggaagtatccctacactagctag

SEQ ID NO: 211396 - DNA, 1659 bp, synthetic construct
  misc_feature 1..1659: note = Description of Artificial Sequence: Synthetic coding sequence
  source 1..1659: mol_type = other DNA
atggacaacaagatcagccccgaggcccaggtggccgagctggagctcgacgccgttattgggtttaacgatatcatcctgtgggactacaaaaaccgagaactgttggctcgcttaagtcttcataagggcaagatcgaggcactggcattcagtccgaatgacctgtaccttgtatccctcggtggaccggacgatggatcagtggttgtgtggagtatagccaagcgcgacgccatctgcgggtctcctgccgctggactcaatgtcgggaacgccactaatgttatcttctccaggtgtagagatgagatgttcatgactgctggcaatgggaccattagggtttgggaactggacctgccaaacagaaaaatttggcctactgaatgtcagacaggccagttgaagcgcattgtgatgtccattggggttgatgacgacgacagcttcttttatctagggaccaccacaggcgatatcctaaagatgaatccaagaactaaactgctgacagacgtagggcccgctaaggacaaattctcccttggcgtaagtgctatccgttgtctgaagatgggagggctcttagttgggagcggggcaggactgctcgtgttctgtaagtctcctggatacaaaccgattaagaagatccagctgcaggggggtattaccagcattactctccgaggagaagggcatcagttcttagtgggaactgaggagtctcatatctaccgagtttcattcaccgactttaaagaaaccttaatcgctacatgccatttcgacgccgtggaagatatcgtctttcccttcgggacggcggagctgttcgccacgtgtgcaaagaaagacatccgggtgtggcacacttccagcaaccgggagctcctccgaataaccgtccccaacatgacttgccatgggattgacttcatgagggacggtaagagcattattagtgcatggaatgacggtaagatccgagcttttgctccggaaacagggcgtctgatgtatgttattaacaatgcccatcgcataggcgtcacggcgatcgcgactaccagcgactgtaagcgggtgatttccggtggcggcgaaggcgaagtgcgggtgtggcagataggctgtcagacacaaaagttggaggaagccctgaaggagcacaaaagcagtgtgagttgcatccgtgtcaagcgtaacaacgaggagtgcgtgacagcatccaccgacggcacatgcatcatctgggacttagtgcgactgagacgtaaccaaatgatcctagctaacactctgttccagtgcgtctgctatcacccagaggagtttcaaatcatcaccagcggtaccgacaggaagattgcatattgggaggtttttgatggaacggtaattagggagctggaaggttctctgtcgggcagcattaatggaatggatatcactcaggagggagtgcacttcgtcactggcggaaatgaccacctggtgaaagtctgggattataatgaaggcgaagttacacacgtaggagtgggacattcaggcaatatcacacgtatccgaattagccctgggaaccagtacattgtgagcgttagcgccgatggagccatcttgcggtggaaatatccatacacctcctag

SEQ ID NO: 211397 - DNA, 3969 bp, synthetic construct
  misc_feature 1..3969: note = Description of Artificial Sequence: Synthetic coding sequence
  source 1..3969: mol_type = other DNA
atggcctggatgacctacatcagcaactggttcgagcaggacgactggtacgagggattgcaacgggcgaacatgagccaggtcagacaggtgggattactggccgctggctgccagccttggaacaaggatgtttgcgctgcatctggcgaccgtttcgcttattgcgccactttggccatctacatctatcagctggaccatcgctataatgagttcaagctgcacgcgatcatgagtgagcacaaaaagacgattaccgcgattagctggtgtccccataacccagacctgttcgcatcaggttccaccgacaatctggtgataatttggaacgtggcggagcagaaagtcattgcgaagttggatagcacgaagggcattcccgcctccctgagttggtgttggaacgctgaagatgtcgtggcctttgtcagccatagggggcccctttttatttggacaatctcgggaccagactcaggagtaattgttcataaggatgctcatagttttctctcagacatttgcatgtttcgctggcatacccaccaaaagggaaaggtcgtctttgggcatatagacggcagtctctccatctttcatccggggaacaaaaaccagaagcacgtgcttcgccccgagagtctagagggaaccgatgaggaggacccggtgacagcgctggaatgggatccgctcagtaccgactacctgctcgtggttaatttgcactacgggatacgtctcgtcgactccgaaagcttgtcatgtatcaccactttcaacctcccctccgctgctgcctctgtccagtgtctggcgtgggtaccctccgctcccgggatgttcattactggcgatagtcaagtcggagtgctcagaatatggaatgtaagcaggaccacaccaatcgataacctcaaactgaaaaagacagggttccactgtttacatgttctgaactcgcccccccgtaagaaatttagcgtgcaatctccgacgaagaaccattacactagctcaacaagcgaggccgtacccccaccaactttgacacagaaccaggcattttctctcccaccaggccatgcagtctgttgttttcttgatggcggagtcggtctctacgacatgggcgccaaaaagtgggatttcctgagggatctggggcatgtagagacaatttttgactgtaagtttaagcccgatgatccaaatctcttggccaccgcatcttttgatgggacaattaaagtgtgggatataaatacattgaccgccgtatatacctcgcctggtaacgagggtgtaatatacagtttgtcctgggcaccaggtggtttaaactgcattgccgggggcacttcacgaaacggggccttcatctggaatgtgcagaaaggtaaaattatccagaggttcaacgagcatggcaccaatgggattttttgtatagcctggagtcataaggatagcaagaggatcgccacttgtagctccgacggcttctgtatcattagaaccatcgatggtaaagtgttgcacaaatataaacaccctgccgccgtgtttggctgcgactggtcacagaacaacaaggatatgattgcaactggctgtgaagacaccaacgtgagagtgtattacgttgcaacctcctccgatcagcctctgaaagtgttcagtgggcacaccgcaaaagtgttccacgtcaaatggagccctttgcgtgaaggaattctgtgcagcggatcggacgatggaacggtgagaatatgggactatacgcaggatgcctgcattaacatactcaacggtcacactgcgcctgttcgcgggctgatgtggaacacagaaatcccctacctgttgatctctggctcctgggattatacgatcaaggtgtgggacacccgggaaggtacatgtgtcgacaccgtctacgatcacggtgccgatgtgtacggattgacctgccacccaagccgccccttcactatggctagttgtagtcgggactcaacagtgagactgtggtctctcacagctctggtgacacctgttcagattaatatactcgccgataggagctgggaggagatcataggtaacaccgactacgcaattgaacctggaacgccgccactactgtgtgggaaagtgtcacgcgatattagacaagaaatcgaaaagctgacggcgaactcccaggttaagaagttaagatggttttcagaatgcctctcacctcctggagggtctgataacctctggaacctcgttgcggtaattaagggacaggatgactctcttctccctcagaattactgtaaaggtatcatgcatctcaaacacctgattaaattcagaacatcagaggcccaggagttaacgactgtaaaaatgagcaagttcggaggcggtataggcgtgccggccaaggaggaaaggttaaaagaggccgccgaaattcacctccgactgggtcagattcagaggtactgcgaactgatggtggagctcggggagtgggacaaagccctttcaatagccccaggcgtgtcagtgaagtattggaaaaaactgatgcagagacgcgccgaccagctcattcaggaggataaagatgacgtcatcccatactgtattgcgattggcgacgtaaaaaaactggtgcactttttcatgagcagaggacaactgaaagaagccctgctggtggcacaggctgcgtgtgaaggcaacatgcagcctctccatgtgtcagtgcccaaaggagcctcctacagcgacgacatatataaagaggactttaacgaattactgcacaaggtcagcaaggaactagccgaatggtattttcaagatggtcgcgccgttcttgctgcatgttgccatctggccattgacaacatcgagctcgcaatggcctatctcataagaggaaacgaattagagctggccgtgtgtgtggggactgtgctcggggagagcgccgcccctgctactcactatgctctggaactgctggctcgcaagtgtatgatgatttccgtgtgcttcccttgcgtgggatactctgtccctttttgctacgttaataggaacctggcggccgatcttcttttaatgatccccgacaatgaattgcatctgatcaagctgtgcgcattctatcctggttgcactgaggagattaatgacctgcatgataaatgtaagctccctaccgttgaagagtgcatgcagctcgccgagaccgccagggctgacgacaatatattcgagaccgtaaaatactacctcctgtctcaggagcccgaaaaggcactgcctataggcattagctttgtgaaagaatacatttctagcagtgactggaccctggacaccatctaccccgtgcttgatctcttatcctacatccgaaccgaaaaactgctgctgcacacgtgtaccgaggccagaaatgaactgctcatcctttgcggctatataggcgcactgctcgctatccggcgccagtatcagtccattgtgccagcactgtacgaatacaccagtcaactgctgaaaaggcgggaagtgagtgtgcccctgaagatcgaatacttgtctgaggagctcgacgcatggagagcctgcacccagagcacgaatcggtcactggaggattctccgtatacccctccaagcgacagccaaaggatgatctatgcgacgttgctgaagagactgaaggaagaatctctaaagggaatcattggtcccgattatgtgaccggcagcaacctcccttcacattccgatatccacatttcctgtctgactgggcttaagatccaaggccccgtatttttcttggaagatgggaaatcagccatttcactcaacgacgccctaatgtgggcaaaggtgaatccattctcccccttgggtactggaatcaggcttaatccattctag

SEQ ID NO: 211398 - DNA, 393 bp, synthetic construct
  misc_feature 1..393: note = Description of Artificial Sequence: Synthetic coding sequence
  source 1..393: mol_type = other DNA
atgagccaggtgcggcaggtgggcctgctggccgccggctgccagccctggaacaaagacgtttgcgccgccagcggggatcggtttgcttattgtgccaccctagctatttacatttaccagctcgatcatcgctataacgaattcaagctgcacgcaatcatgtcggagcataaaaagaccattactgccatttcctggtgtcctcacaaccctgatctattcgctagcggcagtaccgacaacctcgtgatcatttggaacgtggcagagcagaaagtaattgcaaaactggaccgcgcacggcctcccagccctaaaatcatatatattaagataattaacataattgaagaaaacattcataattcagaaatgcaatggatcatctag

SEQ ID NO: 211399 - DNA, 3897 bp, synthetic construct
  misc_feature 1..3897: note = Description of Artificial Sequence: Synthetic coding sequence
  source 1..3897: mol_type = other DNA
atgagccaggtgcggcaggtgggcctgctggccgccggctgccagccctggaataaagacgtatgtgccgcgagtggagacagatttgcatactgtgcaacattggctatctacatctatcagctcgaccatcggtacaatgagtttaaattgcacgcgatcatgagtgagcataaaaaaacgataactgccatatcctggtgtccacacaatccagacttgtttgcctcaggtagcactgacaatcttgtgatcatttggaatgtggcagaacaaaaagtgattgccaagctggattctaccaaagggattccagcaagcctctcctggtgttggaacgctgaagatgtggtggcctttgtgtcacataggggcccgttatttatttggaccatttcgggccccgacagcggtgttatagtccataaggatgcccacagcttcttgtccgacatctgtatgtttcgctggcacactcaccaaaagggcaaggtggtgttcggtcacattgatggtagcctgtcaatcttccaccccggaaataaaaatcagaagcatgttcttcggcctgagtccctcgaggggaccgacgaggaggacccagtgaccgcacttgaatgggaccccctttccaccgattatctactggtggtgaatctgcactatggaattagactggtggactccgagtcactaagttgtattacaacgtttaatctcccatccgcagccgcaagcgttcagtgtttggcctgggtgccttccgcgcccgggatgtttattacgggagactcccaggttggagtattacggatatggaatgtctcaaggacaacccccatcgataacctgaagcttaaaaaaactgggttccactgtttgcacgtgctcaattcaccaccacggaaaaaattctccgtgcagtccccaacaaagaaccattatacttcaagcacttccgaagcggtcccccctcccactctaacccagaaccaagcattcagcctgccccctggacatgcagtctgctgtttcctggatggaggtgtgggcttgtacgatatgggagcaaagaaatgggatttcctgagggacctgggccacgtggaaactattttcgactgtaaattcaaacccgatgacccaaatctcctggccaccgcctcgtttgacggcactattaaggtgtgggatatcaatacattgacagcagtgtacacgtctccagggaacgaaggagttatttatagtctttcttgggcccccggggggcttaattgcatcgcgggcggaacaagcaggaacggtgcattcatatggaacgtgcagaaaggaaaaatcatacaacgctttaacgaacatggcactaatgggatcttttgtatagcgtggtcccataaagactcaaaacggatagccacctgttcctcagatggtttctgtataatcaggactatcgatggcaaagtcctgcacaagtacaaacatccggcagctgtgtttggatgtgactggtcacaaaacaacaaggatatgattgccactggctgcgaagacacaaatgtgagggtctattacgtcgcaacttctagcgaccagcccctgaaagtattttcggggcataccgctaaagtgtttcacgtgaaatggtcccctctgagagaagggattctgtgtagtggatccgacgacggcactgtccggatttgggactacacccaagatgcatgtatcaacatacttaacgggcataccgcacccgtacgaggcctcatgtggaacactgagatcccttacttgctgattagcggttcctgggattacaccattaaggtgtgggatacacgagagggcacatgcgttgacactgtgtatgaccacggcgccgacgtttatggtttaacttgtcatccatcccgtccattcaccatggcttcgtgtagccgagacagcacagtaaggctgtggagtttgaccgctttagtcactcccgtgcagataaacatcctggccgatcggagctgggaagagataattggcaatactgactacgcaatcgagccagggaccccgccattactgtgcgggaaggtttcaagggacatccgccaggagatcgaaaagctgactgctaatagccaggtcaagaagctgaggtggttctcggagtgtctttccccccctggaggatcggacaacttatggaacctcgtggccgtgatcaagggccaggacgattccttgctgccccagaactactgtaaaggcatcatgcacctgaagcatctgatcaaattccgtacctccgaggctcaggagttaaccaccgttaaaatgtcaaagtttggaggaggcattggcgttcccgccaaggaggagagacttaaggaggctgccgaaatccacctgaggctcggtcagattcaacgctactgcgagctgatggtcgagctcggggagtgggataaggcacttagcattgcacccggggtgtctgttaagtattggaaaaagctcatgcagcgacgggccgatcaacttatccaagaagataaggatgacgttataccttactgcattgccatcggcgacgtgaagaagctcgtacatttctttatgagccggggccagctcaaagaggccctgctagtggcacaagcggcctgcgaaggtaacatgcagccactgcatgtgtccgtccccaaaggagcgagttacagcgatgacatctacaaagaggatttcaacgaacttctgcacaaggtgagcaaggagctggccgagtggtatttccaggatggccgtgccgtgctcgccgcctgctgccaccttgcaatcgataacatcgagctcgcaatggcgtatctgatccgcgggaatgaactcgaactcgctgtttgtgtaggaaccgtactgggagagtctgcagcgccagcgacacattacgccctggagttgttggccaggaagtgcatgatgattagtgtctgcttcccttgtgtgggatatagcgtgcccttttgctatgtgaatcggaacttagcagcagatctattactaatgatcccggacaacgagctgcacttgattaagttgtgtgctttttacccaggttgtacagaggagattaatgatcttcatgacaagtgtaagctgccaaccgtcgaggagtgtatgcaattggccgagaccgcccgtgcagatgacaatattttcgagactgtcaaatattacttgttaagccaggaacccgaaaaggcactgcccataggtattagtttcgttaaggaatacattagctccagcgactggacactcgataccatttacccagtgctagacctcctaagttacatcagaactgagaagttgctactgcacacttgcaccgaggccaggaacgagctgctaatcttgtgcggatacatcggagccttgctcgcgattcggcgccagtaccaaagtatcgtgcccgccttgtatgagtatactagtcaactactgaagcggagggaggtgtccgtgcctctcaaaatcgaatatctgagtgaggagttggatgcctggcgagcttgtactcaaagcaccaatcgatccttggaagattcaccttacacccctccctccgacagtcagaggatgatatacgcaacgctgctcaagcgtcttaaggaagaatctctgaaaggcattatagggccagactatgtgacaggaagcaacctgccaagccatagtgacattcacattagttgcttgacagggctgaagattcaggggccagtgttttttctggaggacggtaagagcgccatcagtctgaatgatgcactgatgtgggccaaggttaacccgttctccccactgggtactggcatccgcttaaatcctttctag

SEQ ID NO: 211400 - DNA, 3852 bp, synthetic construct
  misc_feature 1..3852: note = Description of Artificial Sequence: Synthetic coding sequence
  source 1..3852: mol_type = other DNA
atgagccaggtgcggcaggtgggcctgctggccgccggctgccagccctggaataaggatgtctgcgccgcaagcggagaccgttttgcctattgcgcaaccttggccatctatatctatcagctggaccaccgatataacgaatttaagctccacgccatcatgtccgaacataaaaagacaatcaccgcgatatcgtggtgcccccacaacccggacctattcgccagtggatctacagacaaccttgttattatatggaatgtggcagagcagaaagtgatcgcgaagttggattcgactaagggtatcccagcctcactgagctggtgctggaacgcggaagacgttgtcgcttttgtttctcatagggggccgttgtttatttggacaatctccggccccgactccggcgtcattgtgcataaagatgctcacagttttctctccgacatttgtatgttcaggtggcacacccaccagaagggtaaagtggtgttcggtcatatcgacggcagcctgtcaatttttcatcccggcaataaaaaccagaaacacgttcttagaccagagtccctggagggcacagatgaagaggacccagtgacggcgctggaatgggaccctttgagtactgattacctgctggttgtgaatctgcactacggcatacgactggtagactctgagagcctgagctgcatcacaacatttaatctcccatcagccgctgcgtctgttcagtgcctagcatgggtgccttcggccccgggtatgtttattaccggcgattcccaagttggggtgttgaggatatggaatgtgagtaggaccactcccatagacaatttgaagctcaagaaaactgggttccattgtctccacgttttgaattctccacccagaaagaagtttagtgtacagtctccaacaaaaaaccactatacatctagcacttccgaagccgttcctccgccaacccttacacagaatcaggccttttccttacctcccggacacgccgtgtgctgctttttggatggcggggttggcctgtacgacatgggtgcgaagaagtgggacttcttgagggacctcgggcacgtcgaaactatctttgactgcaagttcaagccagatgacccaaatctactggctacagcctcttttgacggtaccattaaggtgtgggatattaacacattaacggctgtttacacatcccccggcaatgagggagtcatttattcgctgtcgtgggccccaggcggtttaaactgtattgccgggggcacttcgcgtaatggggctttcatctggaacgttcaaaaaggcaagatcattcagcgattcaatgaacacggcactaacggcattttctgcatcgcttggtcccataaggattcgaagagaatagccacctgcagctcagatggattctgtattatccgcacgattgacggcaaagttctgcacaaatataaacaccccgccgcagtgttcggctgcgattggtcccaaaataacaaggacatgatcgccacaggctgtgaggacaccaacgttcgggtctactatgttgccacaagtagtgatcagcctctcaaggtattttcaggtcatacagccaaggtctttcatgtgaaatggagtcccctccgcgagggcatattatgttcaggttccgacgacggaactgtaagaatttgggactacacccaggatgcttgcatcaatatcctgaacggccacacagctcctgtgcggggcctgatgtggaacactgaaatcccgtacctcctgataagcggttcttgggattacaccatcaaagtttgggacaccagagagggaacttgcgtcgacactgtgtacgatcatggggcagatgtgtatggtctgacgtgccacccctctagaccatttacaatggccagctgcagccgcgattcgaccgtgaggctttggagtctaacggccctcgtgacacctgtgcagatcaatattctcgccgatcgttcatgggaagagatcataggaaacaccgactacgcgatcgaacctggaacacccccacttttgtgtggaaaggtgagtcgcgatatccgacaagagattgagaaacttacagcgaacagccaagtgaaaaaacttcgctggttttccgaatgtcttagtcctcccggaggcagtgacaatctgtggaacctggtggccgtgatcaagggtcaggacgactccctcctcccgcagaattactgcaagggtattatgcatctgaaacacttaatcaaatttcggacttctgaagcacaggagcttaccacggtgaaaatgtctaaattcgggggcggcatcggggtgcctgctaaagaagaaagacttaaagaagcggccgaaatccacttgcgccttggtcaaatccaaagatattgtgagctgatggtggagctcggcgagtgggataaggccttatcaatcgctcctggcgtgtccgtcaaatattggaaaaagctgatgcagagaagggccgaccagctaattcaggaagataaagatgatgtcatcccttattgcattgcaatcggggacgttaagaagttagtgcattttttcatgagccgaggacagctgaaagaggccttgctcgtcgcccaggctgcttgtgagggcaacatgcagccgctccatgtgtcagtaccgaaaggcgccagctactcagacgacatatacaaggaggactttaacgaactcctgcacaaggtgagcaaggaacttgctgaatggtatttccaggacggtagagcggttctggccgcctgctgtcacctggccattgacaatatagaactcgctatggcatacctgatcaggggaaatgaacttgagctggctgtgtgcgtgggcactgtcctgggcgagtcggctgcacccgccacacactacgccctggaactcctcgcacggaaatgtatgatgatctccgtctggaatctggctgccgacctcctgctgatgatacctgacaacgagctccatctcatcaaactctgcgcattttatcccgggtgcacagaggaaatcaacgatctccatgacaagtgcaagttgccaactgtagaagaatgcatgcaactggcggagaccgccagggctgacgacaatattttcgagactgtgaaatactacctgctgagtcaggagccagagaaagcactcccaatcggcatctctttcgtcaaggaatacataagcagcagtgattggaccttggacaccatttacccagtacttgacttgctcagttacatacggacagaaaagctcttgctgcatacttgtactgaggcacggaacgagctgcttatcctatgcgggtatataggagccctgctggcgataagaaggcagtaccagtccattgtgccagccctgtatgagtatacatcccagctgttgaaacggcgtgaggtgtccgtccctttgaaaatagaataccttagcgaagagcttgacgcatggcgagcatgcacccaaagtactaatcgctccttggaagactccccttatactccaccaagcgactctcagaggatgatctacgcaacactgcttaaaaggctgaaagaggaatccctgaagggaatcatcggccctgactatgtgactgggagtaatctcccaagccattcagacatccacatttcctgtctgacagggctcaaaatccaggggccggtgttcttcctggaagacggcaaatctgctatcagcctcaacgacgccctgatgtgggctaaggtgaaccccttctcccccctaggtacaggaatccgtctcaatcccttctag

SEQ ID NO: 211401 - DNA, 3549 bp, synthetic construct
  misc_feature 1..3549: note = Description of Artificial Sequence: Synthetic coding sequence
  source 1..3549: mol_type = other DNA
atgatcaccgtgagcaaccaggagggcgacaccatccggcagacccaggtgagatctgaaccatccaacatgcaattcttcctcatgaagatggacgatcggaccagcgctgcagagagtatgatcagcgttgtcctcggcaaaaagactctgttcttcctgaaccttaacgagcctgacaatcccgctgacctggagtttcaacaggatttcgggaatatcgtgtgttataactggtacggggacggaaggatcatgatagggttctcctgtggccactttgtggttatttccactcacactggggagctaggacaagagatctttcaagctcgcaaccacaaggataacctgacatcgattgcagtgtcccagacgctgaacaaggtcgcaacctgtggcgataactgcataaaaatccaggacctggtggacctgaaagacatgtacgtgattctgaaccttgacgaggagaacaagggattgggcacactgagctggaccgatgacggccagttgctcgcactgtctacacagaggggttctctacacgtgtttctaaccaaattacctatcttgggcgacgcttgtagcactagaattgcttatctgacctcactcttagaggtcactgtggcaaacccggtcgaaggcgaactaccgattactgtcagtgtcgacgtggaacctaacttcgtagctgttgggctgtatcacctcgcggtgggcatgaataaccgtgcctggttctacgttctcggcgagaacgcagtgaaaaagcttaaggacatggaatacctgggaaccgtagctagcatttgcctgcactcggattatgctgctgccctgttcgaaggaaaagtgcaactccatctcattgagagtgaaattctggatgctcaggaggagcgagaaactagactgtttcctgccgtcgatgacaaatgcagaatcctgtgtcatgccctcactagcgatttcctcatctatggcactgacactggtgtggtgcagtatttttatatcgaagattggcagttcgtcaatgactatcgccacccagtgagcgtcaagaaaatcttccctgatcccaacgggacaaggctggttttcatagacgaaaaatcggacggttttgtctactgtccagttaacgatgcgacatatgagatccctgacttctccccaacgattaagggcgttttatgggagaattggcctatggacaagggggtgttcatagcctatgatgatgataaggtgtacacttatgtgtttcataaggacaccatacagggtgccaaagtgatactagccggttccacaaaggtcccctttgcccataagccattgctgctgtacaacggtgaactgacctgccaaacccagtctggcaaggtgaataacatctacttatcgacccatggattcctgtcaaacctcaaggatactggtcctgacgagctaaggccaatgcttgcccagaaccttatgctcaagaggttttccgatgcctgggagatgtgcagaattctcaacgatgaggccgcctggaacgagttagcccgcgcctgtctacatcacatggaagtcgagttcgccatccgtgtgtatcgccgaattgggaacgtcggaattgtcatgtccttagagcaaatcaaaggtatcgaggattataatcttctggccggtcacctcgccatgttcactaatgactataaccttgcccaggatctgtatctggctagttcttgcccaattgccgccctggagatgaggagagacctacagcactgggacagtgcactacaattggccaaacacttagcacctgaccagattccatttatcagtaaggaatatgctattcagctcgaatttgctggtgactacgtgaacgctttggcccactacgagaaaggaataactggcgacaataaggaacacgacgaggcctgcctcgccggagtggcacagatgtcaatccgcatgggcgacatcagaaggggagttaaccaggctctgaagcatcccagcagagtcttgaaacgagactgcggagccattctggagaacatgaaacagttttccgaagccgcccaattgtacgagaaaggtctgtattacgacaaggccgcttctgtttacatccgttctaagaactgggcaaaagtcggggacctgctgcctcatgtaagctctcccaagatccacctgcaatatgccaaagcaaaggaggccgacggaaggtataaagaagctgttgtggcttacgaaaatgccaaacagtggcaatctgttatcagaatctatctcgaccatctcaacaaccctgaaaaagctgtcaatattgtgcgggaaacccagtctttagatggggccaaaatggtagcgcgtttcttcctgcagctcggtgactacggatcagccatccagtttctggtcatgagcaagtgtaataacgaggcttttaccctcgctcagcagcacaacaaaatggagatttatgcggacatcataggttcggaagatactaccaatgaggactaccaatcaatagcactttacttcgagggcgagaaaaggtaccttcaggctgggaaattctttcttctgtgcgggcagtactcccgcgctctaaagcatttcttgaagtgtccgagctctgaggacaacgtagcaattgaaatggctattgagacagttggccaggcaaaagacgagcttctgacaaaccaacttatcgatcatctgctgggggagaatgatggcatgcccaaagacgctaagtacctgtttcggctttacatggctctgaaacagtatagagaggcagcccagacagccatcataatagctcgtgaggaacagagtgctggcaactataggaatgcccacgacgtgctcttttccatgtacgcagaactcaaaagccagaagatcaagatcccatctgagatggccacaaatttaatgatcctacattcttacattttggttaagattcatgtcaagaacggcgatcacatgaagggtgcccggatgctgatcagagtcgcgaacaacatctccaagttcccttctcacattgtgcctatccttacaagcactgtgatagagtgtcaccgtgccggacttaagaattccgcgtttagctttgctgccatgctgatgagaccagaataccgctcaaagatcgacgccaagtataagaaaaaaatcgaaggcatggtcaggcgccctgatatttccgaaatcgaggaagcaactaccccatgcccattctgcaaatttcttctgcccgaatgcgagctgttgtgcccgggatgcaagaactctatcccatactgcattgccactggtaggcacatgctgaaagacgactggacagtttgcccacactgcgacttccccgccctctactcagagttgaaaatcatgctgaacacagaatctacctgcccaatgtgctccgagcgactcaatgccgctcaactcaaaaagattagtgactgtactcaatacctgaggactgaggaagaactctag

SEQ ID NO: 211402 - DNA, 4029 bp, synthetic construct
  misc_feature 1..4029: note = Description of Artificial Sequence: Synthetic coding sequence
  source 1..4029: mol_type = other DNA
atgaagcggatcttcagcctgctggagaagacctggctgggcgccccgattcagttcgcatggcagaaaaccagcggaaactacttggctgtgactggcgcagactacattgtcaagatcttcgaccggcatggccagaaaagaagcgagatcaacctgcccggaaactgcgtggctatggattgggacaaggatggagacgttcttgcagtcattgcggagaagtctagctgtatctacctttgggatgctaataccaataagactagccagctggacaacggcatgcgtgatcagatgagtttcctgctatggtccaaagtgggcagcttcctagccgtcggcacagtcaagggcaatctgctcatctataatcaccagactagccggaagatccctgtactgggcaagcatacaaaacggattacctgcggctgctggaatgccgagaacctgctcgctctgggtggcgaagataaaatgatcacagtaagcaaccaggagggggacacaattaggcagactcaagtaagatccgagcctagtaacatgcagttttttttgatgaagatggatgaccgcacctccgcagccgagagcatgatctctgttgtcctcggtaaaaagacactcttctttctaaacttaaatgagcctgataaccccgcagacctcgagttccagcaggacttcggcaacattgtttgttacaactggtacggagacggccggattatgatcggattctcttgcggtcacttcgttgtgatctctacccacaccggggaattgggtcaggagatcttccaggccagaaaccataaagataatctgacaagtatcgcggttagtcagaccctaaacaaagttgctacctgtggcgacaattgcatcaaaatccaggatctggtcgacttaaaggacatgtatgtcattctgaaccttgacgaagaaaacaaggggttaggcaccctgtcgtggacggatgatggtcagctgctggctctctccacccagagaggtagtcttcatgtgtttctgactaaactgccaattttaggggatgcttgtagtacccgaatagcatatctgacatcactgcttgaggtcaccgtggctaatccggtagaaggcgaactccctattaccgtctcggtggacgtggaaccaaatttcgtggccgtcggactttaccacttagcagtcggtatgaataatcgcgcctggttctacgtcctgggagaaaatgccgttaagaagcttaaggatatggagtatctgggtaccgtagcatctatctgtctccattcagactatgcagccgccctctttgaaggtaaagttcagctccacctaatcgagtctgagatcctcgatgcccaggaagagcgcgagacacgtctctttcctgcagtagacgacaaatgcaggatcctatgtcacgccttgacttctgattttctgatctacggcactgatactggcgtagtccaatacttttatattgaggattggcagttcgtgaatgattaccggcaccccgtatcggtcaagaagatttttccggatccaaatggcacgaggctcgtgtttatcgacgaaaaaagcgatggatttgtgtattgtccagttaacgatgccacctacgaaatccccgacttctctcctactatcaaaggggttctctgggagaattggcccatggataagggagtgtttatagcatacgatgatgacaaggtgtatacctatgtctttcacaaggacaccatccagggcgcaaaggtgatccttgcaggaagcactaaagtacctttcgcccataaacctctgctcctgtacaatggtgagctgacatgtcagacacagtcgggaaaggtgaacaacatttacctgagtacacatggattcctgtcaaacctgaaagacacagggccagacgaactcaggcccatgttagcacagaatctgatgctcaagcgtttctcagacgcgtgggagatgtgcagaattctgaatgacgaggccgcctggaacgagctagctcgagcgtgcctccaccacatggaggtcgagttcgccataagggtgtaccggagaatcgggaacgtggggattgtcatgagcctagaacagattaaaggcattgaggattataatctcttggctggacatctcgcgatgtttactaatgactataatctggcccaggatctttatctggcaagctcttgtcccattgctgctttggaaatgcgacgggacctgcagcattgggactctgcattgcagctggcaaaacacttggccccggatcagatccccttcatctccaaggaatacgctattcagcttgaattcgcaggggattacgtgaacgccctcgcacactacgaaaaggggatcacgggcgataacaaagaacatgatgaggcatgcctcgcaggcgtggctcaaatgtcaatccgcatgggtgatataaggcggggggtcaaccaggctctcaagcaccccagtcgggtactcaagagggattgcggcgctattctcgaaaatatgaaacagttttccgaagctgcccagctgtacgagaaaggcctgtactatgacaaggccgcctctgtgtatatacgctcaaagaattgggctaaggttggagatttgcttccccatgtgagttctccgaaaatacacctgcagtatgccaaagcgaaagaagctgatggaaggtacaaggaagccgttgtagcctacgaaaatgcaaaacagtggcagtctgttataaggatttatctcgaccatttgaataatcccgaaaaagccgttaacattgtcagagaaactcaatcattagacggagcgaagatggtggcccgcttcttccttcagcttggcgactacggcagcgccatacagtttttagtgatgtctaaatgcaacaatgaggcttttactctggctcagcagcacaacaaaatggaaatctacgctgatatcatcggttctgaggataccaccaatgaggactatcagtcaatcgctctatactttgagggagagaagcggtatcttcaagcaggtaagtttttccttctgtgcggacaatactcaagggccctgaagcacttcctaaaatgtccctccagtgaagacaatgtggcaatcgaaatggcaatagagactgtggggcaggctaaggacgaacttctcaccaaccagctcatagatcatctgttgggcgaaaatgacgggatgcctaaagacgctaagtacctgtttagattatacatggccttgaaacagtatagagaagccgcgcagacagccatcattatcgcgcgtgaggaacaatcagcgggaaactatcgaaatgcccatgatgtactgttttcaatgtatgcggagctgaagtctcagaagattaaaatcccatcagagatggcgactaacttaatgattcttcactcctatattctggtcaagatccatgtcaagaatggtgatcacatgaaaggagctcgcatgcttattcgggttgcaaacaatattagcaaattccctagtcacatagtgccgattctgaccagcaccgtgattgagtgtcatcgggcaggtctgaaaaacagcgctttcagcttcgcagcaatgctgatgcggcctgagtaccgtagcaaaatagatgccaaatacaagaagaaaattgaaggaatggtgcgacgaccagatattagtgagatcgaggaggccaccacaccctgcccattttgcaaattcctgcttcctgagtgcgagttactctgtcctggatgcaagaattctatcccatactgtattgcgacaggaaggcacatgctcaaggacgactggacagtatgccctcactgtgactttccagcgttgtactctgaactgaagatcatgttgaataccgaatcaacctgtccaatgtgctcagagcggttgaacgccgcccagctcaaaaaaatatccgattgcacacagtatctgcggactgaagaggagctctag

SEQ ID NO: 211403 - DNA, 1443 bp, synthetic construct
  misc_feature 1..1443: note = Description of Artificial Sequence: Synthetic coding sequence
  source 1..1443: mol_type = other DNA
aagcggatcttcagcctgctggagaagacctggctgggcgcccccatccagtttgcatggcagaagaccagtgggaattatctagccgtcacgggcgctgactatatcgttaaaatctttgataggcacggccagaagcggagcgaaataaacctgcctggtaattgtgtggctatggattgggacaaagacggcgacgttctggctgttatcgctgagaaaagcagctgtatctacttgtgggatgccaacactaacaagaccagtcagctggacaacgggatgagagatcagatgtcattcctcctgtggtcgaaggtcgggagctttctcgcagtgggtaccgtcaaaggaaacctgctgatttataaccatcaaacaagcagaaaaatcccagtcctcggtaaacacaccaaaagaattacgtgcgggtgctggaacgccgagaacctgctggccctgggcggcgaagataagatgattaccgtctctaatcaagaaggcgatactattagacaaacccaggtccgcagcgaaccttcaaacatgcagttttttctcatgaagatggacgataggacctctgctgctgagtcaatgatttctgtagtacttgggaaaaagaccctgtttttcctgaatttaaacgaacccgacaatcctgcggatctggagttccagcaagactttggtaatattgtctgttacaactggtatggcgatggacgcattatgataggattctcctgtgggcacttcgtggtcatctcaacgcacaccggtgaactaggccaagaaatatttcaggctaggaatcacaaggataacctaacatccatagctgtctcccagacgcttaataaggtagccacctgtggcgacaattgcatcaagattcaggatcttgtggatctcaaggacatgtatgtgatcctgaatctggacgaggaaaacaaggggctgggcaccctctcatggactgatgacggccaactgctggcactgtcaactcaacgcggatccttacacgtgtttctgactaagctccctatactcggagatgcttgtagtactagaatcgcttacctaactagtctcctcgaagtgacagtcgccaaccccgtggagggtgagttaccaattactgtctctgtagatgttgagcctaactttgtggccgtcgggctgtatcacctcgccgtgggcatgaacaacagagcttggttttacgtgctgggtgaaaacgcagtgaagaaattgaaggatatggaatacctcggaacagttgcaagtatttgccttcatagcgattacgctgccgcactgttcgaagggaaggttcaactgcatctcaaagctaagagctggatgctcaaaaagaatgtccggctgggtttttcccagcaatggatgatctctgcagtctcctacgcaatgccatag

SEQ ID NO: 211404 - DNA, 1446 bp, synthetic construct
  misc_feature 1..1446: note = Description of Artificial Sequence: Synthetic coding sequence
  source 1..1446: mol_type = other DNA
atgaagcggatcttcagcctgctggagaagacctggctgggcgccccaattcagtttgcctggcagaagactagtggcaattacttagctgtgacgggcgcagactacattgttaaaatatttgatcgtcacggacagaaacgttccgaaataaacctgcccggcaattgcgtagccatggattgggacaaggatggtgatgtcctcgcagttatagctgagaagtcgtcttgcatttatctttgggacgccaatacgaataaaacctctcaactggataatggaatgcgtgatcagatgtcatttctcctgtggtccaaggttggcagctttctggctgttggaaccgtgaagggcaacctgcttatctacaatcatcaaaccagccgcaagatcccagtcctggggaagcacaccaagaggattacttgcgggtgctggaatgcagagaatctgcttgctctggggggggaggataaaatgattaccgtgagcaaccaagaaggagatacaattcggcagacccaagttcggtccgagccctctaatatgcagttctttttgatgaagatggatgatcgcacttctgctgcagagtctatgatcagtgttgttctaggaaagaagacattgtttttcctgaatctgaacgagcccgacaatcctgcagaccttgagtttcagcaggattttgggaatatagtatgctacaattggtatggagacggccggatcatgatcggttttagttgcggccatttcgtggttattagcacgcatacaggcgagctgggtcaggagatcttccaagctaggaaccataaggacaacctgaccagcatcgccgtctctcaaacgctcaataaagtggcaacatgcggggataattgtatcaagatccaggatctcgtagacctcaaggatatgtacgtgattctgaacctggatgaagagaataagggcctggggactctgtcctggactgacgacgggcaactcctggctctttcaactcaacgcgggtctctccatgtgtttttgacgaaactccctattctcggcgacgcatgcagcactcgcattgcgtatttgacgagtctgcttgaagtgactgttgcgaatcctgtggaaggcgaactccctataaccgtctccgtggatgtcgaacccaactttgtggctgtgggcctctaccacctggctgtcggcatgaacaacagggcctggttctatgttctgggtgagaacgccgtcaagaagctgaaggacatggaataccttggcaccgtggcttccatttgtctgcattcagactacgcagcggctctcttcgaaggcaaggttcagctccatcttaaggctaagtcctggatgctgaagaagaacgtgaggctcgggttttcccaacagtggatgatctccgctgtttcctacgctatgccctag

SEQ ID NO: 211405 - DNA, 2832 bp, synthetic construct
  misc_feature 1..2832: note = Description of Artificial Sequence: Synthetic coding sequence
  source 1..2832: mol_type = other DNA
atgggcctgaccaagcagtacctgcggtacgtggccagcgccgtgtttggggtgattggcagccagaagggaaatatcgtctttgtgaccctgcggggcgagaaagggagatacgtcgccgtgcctgcctgtgaacacgtgttcatatgggatttgaggaaaggggaaaaaatactgattctgcagggcttgaagcaagaggtcacctgcctgtgccccagtcccgatggacttcacttagcagtgggctacgaggacggctcaatacggatattcagcctcctcagtggagaaggtaacgtgacgttcaacggtcacaaggctgctattacaaccctgaaatacgaccagctggggggacgcctggcgtctggctctaaggataccgatattatcgtgtgggacgtcattaatgaatcagggctgtacaggcttaagggacataaagatgccatcacccaggctctgttccttagagagaaaaacctgctagtaacttctggaaaggatacaatggttaagtggtgggatcttgatactcagcattgttttaagacaatggtgggacaccggacagaggtctgggggttggtacttttgtccgaagaaaagagacttatcaccggagcaagcgactctgaattgagggtttgggacatagcgtacctccaggaaattgaagacccagaggaacccgatccgaagaaaattaagggttcatcacccggaattcaggacacattggaagcagaggacggtgcattcgagacagacgaggcacccgaggatagaattctgtcttgccggaaggccggaagcataatgcgagagggtcgtgatcgagtggttaatctggccgtggataaaacggggcgaatcctggcctgccatggcaccgacagtgtgctcgaactcttctgtatccttagcaaaaaggagattcaaaaaaagatggacaagaaaatgaagaaagcccgcaaaaaggccaaacttcactcctcaaagggggaggaggaggatccggaggtgaacgtggagatgtctttgcaggacgaaatccagcgagtaaccaatatcaagacatccgccaaaattaagagctttgacctgatacatagcccccatggggaactgaaggccgtatttctccttcagaacaacttggtcgagctgtactctctaaaccccagtttgcccactcctcaacctgtgcggacatcccgaattaccattggcgggcaccgctctgacgtgcgaacattgtcgtttagcagtgataacattgcggttctttctgcagcagccgattccatcaagatctggaataggtcaactctgcagtgcatccgaactatgacatgtgagtacgcactgtgctccttcttcgtcccgggagacagacaggtggtgatcggcaccaagactggaaagctccagctgtatgacttagcctctggcaatctgttggagactattgatgcacatgatggtgcattatggtccatgtccctgtcgcccgaccagcggggcttcgtcacaggtggcgcagacaagtctgtaaaattttgggatttcgaactggtgaaggatgaaaattccactcagaaacggcttagtgtcaagcagacacggacactccagctggatgaggacgtgctgtgtgtatcctactcaccaaaccaaaaacttctggcggtttccctcttagattgcacagtgaagatcttctacgtcgacacactcaagttctttctcagcctgtatggccataaattacccgtgatttgtatggacatcagccatgacggagcgctgattgccacgggtagcgcagatcggaacgttaagatctggggcttggattttggggattgtcataaatctctgtttgcccacgatgatagtgttatgtacctccaattcgtacccaaaagtcacctgttcttcactgccggcaaagaccataagattaaacagtgggacgccgataaatttgaacatatccagacgctcgaaggccaccaccaggagatttggtgcctcgccgtgagcccctcaggagactatgtagtctcatcttctcacgacaagtcacttcgtctctgggaacgcactcgagaacccctcatcttagaggaggaacgggaaatggaaagagaagcagaatacgaggaatccgtcgctaaggaagatcagcctgccgtgcctggagagactcagggcgattcatatttcacaggaaaaaagactatcgaaaccgttaaggcagcggagcgcattatggaggcgatcgagctttaccgcgaggaaacggctaaaatgaaagagcacaaggctatttgcaaggccgccggcaaagaagtacccttaccttccaacccgatcctgatggcttacgggtctatctcaccctccgcctacgtgttggagatattcaaaggcatcaagagtagcgagctagaagagtcacttctcgtcctcccattctcttatgtgcccgatattctgaagttgttcaatgaattcattcaattgggttcagatgtcgaactgatctgcagatgtctgttctttctgctacggattcacttcggccaaataaccagtaatcaaatgcttgttccagtaatcgagaagttgcgggaaacaactatctccaaagtatcccaagtgcgcgatgtgatcgggttcaacatggccggcctggattacctgaaacgtgaatgtgaagccaagagcgaagtaatgttttttgccgatgcaacttctcacctggaagagaaaaaacgcaagagaaagaaacgcgagaagctgattctgactttaacgtag

SEQ ID NO: 211406 - DNA, 123 bp, synthetic construct
  misc_feature 1..123: note = Description of Artificial Sequence: Synthetic coding sequence
  source 1..123: mol_type = other DNA
atgggcctgaccaagcagtacctgcggtacgtggccagcgccgtgtttggagttattggatcccagaagggactagcatctcaggcctcttcatctttcgtcttctttgctaccgagttttag

SEQ ID NO: 211407 - DNA, 1611 bp, synthetic construct
  misc_feature 1..1611: note = Description of Artificial Sequence: Synthetic coding sequence
  source 1..1611: mol_type = other DNA
atggccacccgggcccagcccggccccctgagccaggccggcagcgcgggagtcgcggcattggctaccgttggggtcgcgagtgggcctggccccggtcgccctggtccactgcaagacgaaactttaggtgttgcttccgtgccctcacagtggcgggctgtacaagggatccggtgggagactaagtcttgccagacagcctcaattgccacagcatccgcatccgctcaggcccgcaatcacgttgatgctcaggtccaaacggaagcacctgtgccagtgtccgtacagcctccatctcaatatgatataccaagactggctgcttttctgcgtagggttgaagccatggttattagagagctgaacaaaaattggcagagtcacgcatttgatggttttgaagtgaactggactgagcagcaacagatggtttcctgcctctacaccctgggctacccacctgcacaggctcagggcttacacgttacaagtatatcctggaactccacaggctctgttgttgcatgcgcatatggtaggctcgaccatggcgactggtcaacgcttaagtccttcgtctgtgcttggaatctggacaggagagatttgaggccacagcagccaagtgccgtcgttgaggtccccagcgccgtgctctgcttggctttccatcctactcaaccatcacatgtggccggaggcctctattccggtgaagtgctggtatgggacctctctcggttagaagaccccctcctctggaggaccggcctaactgacgacacacataccgaccccgtgtcccaggtggtttggcttcctgagccagggcattcacaccgcttccaggtactgtccgttgccaccgatggtaaggtactactgtggcagggtatcggtgtcggccagctgcagttaactgagggcttcgccctggtaatgcaacagctccctagaagcacaaaactgaagaaacatccccgcggagaaactgaagtaggggcaacagctgtggctttctcttcattcgatccccgccttttcatcctcggcactgaaggcggctttcccctcaaatgcagtctggcagccggtgaagcagcgctcacgagaatgccatcttcagtgccactgcgggcgccagcacagttcaccttctctccccacggaggcccaatctactctgtgtcctgttcgcccttccaccggaatctgtttcttagcgccggaactgatgggcatgttcatttgtactccatgctgcaagctccccctctgacttccttacagcttagcctgaaatacctgttcgctgtgcgatggagccccgtcaggcctttggtgttcgccgctgcttccggaaaaggcgacgtgcagctcttcgacttacagaaaagctctcagaagccgactgtcctcataaagcagacccaagacgagagcccggtgtactgcctcgagttcaatagtcaacagacccagctgctggccgcaggagatgctcaaggtaccgtgaaagtgtggcagctgtccactgagtttaccgaacaggggccacgggaagcagaagacttggactgtctggcagccgaggtcgcggcttag

SEQ ID NO: 211408 - DNA, 420 bp, synthetic construct
  misc_feature 1..420: note = Description of Artificial Sequence: Synthetic coding sequence
  source 1..420: mol_type = other DNA
gccggcgtggccgccctggccaccgtgggcgtggccagcggccccgggcccggcaggccaggcccccttcaggatgagaccctcggtgtagcgtctgttccttcgcagtggcgtgcagtgcagggcattcgctgggagacgaagtcttgtcaaactgcctccattgctaccgcttccgcttcggcccaagccagaaaccatgtcgatgcacaggtgcagactgaggcccccgtgcccgtgtccgtccagccaccctcacagtacgacatcccaaggctcgcggccttcctcagaagagtggaagcgatggtgatcagagaactgaataaaaactggcagagccatgctttcgacgggttcgaggttaattggacagagcagcagcaaatggcaggcccctggggcctggagcacgcatag

SEQ ID NO: 211409 - DNA, 819 bp, synthetic construct
  misc_feature 1..819: note = Description of Artificial Sequence: Synthetic coding sequence
  source 1..819: mol_type = other DNA
ctgagccaggccggcagcgccggcgtggccgccctggccaccgtgggagtggccagtggccccggtcctggacgacctgggccactgcaggacgagaccttgggagtagcaagcgtgcctagtcagtggcgtgcagtccaagggattcgttgggagactaaaagctgccagacagcctcaatcgccaccgcaagcgcatcagcccaagctcggaaccatgtggatgcccaggtacaaaccgaagcgccagtgccagttagcgttcagcctccttcccagtacgacattccccgcctagctgcctttctgcgccgggtggaggcaatggtgattagggaacttaacaagaactggcagtcccatgcgttcgacggcttcgaggtgaattggaccgagcagcagcagatggtaagttgcctgtatactctcggctaccctccggctcaggcccagggactacacgtgacaagcatatcttggaattccaccggaagtgtggtagcttgcgcctatggaagactcgaccatggcgattggtctacattaaaatcgttcgtgtgtgcatggaatctggaccgaagagatctgcggcctcagcagccctctgctgtggtggaggtgccatctgccgttctctgcctcgcctttcaccctacacagcccagccacgtcgctggcgagctccccgccgtcagcgcctccagtcctcttagaacccaacttcctgcattgcagcgggctcaggggtccttcccttgggccctgtggcccggcgaccggaaagcaggccccgacccattaagcctggagccgagatag

SEQ ID NO: 211410 - DNA, 3513 bp, synthetic construct
  misc_feature 1..3513: note = Description of Artificial Sequence: Synthetic coding sequence
  source 1..3513: mol_type = other DNA
atgttcttctacctgagcaagaagatcagcatccccaacaacgtgaaactgcaatgcgtcagttggaataaggaacagggcttcatcgcttgcgggggggaagatggactgttaaaggttctcaaactcgagacacaaactgacgatgcaaaactgcgcgggctggcagctccctccaacctctctatgaaccagaccctggaggggcattccggaagtgtacaagtggttacatggaacgagcagtaccagaagctcaccactagcgatgagaacggcttgataatcgtatggatgctctacaaaggatcttggattgaagaaatgataaataatcgcaataagtcagtcgtgaggtcgatgagctggaacgccgatggccagaagatctgtatagtgtacgaagacggcgcagtcatcgtcggttccgttgatggaaataggatctgggggaaagatctgaaagggattcagctgtctcatgtgacctggtctgccgactcaaaggtgctccttttcggtatggccaatggcgagattcacatctatgacaatcaggggaattttatgattaagatgaaattgtcttgccttgtgaacgtgaccggcgccatcagtattgccggcatccactggtaccatggtaccgagggatatgtggagcctgactgcccctgtctggctgtgtgcttcgacaatgggaggtgccagattatgcggcacgagaatgaccaaaaccccgtgctgattgacactggtatgtatgttgttggcattcagtggaatcacatgggttctgtactcgccgttgccggttttcagaaggccgctatgcaagacaaggatgttaacattgtgcagttctatactccatttggagagcacctgggaactttaaaggtgccaggcaaggaaatctcagccctgagctgggaaggaggtggcctgaagattgcactcgctgtggactcattcatctattttgcgaatatcaggcccaactataaatggggctactgtagtaatacggtggtgtacgcctatacaaggccggatcgcccggagtattgtgtggttttctgggacacaaagaataatgagaagtacgtgaaatatgtcaaggggctgatcagtatcacgacctgtggggacttctgtatacttgctaccaaggcggatgagaatcatccccagttcgttctggtgctctgtaacagtatcggcactccactcgacccgaaatatatagatattgtgccactgttcgttgccatgaccaaaactcacgtcatcgctgccagtaaggaggctttttatacatggcaatatagagtggccaaaaagctgacagcccttgaaatcaaccagatcacgagaagcaggaaagaaggcagagaaagaatttaccacgtagacgatactccttcggggtcaatggacggggtcctcgactacagcaagacaattcaaggaactcgcgacccaatctgcgctattactgcatccgacaaaatactgatagtcggacgagaaagtgggactatccaacgatacagtttgccgaatgttggccttatccagaaatatagtctcaactgcagggcttaccagctttcgcttaattgcaactcgagccggctggcaatcattgacattagcggtgtactgacgttttttgaccttgatgcacgcgtcactgactcaaccggccaacaggtcgtgggcgagctgctgaaactcgagcggagggatgtttgggatatgaaatgggcaaaagataaccccgatcttttcgcaatgatggaaaaaacccgcatgtatgttttccgtaatctcgatccagaagagcctattcagacttctggttatatttgtaattttgaagaccttgagatcaaatcggttctgctggatgagatcctgaaagatccggagcaccctaacaaggattacctcatcaattttgaaatccggtcattaagagactcccgagcgctcatcgagaaggtaggaataaaggacgcatcccagtttatcgaagataaccctcacccgcggctgtggcggcttctagcggaagccgccttacaaaaactggatttatacacagcagagcaggcgttcgtccgatgtaaagactatcaagggatcaagtttgtcaaacggttaggcaaattgctgtccgagagtatgaagcaggccgaggtcgtaggttactttggcaggttcgaagaagccgaacggacttacctcgaaatggatcgtagagacctggcaatcgggctaaggctgaagctcggcgattggtttcgggtgctgcagctgctcaagacaggttcaggtgatgccgacgactccctgctggagcaggctaataacgcaattggcgattactttgccgacagacaaaagtggctgaacgcggtacaatattatgtgcaaggaaggaatcaggaacgcctggctgaatgttattacatgctggaagactatgaggggttagaaaacttggcaatcagtcttccagagaaccacaagcttcttcctgaaattgcacagatgtttgtaagggtggggatgtgcgagcaggctgtaactgcttttctgaagtgttcacagccgaaggctgccgtcgatacctgtgtgcacctgaaccagtggaacaaggccgttgagctagccaaaaaccacagtatgaaagagatcggcagccttcttgcacgctacgccagccacctgctggaaaagaacaaaacattggatgcaatagagctgtaccgaaaagcaaactacttttttgatgccgccaaacttatgttcaagatcgccgatgaggaggccaaaaagggctcgaagccgctaagggtaaaaaagctttacgtgttgtctgccctcctcatagaacagtatcatgaacagatgaagaacgctcaacgaggcaaagtgaagggcaaatctagcgaagccacaagcgcacttgctggactacttgaggaagaggtcttgtccacgaccgacaggtttaccgataacgcctggagaggcgcggaggcatatcattttttcatcctcgcccaaagacagctgtacgaaggttgtgttgacactgcactgaagactgcactgcacttgaaggactacgaggacataattccgcccgttgaaatctacagcctccttgcattgtgcgcttgcgcttctcgggcattcggcacttgcagcaaggctttcattaagcttaagtctctggagacactcagtagcgagcaaaaacagcaatacgaggatcttgccttggagatctttacaaagcataccagcaaggacaatcggaagcccgagctggatagtctgatggaaggaggtgaaggcaagctgcccacatgtgtagccactggttcccctattacagagtaccagttttggatgtgcagcgtgtgcaagcatggggtcctggcccaggagatctcccactattccttttgtcccttgtgtcactcccccgtgggatag

SEQ ID NO: 211411 - DNA, 3546 bp, synthetic construct
  misc_feature 1..3546: note = Description of Artificial Sequence: Synthetic coding sequence
  source 1..3546: mol_type = other DNA
atgttcttctacctgagcaagaagatcagcatccccaacaacgtgaaacttcagtgcgtctcttggaacaaggagcaaggtttcatagcctgcggcggcgaagacggtttgctgaaagtcctcaaactggagactcagacagatgatgcaaagctcagaggtctggctgcaccttcaaacctgagcatgaatcagaccttggagggacatagcggtagtgtccaggtagtcacttggaacgagcagtatcaaaagttgaccacctccgacgagaacgggttgattattgtgtggatgctgtacaagggaagctggatagaagagatgattaataacaggaacaagtctgtggtccggagtatgagttggaatgctgacggccagaagatctgcatcgtctacgaggacggggccgtaatagtgggaagtgtggatggtaatcgaatctgggggaaggatctgaagggaattcagctgtcgcacgtcacatggtccgccgactccaaggtgcttctctttgggatggctaatggagagattcacatctatgataatcagggaaactttatgataaaaatgaagctttcatgtctggtcaacgtgaccggagccataagcatcgcaggaatacactggtatcatggcaccgaggggtacgtcgagcccgattgtccttgcctggcagtgtgcttcgataacggaaggtgccagattatgcggcacgagaatgatcagaaccccgtcttaattgacactggtatgtacgtggttgggattcagtggaatcacatgggtagtgttcttgccgttgccggcttccaaaaggccgcgatgcaggacaaggacgtgaatatcgtgcagttctataccccgtttggagagcacctcggcacccttaaggtcccaggtaaagagatcagtgcactgtcttgggaagggggagggctgaagatcgcactcgccgttgattcatttatttactttgccaatatccgccctaattataaatggggctactgtagtaacacggtggtgtacgcgtacacccgcccggacaggcccgagtattgtgttgtgttctgggataccaaaaataacgaaaaatacgtaaaatatgtaaaggggctcattagcatcaccacatgtggcgatttttgcatcctcgctaccaaggctgacgaaaaccatcctcaggaagaaaatgaaatggaaacatttggagccacatttgtgctggtgctttgcaactctattggaacgccactcgaccccaaatacattgatatcgtccccctgttcgtcgccatgaccaagacccacgtgattgcggctagcaaagaggccttctacacgtggcaatatcgggtcgctaagaagttgaccgctttggagatcaaccagataactcgttccagaaaagagggaagggagcggatatatcatgtagacgacaccccatccggctccatggatggcgtactggattattccaaaactatccaaggaacacgagatcctatttgcgctattaccgcaagtgacaaaatcctaatagtcggccgtgaatcaggaacaattcaaaggtactcattgcccaatgtggggctcatccagaagtactcactgaactgtcgagcataccagctctccctgaactgtaactcaagcagacttgctataatcgatatctcaggtgtgcttaccttctttgacttagatgcaagagtgacggacagtacagggcagcaggttgtcggcgagctcctcaagctggagaggcgggatgtatgggatatgaaatgggccaaagataatcccgatttgttcgcaatgatggaaaagacaaggatgtacgtctttcggaacctggaccctgaggaaccgattcagacctccggctatatctgcaattttgaagatctcgaaataaagagcgtgcttctggatgaaatacttaaggatcctgaacatccgaataaggattaccttatcaacttcgagataaggtcgcttcgagactccagagcgctgattgaaaaagtgggcatcaaggacgcctcgcagtttatagaggataacccacacccgagactgtggagattactcgccgaagctgcactccaaaagcttgacctatataccgctgagcaggccttcgttcggtgcaaagattatcagggcattaaattcgtgaaacgcctgggaaaactgctgagcgagtccatgaagcaggcggaggttgtgggctactttggcagatttgaggaggccgagagaacctacctggaaatggataggagagacctggctattggcctgcgcctgaagctcggcgactggttccgcgtactgcaactgctgaaaaccggatccggcgacgccgacgattctctgctagaacaggcaaacaacgccatcggggactacttcgccgatagacagaaatggctgaacgcggtccagtattatgtgcaagggcgcaatcaggaaagactggctgaatgttactacatgctggaagattacgaaggcctcgaaaaccttgccatctctctgcctgaaaaccacaagctgttaccagaaatcgctcagatgtttgtgcgggtggggatgtgtgagcaggccgttaccgcctttctgaagtgttctcagcctaaggcagccgtcgatacctgcgttcacctgaaccagtggaacaaggcggtggagctggccaagaatcatagcatgaaagaaattggctctctgctggcccggtatgcgtcacacctgctggagaaaaacaagacactcgacgctatagagttataccggaaagctaattattttttcgacgccgccaaactcatgttcaagatcgcagacgaagaggctaagaagggctcaaagccactgagggtgaaaaagctgtacgtgcttagcgcgctgttaatcgagcagtaccacgagcagatgaagaacgcacagagagggaaagttaagggtaagtctagcgaagccacttctgcccttgcagggctgctggaagaggaggtcttaagcacgactgacaggtttacagataatgcctggcgcggcgcggaagcctaccattttttcattctcgcccagcgacaactgtacgaggggtgtgttgataccgctctcaagacagccttgcacctgaaggattacgaggatattattcctcctgttgaaatctattcactgctggccctgtgtgcttgcgctagccgggccttcggcacttgctcaaaagctttcataaaactcaaatcactagaaactctgagtagtgaacagaagcagcaatatgaggatcttgcgctggagatatttaccaaacacaccagcaaggacaacagaaaacctgagctggactctcttatggagggaggtgagggaaagctcccaacttgtgtcgccactgggtctcccattactgaatatcagttctggatgtgcagcgtgtgcaagcacggtgtacttgctcaggagatcagtcactatagcttttgcccgttatgtcactcacctgttgggtag

SEQ ID NO: 211412 - DNA, 1680 bp, synthetic construct
  misc_feature 1..1680: note = Description of Artificial Sequence: Synthetic coding sequence
  source 1..1680: mol_type = other DNA
atgaccaagacccacgtgatcgccgccagcaaggaggccttctacacatggcagtatcgtgttgctaaaaaactgacagcactggaaatcaaccagataactagatcgagaaaggagggcagggagagaatttaccacgtggatgacactccatccggatctatggacggggtgctggactattctaagacgatccaggggacacgcgaccccatttgtgccatcactgccagcgacaagatcctaatcgtgggtagagagtctggaaccattcagcgatactccttgccaaatgtgggcctgattcagaagtactcacttaattgtcgtgcatatcagctcagtttaaactgcaatagctctagacttgccatcattgacattagtggcgttctgaccttctttgacctggatgctagagtgactgactccacaggtcagcaggtggtgggtgaactgctgaagctggagcggagggacgtgtgggacatgaagtgggccaaagacaatccagacctgttcgcaatgatggaaaagacacgcatgtatgtgtttcgcaaccttgaccctgaggagccgatccagactagcggctacatctgtaatttcgaagatctggagatcaaatctgtgctgctagacgaaatcctgaaggatcccgaacatcctaacaaagattatcttattaacttcgagataaggtctctcagagattctcgcgcactaatcgaaaaggtgggtatcaaagatgcttctcagttcatcgaagacaatccgcatcccagactctggcggctgctcgccgaggccgccttacagaaacttgatctatataccgcggagcaggccttcgtcaggtgtaaggattaccaaggaataaagtttgtgaagcgactgggcaagttactgtctgaatctatgaaacaagctgaggtggtgggctactttggccggtttgaggaagccgaaagaacatatcttgagatggatcggcgggatttggccatcggactacgtttgaagctgggcgattggtttcgcgtgctccaactgttgaagaccggatctggagacgcagatgacagccttctcgagcaagcaaataacgccataggcgattattttgcagataggcagaaatggctcaacgccgttcagtactacgtgcagggccggaaccaggaacgtctcgctgagtgctattacatgctggaagactatgaaggcctcgagaatctcgccattagcctgccggagaatcacaagttacttccgatcgctgacgaggaagcaaagaaaggttcaaagcccctcagagtaaaaaagctttacgtgttgagcgccctcctgatcgagcaataccatgagcagatgaaaaacgcgcaaagggggaaagtgaagggcaaatcatcagaagctacctccgccttggctggcctgctagaggaggaggtgttgtcaaccaccgacaggttcacagataatgcatggagaggcgccgaggcatatcacttcttcatactggctcagcgccagctttatgaaggatgcgtagataccgctttgaagacagtggagaaggggaactgtcaacacgcccttccccaggaggctcagagtctttccattaattccgggtgtgcagtctacgccaacacagtatcactgctgcggaaatag

SEQ ID NO: 211413 - DNA, 2856 bp, synthetic construct
  misc_feature 1..2856: note = Description of Artificial Sequence: Synthetic coding sequence
  source 1..2856: mol_type = other DNA
atgtgctgcaccgagggcagcctgcggaagcgggacagccagcgggctccagaagccgttctgtgtttgcagttatggcagagaactgtccctcttgacactctgaagggcctgggcacttgcttcccctcaggcccagaattgcggggtgctgggatagccgcggcaatggaaagagccagcgaacgtcgaaccgccagtgctctctttgccgggttcagggcactgggcctcttcagcaatgacattccccacgttgtgcgctttagcgccctgaagagaagattttatgttacgacatgtgtgggcaagagttttcacacctacgacgtgcagaagctgagcctcgtggctgtctcaaactcggtgcctcaagacatctgctgtatggcggcagacggcagacttgtcttcgccgcttacggtaacgtatttagtgctttcgcccgaaataaggagattgtccacacgttcaaggggcataaggccgagattcactttctccagccttttggcgaccatataatcagtgtggataccgatgggattctcattatttggcatatttactcggaagaggaatacctgcaactgactttcgacaagagcgtgttcaagatctccgcaattctgcatccgtcaacttacctgaataaaattctgttaggttctgaacagggctctctgcagctgtggaacgtcaaaagtaataaactgttgtacacatttcccgggtggaaggtcggagtgacggccctgcagcaagctcccgcagtggacgtggttgccattggactgatgtcagggcaggtcattatccacaacattaaatttaacgaaaccttaatgaaattcagacaggactggggaccaatcacgtctattagcttccgcaccgatggccaccccgttatggctgccggaagcccctgtggacacatcggtctgtgggacttagaggacaaaaaactgatcaatcagatgaggaacgcgcattcaaccgccatcgcaggattaacatttctccacagagagccgctcctcgttacgaatggggctgacaacgctctcagaatctggatcttcgacggacccactggtgaggggcggctgttacgctttcgcatgggccactccgccccactcacgaacatccggtactacggccagaatggtcagcaaattctttccgcctctcaggacggaacactccagagcttcagtaccgtccatgaaaagtttaacaaaagtcttggacacggtctgataaataaaaaacgggtgaaacgtaaggggctgcagaacaccatgagtgtgcgcctaccgccaattactaagtttgcagccgaggaagcaagagagtcagattgggacggaatcattgcgtgccatcaaggtaagctatcctgctctacctggaattatcaaaaaagcacaattggagcctattttttgaagcccaaggagcttaagaaggacgacatcactgccaccgcagtcgatatcactagctgcggaaacttcgccgttataggactttcgtccggcaccgttgacgtgtacaatatgcagtctggcatccataggggcagcttcggaaaggatcaggcccataaagggagtgtacgcggagtggcagtggacggactcaatcagctgaccgtgactactggttctgaagggctgctgaagttctggaatttcaagaacaaaatcctcattcacagcgttagtctgtcaagcagcccaaacatcatgttgctgcaccgtgattcaggcatcctgggtctggctctggacgactttagtatcagcgtccttgacatcgagacaagaaaaatcgtcagagagttctctgggcatcagggtcaaatcaacgatatggctttcagccccgatggtagatggctcatctccgcagcgatggattgttccattaggacctgggatttgccaagcggttgccttatcgattgttttctgcttgattctgcacccctgaacgtgtcaatgtcccccacaggagatttcctcgccaccagtcacgttgaccatttggggatctacctctggtctaatatcagtttgtatagcgtggttagtttacgccccttgcctgcggattacgttccatcaatcgtgatgcttcccgggacatgtcagactcaggacgtcgaggtcagcgaggagacagtcgagccttctgatgagttaattgaatatgacagtccggagcagctcaacgaacaattggtgacgctctccctccttccggagtccaggtggaaaaatctgcttaacttggacgttattaaaaaaaagaacaaaccaaaggagccgcctaaggtaccaaaatccgccccgttcttcattcctaccattccaggcctcgtgccacgttatgccgcacctgagcagaacaacgacccacaacagtccaaggtcgtgaacctgggggtgctggctcagaagtcggacttctgcctgaagctggaggagggcctggtgaacaacaagtatgacacagccctgaatttactcaaggagtccggccctagtgggatagagacggagctccgatccttatcccccgactgcggcggaagcattgaagttatgcagtcatttctgaaaatgataggtatgatgttggatcggaagcgggactttgagctggcccaagcatatctagccctcttcctgaaactgcacctgaagatgttgccttccgagcctgtcttactggaggagattacaaatctgagctctcaggttgaagagaactggacgcacttacaatcgcttttcaatcaatctatgtgtatactgaactatctgaaatctgccctcttatag

SEQ ID NO: 211414 - DNA, 2856 bp, synthetic construct
  misc_feature 1..2856: note = Description of Artificial Sequence: Synthetic coding sequence
  source 1..2856: mol_type = other DNA
atgtgctgcaccgagggcagcctgcggaagcgggacagccagcgggcacccgaagccgtgctctgcctgcagttgtggcagcggaccgtgccacttgacaccttgaagggcctaggcacatgctttcccagcggtcctgaactcagaggtgccggcattgccgcagcaatggagcgcgctagcgaaagacggactgccagcgccctcttcgcgggttttagagcccttggacttttttctaacgatattcctcacgtggtgcgtttcagcgcactgaaaaggcgtttttatgtaaccacatgcgtgggcaagagcttccacacttatgatgtgcagaagttatcactcgttgctgtgagtaattctgtcccacaagatatatgctgcatggccgccgatggtcggctcgtgttcgccgcatacgggaacgtcttcagcgcctttgcccggaataaggaaatcgtccatacttttaaggggcataaggctgaaatccatttcctacagcctttcggcgaccacattatttcggtcgacaccgatggtatcttgataatctggcatatttacagcgaagaggaatacttacagctgactttcgataaatctgttttcaaaatctctgctatcctgcatccatccacatacctgaacaaaattctcctgggaagcgaacagggttccctccagctgtggaacgtcaagtcaaacaaactgctgtacacctttcctggctggaaggtgggcgttaccgcactgcagcaggcccccgccgttgacgtggtcgccattggactaatgtcggggcaagtgatcatacacaatatcaaattcaacgaaacgctgatgaaattccgtcaggactggggcccaataacgtcaatatctttccggaccgatggccacccggtcatggccgctggatccccctgtggccatatcggtctgtgggacttagaagataaaaaactcataaatcagatgcgcaatgcacactccacagcaattgcagggctaacatttctccaccgggaaccgcttctggttacaaatggcgcagataacgctctgaggatctggatctttgatggacccaccggcgagggccgccttttacggttccggatggggcatagcgcccctctgaccaatatccggtactatgggcagaatgggcagcaaattctgtctgccagtcaggacgggactttgcagagcttttctactgtacatgaaaagtttaataagtccctcggacacggactcatcaacaaaaagcgagtgaaaaggaaagggttgcagaacaccatgtcagtgcggctgccgcccatcacaaagttcgccgccgaagaggctcgggaatccgactgggatgggatcatcgcctgccatcaaggcaagctttcttgttcaacttggaactatcagaaaagcacaataggagcatatttcctgaagcccaaagaactgaaaaaggacgatattactgccactgctgtcgacattacgtcatgcggaaacttcgcagtcattggcctgtcgtcagggaccgtagacgtttacaacatgcaaagcgggattcatcgcgggagctttggaaaggaccaggcacataaaggatccgttcgcggtgtggccgtggacgggcttaaccagctgacagtcaccactggctccgagggtttgctgaaattctggaactttaaaaacaaaatcctcatacatagcgtcagcctgtcgtcatcacccaatatcatgctgctacaccgggactcagggattttgggcctcgctttggacgattttagcatttccgtgttggacatagagactaggaaaatcgtccgcgaattctcggggcaccagggacagattaatgatatggccttctctcctgacgggcgctggctcataagtgccgccatggactgcagcatccgaacatgggacctgcctagtggctgcctcattgattgttttcttctagattcggccccgttgaacgtgagcatgtcccctaccggcgattttctcgccaccagccacgtcgaccacctaggaatctacctgtggtccaatatttcactctacagtgtcgtatcgctaaggcccttaccagccgactacgtcccgagtatcgtcatgctgcctgggacgtgccaaacgcaagacgtggaggttagtgaagagacggtggaaccatcggacgaactgatagaatacgactctccggagcagctaaatgagcaactggtgacactgagcctgttacctgagtcccgatggaagaatcttctgaatcttgatgttattaaaaaaaagaacaagccaaaagagccccccaaggtcccaaagagtgcacccttctttatccctaccattcccggcctggtccctcgttacgccgcgcccgagcagaataatgatcctcagcaatccaaggtggtgaatttgggagtgctcgcacaaaaatcagatttttgtctaaagttagaggaagggctggtaaataataagtacgacacggccttaaatctgctgaaggagagcggtccaagcggcatcgagactgagcttcgttcactttccccagactgcgggggcagtattgaagttatgcagtcattcctgaaaatgattggaatgatgctggataggaagcgcgatttcgagctcgcgcaagcgtacttagccttgttcctgaagcttcacctgaagatgctgcctagtgagcccgtgctccttgaagagatcacgaatctgtccagccaggtagaggagaactggactcacctccaatccctgttcaatcagagtatgtgcattctaaattacctcaaatccgccctgctctag

SEQ ID NO: 211415 - DNA, 1239 bp, synthetic construct
  misc_feature 1..1239: note = Description of Artificial Sequence: Synthetic coding sequence
  source 1..1239: mol_type = other DNA
atggccggcagcgtgggcctggccctgtgcggccagaccctggtggtccgcggtggttcaaggtttttggcgacctctatagcaagctcagatgacgacagcctgttcatttacgattgcagcgcggccgagaagaagtctcaggagaacaagggagaagacgcacctcttgaccaaggcagcggagcaatcctcgcgagtactttcagcaaaagcgggtcctacttcgctcttaccgacgacagcaagcggctaattcttttccggaccaagccgtggcagtgtctctccgtgcggacagttgctcgacgttgcacagccctcacctttatcgcctcagaggagaaggtgttggttgctgataaaagcggcgatgtctacagcttcagtgtcctggaaccccacggctgtggtcgtttagaattaggacatctgtcaatgctgctcgacgtggcagtgagccctgacgatcggttcatactgactgcagatcgcgacgaaaagattagggtgtcctgggccgcggctcctcactctatcgagagcttctgcctgggccacacagaatttgtatccagaatctctgtggtccctacccagcccggactcctactttcctcttctggcgacggcactttacggctgtgggagtacaggagcggccggcaacttcactgctgccatttggcctccttgcaggaactggtggacccccaggcgccacagaaattcgctgcctccagaatagccttctggtgccaggagaactgcgtagccctgttatgcgacgggactccggtcgtttacatattccagctcgatgctcggcgacagcagctggtatacagacagcaattggcattccagcatcaggtgtgggacgtggcctttgaagaaactcaagggctttgggtgttgcaagattgccaagaagccccacttgtgctgtataggcccgtcggcgatcaatggcagagtgtgcccgagagtacggtgctgaagaaggtgtccggagtgctgcgggggaattgggcgatgttggaaggcagtgctggcgccgacgcgagcttttcctctctgtataaggctacctttgacaacgtgacatcttatctgaaaaagaaagaggagaggctccagcaacagcttgaaaaaaagcagcgtaggaggagccccccgcccggacctgatggccacgcaaagaaaatgcggccaggggaggctacactgtcctgttag

SEQ ID NO: 211416 - DNA, 1239 bp, synthetic construct
  misc_feature 1..1239: note = Description of Artificial Sequence: Synthetic coding sequence
  source 1..1239: mol_type = other DNA
atggccggcagcgtgggcctggccctgtgcggccagaccctggtggtgcgggggggctctaggtttctggccacatcaatcgcgtcctccgatgatgacagcctatttatttacgattgctctgcagcagaaaaaaaaagccaggagaacaaaggtgaagacgcccctcttgatcaagggtccggagccatcctagctagtacttttagtaagagtggtagctactttgccctgaccgacgacagcaaaaggttaatcctgttccgcactaaaccctggcaatgtttgtcagtgcgcaccgttgcaaggcggtgcactgcactgacctttatagcctcagaagaaaaagtcctcgtggcagataagagcggcgacgtctatagtttttccgtcttggagccgcatggttgtggcagactcgaactcggtcatctgtctatgttactagacgtagcggtcagtccggacgataggttcattctgaccgccgatagggacgagaaaattagagtgtcatgggccgctgccccacactcaatcgaatccttctgtctgggccatactgagttcgtgtcccgaatttctgtggtgcccacccagccgggtttattgttgtcgagctccggcgacggcactctgaggttatgggaatatcgctcaggacgccaactgcattgctgtcatctcgccagtctccaggaactggttgacccacaggctccacagaaattcgccgcatctcgcatagccttttggtgccaggagaactgcgtggccttgctgtgtgacgggactcccgtggtgtatatttttcagctggacgcccgcagacagcagcttgtgtataggcagcagcttgctttccagcatcaggtgtgggacgtcgccttcgaagaaacacaggggttatgggttctacaggattgtcaggaagctcctcttgttctttacagacctgtgggcgatcaatggcagagtgtcccagagtctacagtgctgaaaaaggtttctggcgtccttaggggtaactgggccatgctggaaggtagtgcaggggccgacgccagcttctcctccctgtacaaggctacgtttgacaatgtcactagctatctcaaaaagaaagaggaacgcttgcagcaacagctggagaaaaaacagcggaggagatcacccccccctgggccggacggtcacgcaaagaaaatgaggcctggggaagccactttgtcatgctag

SEQ ID NO: 211417 - DNA, 2034 bp, synthetic construct
  misc_feature 1..2034: note = Description of Artificial Sequence: Synthetic coding sequence
  source 1..2034: mol_type = other DNA
atggccgcccaccaccggcagaacaccgccggccggcggaaggtgcaggttagctatgtcatcagggatgaggtagagaagtacaatcggaacggggtcaacgcgctccagttagatccagccctgaaccggctgtttacggctggccgggatagcataataagaatctggtctgtgaatcagcacaagcaagatccatatatcgcctctatggagcatcacacggactgggtaaatgacatagttctctgttgtaatgggaaaacactgatcagtgccagctcagatactacagtaaaagtatggaacgcccacaaaggattctgtatgtctactctgcgaacccacaaggattacgtgaaagcactggcatatgctaaggacaaagagctggttgcaagcgctggtctcgacaggcagatcttcctgtgggatgtaaacaccctgacagcactcaccgcatccaataataccgtgactacttcatcactgagcggcaacaaagactcaatttactctctagcaatgaatcaactgggcaccatcatagtatctgggtcgacggagaaagtgttacgggtctgggatcctcggacttgtgcaaagctgatgaagctaaaaggccacacagataacgtgaaggcattgcttctcaatcgggacggcacccaatgtttaagtgggagtagcgatggcacaattcgcctttggagcctgggacaacaaagatgcattgcaacatatcgcgttcatgatgagggagtgtgggccctccaagtcaacgacgctttcacccatgtgtattctggtgggagggatcggaagatttattgtactgacctgcgcaaccctgacattagagtactaatctgtgaagaaaaggcccccgttctgaaaatggaactggatcggtccgccgacccaccgccagccatctgggttgctacaactaaaagtactgtgaacaagtggaccctgaaaggaatccacaactttcgtgcatccggcgattacgacaatgactgtacgaatcccattacaccactctgcacccaaccagatcaggttattaagggtggagcgagcattatacagtgccatatcctcaacgataaaagacacatccttactaaagataccaacaacaatgtcgcatactgggacgtgttgaaagcatgcaaagtggaggacctggggaaggtagactttgaggacgagattaagaaaaggttcaaaatggtgtatgtgcccaactggttctcagtggacctgaaaacaggaatgctgaccatcaccctggatgagtctgactgtttcgcagcctgggtcagcgcgaaggacgctggtttctcctcccctgacggaagtgatccaaagctgaatctgggaggactgttattacaggcgcttcttgagtattggcccaggacgcacgtaaatcccatggacgaagaagagaatgaagtgaaccacgttaatggcgaacaggagaacagagttcaaaagggaaacgggtatttccaggtgcctccacacacgccggtcatatttggagaggctgggggccgcaccctcttcaggttgctgtgtcgagactccggaggagagacggagagcatgctgctgaacgaaacagttccccagtgggtgattgacataacagttgacaaaaatatgccaaagttcaacaaaatccccttttacctgcagccccacgccagctcaggtgcgaaaaccttaaaaaaggacagactttctgcctctgacatgctccaggtcaggaaagtcatggagcacgtctatgagaaaatcatcaatctggataatgagtctcagactacatctagtagcaataacgagaagccaggtgagcaggaaaaggaagaggacatcgccgtcctcgctgaagaaaagattgagctcctctgccaggaccaagtgctggatcctaacatggacctcaggaccgtgaagcatttcatctggaagtctggcggagatctcactctacattaccgtcaaaagtccacctag

SEQ ID NO: 211418 - DNA, 1788 bp, synthetic construct
  misc_feature 1..1788: note = Description of Artificial Sequence: Synthetic coding sequence
  source 1..1788: mol_type = other DNA
atggagtgccagagcgcccaggtgatcagcgccagcagcgacaccaccgtcaaagtgtggaatgcgcacaagggcttttgcatgtccaccctcaggactcataaagattacgtgaaggccttggcttatgcaaaagataaagaacttgtggcctccgccggactggataggcagatcttcctgtgggacgttaatactctgacggctctcactgcatccaacaatacagttactacgtctagcctctctggaaataaggactctatctactctttggctatgaatcagctgggcaccataatcgtttcagggtctaccgagaaggtgctcagggtgtgggatccgcgtacctgcgccaagcttatgaagctgaagggccatacagacaatgttaaagccttgctgctgaaccgcgacggaactcaatgcctatccgggtcctccgatggaactatcagactatggagcctgggccaacaacggtgtatcgcaacatatcgtgtccacgacgaaggagtgtgggctcttcaagtcaatgatgccttcactcatgtgtatagcggaggacgtgatagaaagatctactgtacagatctgcgcaatccagacatcagagtgctgatatgtgaggagaaggcacccgtgctgaaaatggagcttgaccggtcagccgatcctccgccggctatttgggtggctacaactaagtcgacagttaataaatggaccttgaagggcattcacaacttcagggccagtggcgactatgacaatgactgtaccaacccaataacaccgctctgtacacagccggaccaggtgatcaagggtggcgcttcaatcattcaatgccacattctgaatgataagagacacatcctgaccaaagataccaacaataacgtggcatactgggacgtgctgaaagcctgcaaagtggaggatttgggcaaggtggacttcgaagacgagattaaaaagcggttcaagatggtatacgtccccaattggttcagtgtggacctcaaaactgggatgctcactattaccctcgatgagagcgattgttttgcagcttgggtatcggctaaagatgctggcttctcatcaccagatggaagtgaccctaaactgaacctgggtggcctgctgttgcaggcacttctggagtactggccccgaacacacgtcaacccgatggacgaagaagaaaacgaggtcaatcatgtcaacggagagcaagaaaacagagtccaaaagggcaacggctatttccaggtgcctccacatacgcctgtcatctttggggaagcaggcggccggactctgtttcggctgctttgtagagattctggaggcgaaaccgagtcaatgctcctcaatgagaccgtgccccagtgggtcatcgatatcactgtggataaaaatatgcctaagtttaacaaaattccgttctacctgcagcctcatgcatcaagcggcgctaaaacactgaagaaagaccggctcagtgccagtgatatgctgcaagttcggaaggtcatggaacacgtctatgaaaaaatcattaacctcgataacgagagtcagaccacttcatcctcaaacaacgaaaaacctggagagcaagagaaagaggaagacatcgctgtcctggctgaagaaaagattgaattactctgccaggatcaggtcctggacccgaatatggatttgcgtactgtcaaacattttatctggaagtccgggggagatctgacccttcactaccgccagaagtccacttag

SEQ ID NO: 211419 - DNA, 366 bp, synthetic construct
  misc_feature 1..366: note = Description of Artificial Sequence: Synthetic coding sequence
  source 1..366: mol_type = other DNA
atgcccaagttcaacaagatccccttctacctgcagccccacgccagctctggcgcgaaaaccctcaaaaaggatcgcctctcggcttcagacatgctgcaggtgcgcaaagtgatggagcatgtatacgaaaaaatcattaacctggacaatgagtcacagacgacctcctcctctaataacgagaagcccggggagcaggaaaaggaggaagacatcgccgtgctagccgaagagaagatcgaactgctatgtcaggaccaagtccgggtcctcgatcctaatatggacttgaggaccgtcaagcatttcatctggaaatcagggggcgatctcacgctgcattatcgacaaaaatccacatag

SEQ ID NO: 211420 - DNA, 1209 bp, synthetic construct
  misc_feature 1..1209: note = Description of Artificial Sequence: Synthetic coding sequence
  source 1..1209: mol_type = other DNA
atggccgcccaccaccggcagaacaccgccggccggcggaaggtgcagtgcctgtccggcagtagtgacgggaccataagactttggagcctgggtcagcaacgctgtatcgctacatatcgtgtgcatgatgaaggggtgtgggccctgcaggtgaatgacgcttttacacatgtgtattcagggggtcgggatagaaagatttattgcaccgatctgcgcaatcccgatatccgagtgctcatttgcgaggaaaaggctcccgttcttaaaatggagctggaccggagcgctgacccacctcctgcgatctgggtggccacaaccaaatccactgttaacaagtgggcctgtaaggtggaggatcttggcaaggtggactttgaggacgaaatcaagaagcgcttcaagatggtatacgttcccaactggttcagcgtggatctgaaaacaggtatgctcacaatcactctcgacgagtcagactgctttgccgcgtgggtgtccgctaaggacgccggcttctcgtcacccgacggatctgatccaaagcttaacctgggcggcttgttgctgcaagccctcctggaatattggccccgaacacatgtgaaccctatggacgaggaagagaacgaagtgaaccacgtgaatggagaacaggagaaccgggttcaaaagggcaacgggtattttcaggtgcctcctcatacaccggttatctttggcgaagcaggcggacgtactctctttcgcctcctatgtcgagatagtggcggtgagaccgaaagcatgcttctgaacgaaacagtgccccagtgggtgatagatatcacggtcgataaaaatatgccaaagttcaataaaatcccattttatctgcaacctcacgcatcatctggagcaaagacgcttaagaaagatcgcctttctgcttcagacatgcttcaggtaaggaaggtcatggaacacgtgtatgagaaaatcattaacctagacaacgagtcccagacgaccagtagcagtaataacgaaaaaccaggagagcaggagaaggaggaggacatcgcggtactcgccgaagagaaaattgagctgctctgtcaggaccaggtgttagaccctaatatggacttgagaacagtgaagcactttatctggaaatccggtggagatctcacattgcactatcgtcaaaaatccacctag

SEQ ID NO: 211421 - DNA, 651 bp, synthetic construct
  misc_feature 1..651: note = Description of Artificial Sequence: Synthetic coding sequence
  source 1..651: mol_type = other DNA
atggacgccctggaggactacgtgtggccccgggccaccagcgagctcatcctgctcccagtaactgggctcgagtgcgtcggggacaggcttctggccggagaggggccagacgtcctcgtgtactcccttgattttgggggccacctgcggatgataaagcgggtccagaacctcctcggacactacttgatccacgggttccgggtgcgtcccgaaccgaatggcgatctcgacctggaggcaatggtggctgtctttggcagcaaaggtctacgtgtcgtgaaaatctcgtggggccagggccacttttgggaactatggcgaagtgggctgtggaatatgagtgactggatctgggatgcaagatggctggagggaaacattgccctcgccctcggccacaactcggttgtgctgtatgatccggtggtgggatgcatcctccaggaggtaccatgcaccgatcggtgtactttgtcgagcgcttgtctaattggagacgcgtggaaagaacttacaatcgtcgctggggcagtgagcaatcagctgctggtatggtaccctgctacagctttcactttgtatttgtcggcaaggcccacccctttttgctgtgtgctcacccccaggatgtgtaccaggctgtag

SEQ ID NO: 211422 - DNA, 3456 bp, synthetic construct
  misc_feature 1..3456: note = Description of Artificial Sequence: Synthetic coding sequence
  source 1..3456: mol_type = other DNA
atgggcagcgccgcccggtgggagggcagcttcagccgggagttctcttctctccttagccgagggtgtctgtcaacgagcagaatcgatatggacgcattggaggattacgtctggcctcgcgcgacaagtgaactgatattacttcccgtgacaggcctggaatgcgtgggtgaccgactcctggccggggaaggtccggatgtgctggtgtactcactcgactttggagggcacctgcgtatgatcaagagggtacaaaacctcctggggcattatctgattcatgggttcagggtcaggcctgagcctaacggggatctggaccttgaagccatggtggccgtgttcggctctaaaggccttcgcgttgtcaaaatctcttggggccagggacacttctgggaactgtggcgatcaggtctctggaatatgtcagactggatttgggacgccagatggctagaggggaacattgccctcgcccttggacacaacagcgtagtcctgtacgacccagtggtgggctgtattctccaagaggttccatgtactgaccggtgtaccttatctagtgcatgcctgattggggacgcttggaaggaactaacaatcgtggccggcgcagtgtcaaaccagctattggtgtggtacccagccaccgccttggccgacaataagccagtggcaccagatagacggatcagtgggcatgtgggcataattttttccatgtcttacctagaatccaaagggttgctcgcgaccgcctccgaagacaggagtgttcggatttggaaagttggtgatctgagggtgcccggcgggagggttcaaaatattggacattgtttcggtcactcggcccgggtgtggcaagttaagctgttggaaaattacctgatcagcgcaggtgaggactgcgtgtgcctggtgtggagccacgagggggaaatcctccaagcttttcgaggtcaccaaggccgcgggatcagggccattgctgcccatgaaagacaggcctgggtgattacagggggcgatgacagcggaatcaggctgtggcaccttgtagggaggggttatagagggcttggagtcagcgccttgtgctttaaaagcagatcacgccctggaactctgaaggcagtcaccttggccggcagctggcgattactggccgttaccgatacaggggccttatacttatacgacgtcgaggtgaaatgctgggaacagctgctcgaggacaagcattttcagtcctattgtctgttggaagccgcgcccggccccgagggattcggattgtgtgcaatggcaaacggggagggcagggtgaaggtcgtccctattaatacgccaactgccgcagttgaccagaccttgttcccgggaaaagtccactcccttagttgggcgctgcgaggatacgaagaacttcttttattggcctcaggaccgggcggggttgtggcatgcctggaaatttctgcagctccttctggaaaggcgatctttgtgaaggagcgctgcaggtacctgctgcccccaagcaagcagcgctggcacacctgcagtgcgttcctgcccccaggggacttcctggtatgcggcgatcgaagagggtccgtcctcctgttcccctcccggcccggactgctcaaagatcctggtgtgggcgggaaggctcgagccggggccggcgcaccagtagtgggctctggctcctctggaggtggaaatgccttcacgggcctaggaccagttagcactctcccctccctccatggaaagcagggtgtgacaagcgtaacttgtcacggtggatacgtttacactacaggtagggatggagcatattaccagctgttcgttagggatggacagttgcaacctgtacttcggcagaagagctgtcgtggaatgaactggctggcgggtctccgaatcgtccccgacggaagcatggtcattcttggatttcatgctaacgagttcgtggtctggaaccctaggtcccatgagaagctccatatcgtaaattgcgggggaggccatagatcttgggcattttcagacaccgaagctgcgatggcctttgcctacctgaaagacggagatgtaatgctctatagggcactgggagggtgtacaaggccccacgtaattctgcgggaaggtctacatggccgagagatcacatgtgttaagcgagtcgggactattaccttgggaccagaatatggagtgccgagttttatgcaaccagatgacctggaacccggcagcgagggaccagatcttacagacatcgtgataacctgcagcgaggacaccaccgtctgcgtacttgcccttcccacaaccacgggatcagctcacgcgctaactgcagtctgtaaccacatctcctccgtgcgcgcggtggccgtgtggggaatcggcactcctggtgggccgcaggatccacaaccaggcctgacagcgcacgttgtgagcgctggcggccgcgccgagatgcattgtttctccattatggttactcctgacccttccacccctagcaggctggcttgtcatgtgatgcatctctcctctcataggttggacgaatattgggaccgtcagagaaaccgccacagaatggtaaaagtagatcctgagactcgatacatgtccctcgccgtgtgcgagttggaccagcctggcttgggaccactagtggcagctgcgtgctcggatggtgccgtccggctgtttctgttgcaggactcagggcgcatcctgcagctgctcgctgaaacctttcatcacaaacggtgcgtgctgaaagtgcattcatttacacacgaggcacccaatcagaggcggagacttctgctttgttctgcagcaactgatgggtcattggcattctgggatttaacaactatgttagaccacgacagtaccgtactagaaccacctgtcgacccaggcctgccatataggcttgggacgccgagcttgacactgcaagcgcattcctgcgggattaactcccttcatactctccctacgcgggaaggacaccacctggtcgcttcagggtccgaggacggctcactgcatgtctttgtgctggccgtcgaaatgctgcagttggaggaggccgtcggtgaggctggtctggtgccgcaactgcgggtattagaagagtacagtgtgccgtgcgcacatgctgctcacgtgaccggactcaagattctctcgcccagcatcatggtgtccgcctcgatcgaccagcggctgaccttctggagactggggcacggcgagcctacttttatgaacagcaccgtgtttcacgtcccagatgtcgcagatatggactgctggcccgttagcccagagtttggacacaggtgtgccctgggtgggcaggggcttgaggtgtataattggtacgactag

SEQ ID NO: 211423 - DNA, 3213 bp, synthetic construct
  misc_feature 1..3213: note = Description of Artificial Sequence: Synthetic coding sequence
  source 1..3213: mol_type = other DNA
atgatcaagcgggtgcagaacctgctgggccactacctgatccacgggtttcgagttcgaccggaacctaacggcgatttggacctggaagcgatggtggcggtattcgggtccaaaggcctgagggttgtgaagatatcatggggtcagggccacttttgggaactgtggcggtccggactctggaacatgagcgactggatatgggacgccaggtggctggaggggaacatcgcactcgcactcggacataattcagtcgtgctgtatgacccagtggtcgggtgcatattacaagaagtgccatgtaccgaccgttgtacactgagttctgcctgtctcattggtgatgcttggaaggagctcacaatcgtagccggcgcggtctcaaatcaacttctggtctggtatccggccaccgccctcgccgataataagccagttgctcccgaccgcaggatcagcggtcatgtaggcataattttcagcatgagctacctggagtctaagggtctcctagccactgcctcagaagatagaagcgtgaggatctggaaagtcggcgacctgcgtgttccaggcggtagggtgcagaacatcgggcactgtttcggacactctgctcgggtgtggcaagtgaagctgctggaaaattacttgatcagtgcaggggaggactgcgtttgtttggtgtggtcccacgagggggaaatcctgcaagccttcagaggccaccaggggcgggggatccgagcgatcgcagcccatgaaagacaggcgtgggttattaccggtggtgatgactcaggaatccgcctgtggcatctagtcggcaggggatatagaggactgggtgtgagcgccctgtgctttaagtcacgatcaaggcccggaaccttaaaggccgtcactcttgcagggtcatggaggttgttagccgtcaccgacacaggtgctctgtacttatacgacgtggaggtcaagtgttgggaacagcttctcgaagacaagcactttcagtcatactgcttgttggaggcggcaccgggtcccgagggcttcggcctgtgtgccatggcgaacggagagggtcgggtcaaagttgtacctatcaacacgcccacagccgctgtcgatcaaaccctgttcccaggaaaggtacactctctgagctgggccctcaggggctatgaggaattgctgttactggcttcaggcccaggcggagttgtcgcctgtctggagatttcagctgcccccagcggaaaagctatatttgtcaaagaaaggtgtcgctaccttcttccacctagtaagcagaggtggcacacttgtagcgcatttttgcctccaggcgacttcctggtgtgtggcgatagaaggggcagcgtgctgctctttcccagccgacctgggctccttaaggaccctggggtgggtggaaaagcgcgggccggagcaggggcccctgtagtcggctccggatcttccggtggtggcaatgcgtttaccggcctgggtccagtgtccactttaccatccctgcacggaaagcaaggtgtgacaagcgtcacttgccacgggggctatgtctataccacaggacgggacggcgcgtattaccagttatttgtgagggacgggcagctgcagccagtcctgcgacagaaatcctgtcggggcatgaactggcttgccggtttacggattgtcccagacggatctatggtgatcttgggcttccatgccaacgagtttgttgtgtggaacccaagaagccacgagaagctgcacattgttaactgcggcggtggccaccgttcttgggccttctctgataccgaagccgccatggccttcgcttatttaaaagatggcgacgtgatgctctaccgggcccttggagggtgcacgcgaccacacgtcatactacgcgaaggtcttcacggcagggagattacgtgcgtgaagcgggtgggcacaatcacactagggccagaatacggggttccatccttcatgcagccggacgacctagaacccgggtccgaagggccagatctcacggatatcgttatcacctgctcggaggacaccaccgtgtgcgtgctggcgcttcctactactacggggtccgcacacgctctcacagccgtgtgtaatcacatcagctccgtacgtgcggtcgcagtgtgggggataggaactccgggcgggccacaggatccacagcctgggctcaccgcacacgtagtgtccgctggagggagagcggagatgcactgtttttcgatcatggtgacaccagatccttctacaccttcaagactggcttgtcacgtgatgcacttgtcctcacatcgccttgatgaatactgggatcgtcagcgcaaccgccacaggatggtcaaggtagatccggagacccggtacatgagcctggcggtctgcgaacttgatcagcccggcctcggaccactcgtcgcagctgcctgctccgacggtgccgtgaggctatttcttctgcaagactcaggtcgaattctccagctgctcgcagaaaccttccaccacaagaggtgcgtgcttaaagtacactcattcacgcacgaggccccaaatcagaggagacgtcttctcctctgttcagcggcaactgacggtagtctggctttttgggatttgacaactatgctggaccacgacagtaccgtgctcgaaccaccggtcgaccccggacttccttacaggctcgggacccccagtttgaccctgcaggcacactcctgcgggataaactctctccatactcttcccaccagagagggccatcatctggtggctagcgggtccgaagatggcagcctgcatgtgttcgtgctggctgtggagatgttgcagctggaagaggcagtaggggaagcaggcctcgtgccgcagctcagagttctggaggaatatagtgtgccgtgcgctcacgctgcccacgtgaccggcctcaaaatacttagtccatctataatggttagtgccagtatcgatcagcgcctgactttctggaggttgggccacggtgaacccacatttatgaactctaccgtgttccatgtgcctgatgttgctgacatggattgctggcccgttagccctgagtttgggcatcggtgcgctttggggggacaaggtcttgaggtgtacaactggtatgattag

SEQ ID NO: 211424 - DNA, 4557 bp, synthetic construct
  misc_feature 1..4557: note = Description of Artificial Sequence: Synthetic coding sequence
  source 1..4557: mol_type = other DNA
atggccgccgtgggcagcggcggctacgcccggaacgacgccggcgagaaactcccttcggtgatggccggcgttccagcccgtaggggacagagttccccaccaccagcccctccaatttgcctgcgtaggcgtacccgactgtcaactgcaagtgaggagactgtgcagaatagggtgtccctagagaaagtcctgggcattaccgcccaaaacagctcaggtctaacatgcgaccccggaaccggccatgtggcatacctagccgggtgtgtcgtggtgatactggaccctaaagaaaacaaacagcagcacattttcaacaccgcacgaaagtccttgagtgctttagctttttcacctgacgggaaatacatcgtgactggtgagaacgggcaccggccggcggtccgcatttgggatgtggaggagaagaaccaagtggcagagatgctgggtcacaaatatggcgttgcttgcgtggcattctcgccaaacatgaaacacatcgttagcatgggatatcagcacgacatggtgctcaacgtttgggactggaagaaggacattgtggtggcatcaaacaaggtgtcctgccgcgtgatagccctctcattttctgaggactccagttacttcgtaaccgtgggaaatcgacacgtccgattttggttcctcgaggtgtcgacggagacaaaggttaccagcaccgtgcccctagtcgggcggtctggaatacttggcgaactccacaataacatattttgtggcgtggcttgcggcagggggcgaatggcaggatcaaccttctgtgttagttattctggactgctttgccagtttaatgagaagcgagtgcttgaaaaatggattaatctaaaagtgagcctgtcctcttgcctgtgtgtcagccaggaactcatcttttgtggctgcacagatggaatagtccgaatatttcaggcacactctctccactacctggcaaatttgcccaagcctcactacttgggagtcgatgtagctcagggtttagagccaagtttcctcttccacaggaaggccgaagccgtgtaccccgatactgtcgctctaactttcgacccaattcaccagtggctgtcttgtgtgtacaaggatcactctatctatatctgggacgtgaaggatattaacagggtgggcaaggtgtggtctgagctctttcactctagttatgtgtggaacgtcgaggtctaccctgaatttgaggaccagcgcgcttgtctaccaagtggatcttttttaacctgtagctcagataacacaattaggttttggaacctcgactcttccccagatagccattggcaaaagaacatattctcaaatacactgctgaaagtcgtttacgtagagaatgatatacagcatcttcaggatatgagccattttccagatagaggaagcgagaacgggacaccgatggatgttaaggccggggtccgggtgatgcaagtttccccagatggacagcatctcgcttctggcgaccgcagcgggaacctcagaattcatgagctgcatttcatggacgagttggtaaaggtagaagcccatgatgcagaagtcctgtgtctagaatactctaaaccagagacaggtctcactttgttggcctctgcctcccgagacagactgattcatgtgctgaacgtggaaaaaaactataacctagaacaaactctggacgaccattcctcctccatcaccgctatcaagttcgcaggtaatagagatatccagatgatctcttgcggtgccgataagagcatctatttccggtctgctcagcagggatctgacggcctgcactttgtgcgtactcatcatgtggccgagaaaacaactctgtatgacatggatatcgatatcactcaaaagtacgttgccgtcgcttgtcaggacaggaatgtgcgcgtttacaacacagtgaacgggaaacaaaaaaaatgctataagggctcgcagggcgacgaaggaagtcttttaaaagtgcacgtggacccctctggcacatttctcgctacgagttgctctgacaagtccatcagcgtgattgatttttatagtggagagtgtatcgccaagatgtttggccactctgaaatcatcactagcatgaaattcacatacgactgtcatcacctaattacagtctcgggcgatagctgcgtgttcatctggcatctgggtcctgaaatcacaaactgtatgaaacagcacctgcttgagatcgaccatcgacagcagcaacagcatactaacgacaagaaacgcagtggccaccctcgccaggacacctatgtgtctaccccctcggagatccactctctttctcccggtgaacaaacagaggatgaccttgaagaagagtgtgaacccgaggaaatgctgaaaaccccatcaaaggattccctcgaccctgatccacggtgccttctcaccaacggaaaattgccgctctgggcaaagcgacttctgggggatgacgacgtcgctgatggactagcctttcacgctaaaaggtcatatcagcctcatggtagatgggctgagagagctggccaggagcccctgaaaacaattctcgatgcccaagacctcgactgctattttacaccaatgaagcccgaatcacttgaaaacagtatactggattccctggagccgcagagccttgcttccctgctttcagaaagcgaaagccctcaagaggcgggccggggccacccctcttttctgccccagcaaaaggagagttcggaagctagcgagctgatcctctatagtctggaagctgaagtgacggtaactgggaccgacagccagtactgccgcaaagaagtcgaggctggcccgggtgatcagcaaggcgacagttatcttcgagtgtcctctgattcccctaaggatcagtcccccccggaagactctggcgaaagtgaagccgatcttgagtgtagcttcgcagcaatccactcaccagcaccaccccccgatccggcccccaggttcgcaacaagcttaccacacttccccggctgtgccggccctacagaagacgaactcagcttgcccgagggaccatctgttccaagctcaagtctgcctcagacacctgaacaagaaaagtttctccggcatcattttgagacattgacggagtcgccgtgtagggccctaggcgacgtggaagctagtgaagcagaggatcatttcttcaatccacgcctttcaatatccacccaattcctttcctctctgcagaaagcttcccgcttcacccatacctttccaccccgcgcaactcagtgtctggtaaaatcgcccgaggtgaaacttatggataggggcgggtcccagcccagggccggtacaggatatgcttctccggataggacacacgtcctggccgctggcaaggctgaggaaacattggaggcatggagaccacccccgccatgcctcaccagcttggcctcttgtgtgcccgcatctagcgtgctgccaacagatcgtaacttgccaacccctacaagcgcgcccacccccggtctggcccagggagtccatgccccctctacctgctcttacatggaggccaccgcatcttcgcgcgctaggatttcgcggagcatctctctcggcgacagcgaaggacccatcgtggccacattagcccagccccttcgacgacctagctctgtcggggaattagcctccctgggccaggagttgcaggctattacgacagccacaacacccagtcttgacagcgaaggccaagaaccggctttaagatcttggggcaatcacgaggcaagagccaatttaaggctcactctgtcatctgcgtgtgatgggctccttcagccaccagtggacactcaaccaggcgtaacagtgccagccgtgtcctttcctgctccatccccagtggaagaaagtgcccttagattgcatggatccgcgtttagaccgtctctacccgctcccgaaagccccgggctgcctgcccaccctagtaatccgcagctgccggaggcacgtccaggtatccctggaggaaccgcatccctgctggagcccacatcgggcgctctgggcctactccagggctcacctgccaggtggtcggagccctgggtgccggtggaagccttgcctcccagccctctggaactgagccgggtgggaaatattctacaccgcttgcagacgacgtttcaggaggcacttgacctttatcgggtgctggtgtccagtggtcaagtcgacactggacagcagcaggctcggactgaactcgtgtcaacctttctgtggatccacagccagctcgaggctgaatgcctggttggcacctctgtggcaccagcacaggcactgccctctcccggcccccctagcccacctaccttatacccactcgcttctccggaccttcaggctttgttagagcactactcagagctgctggtgcaagccgttagacgcaaagccaggggccactag

SEQ ID NO: 211425 - DNA, 1245 bp, synthetic construct
  misc_feature 1..1245: note = Description of Artificial Sequence: Synthetic coding sequence
  source 1..1245: mol_type = other DNA
atggccgccgtgggcagcggcggctacgcccggaacgacgccggcgagaaactgcccagcgtgatggccggtgtgccggcccggcggggacagtcttctcctcccccagcacctcccatctgtctcagacgtcgaacgagactgtccactgcttcggaggaaaccgtgcagaatagagtgtcgcttgagaaagtcttggggattaccgcccagaattcaagtgggctcacgtgcgaccctggaacaggacacgtcgcttatctcgccggctgtgtggtggtgattctcgaccccaaggaaaataagcaacagcatatctttaacacagcacgcaagtcactcagtgccctcgcattcagccccgatggcaagtatatcgtgacaggcgagaatggacatcggccagccgtgcggatctgggacgtggaggagaagaaccaggtggcagagatgctaggacacaaatatggcgtcgcatgtgttgcattctctcctaacatgaagcatatagtgagcatgggctatcagcatgacatggtgttgaatgtatgggactggaagaaagatatcgtggtcgcctccaataaggtgtcttgtagggtgatcgcattaagtttttccgaagatagctcatacttcgtgacagtgggtaaccgccacgtgcgcttctggttcctggaggtgagtaccgagactaaagtcaccagcactgtcccactggtggggagatcaggaatcctgggggaactccacaataacatattctgcggggtggcctgcggccgcggccgcatggccggatccacattctgcgtttcttactcaggattgctgtgtcagttcaatgaaaaacgtgtactagagaaatggattaatctcaaggtcagtctttcaagctgcctgtgtgtttctcaagaactgatcttttgtggatgcactgacggtatagtaagaatattccaggcccatagcttgcactatctagctaacttgccaaaacctcattacctgggggtcgatgtggctcaaggtttggagccctcttttctgttccaccgtaaagccgaggccgtctacccggacactgtggcgctcaccttcgaccctatccatcaatggctttcctgtgtgtataaggatcactcaatctatatatgggatgttaaggatattaaccgggtaggcaaggtttggtctgagctcttccacagtagctatgtttggaatgtggaggccttgagctag

SEQ ID NO: 211426 - DNA, 1452 bp, synthetic construct
  misc_feature 1..1452: note = Description of Artificial Sequence: Synthetic coding sequence
  source 1..1452: mol_type = other DNA
atggccgccgtgggcagcggcggctacgcccggaacgacgccggcgagaaactccccagcgtgatggcgggggtgcctgcccggaggggacaatcctctcctccgcctgcaccccccatatgtctgcgaaggaggacaagacttagtactgcctccgaagagacagtgcagaaccgagtcagcctggaaaaagtgcttggcataactgcccaaaattcgagcggattaacttgtgatccgggcactggccacgttgcatacctggccggctgtgtggtggtgatactggacccaaaggagaataagcaacagcatatcttcaacaccgccaggaagagcctgtccgccctcgctttttctcctgatgggaaatacatagtgactggggagaatggtcatcgaccagccgtgcgcatctgggacgtggaggagaagaaccaagtagcagaaatgttgggccacaagtacggagtcgcgtgcgtagccttcagccccaatatgaagcatattgtgtcaatgggctatcagcacgatatggtgctgaatgtctgggactggaaaaaggatatagtggtggcctccaacaaggtttcatgcagggtcattgctctgtccttctctgaagacagttcttatttcgtgacagttggtaatcgacacgtgcgattttggttccttgaggtgtctactgaaactaaggtgaccagtacggtgcccttagtgggaagatccggaatcctgggggagctgcacaataatatattttgcggcgtagcctgtgggcgcggtagaatggccggttccactttttgcgttagctattctggtctcctgtgtcagtttaatgagaagagagtcctcgaaaagtggatcaatttgaaagtgtcgttgagctcatgcttatgtgtctcacaggagttaatcttctgcggctgtactgatggcatcgtaaggatttttcaggcccactccttacattacctagccaacctgcctaaaccccattatctgggagtcgacgtagcccaaggcctcgaaccaagctttctcttccacagaaaggctgaagcagtctaccctgacaccgtggcactgacctttgaccctatccatcagtggctgtcttgcgtgtataaggatcacagcatttatatttgggatgtgaaagacattaaccgggttggaaaagtttggagcgagctgtttcactcctcttacgtttggaatgtggaggtgtaccccgaatttgaggaccagagggcctgtctgccctccgggagttttctcacatgctcctctgataataccattcggttctggaatctcgatagtagccccgactctcactggcagaaaaatatttttagcaatctggcacccgcattacaaatgtgcggcagaggccattcaaggcaacctaataccccaagccccggcgagattgcatcgtag

SEQ ID NO: 211427 - DNA, 4572 bp, synthetic construct
  misc_feature 1..4572: note = Description of Artificial Sequence: Synthetic coding sequence
  source 1..4572: mol_type = other DNA
atggccgccgtgggcagcggcggctacgcccggaacgacgccggcgagaagttgccatcagtcatggcaggcgtccctgccagacggggtcagtcttctccaccacccgcccccccaatctgtctcagaagacggacgcgcctgagcacagccagcgaagaaactgtgcaaaaccgagtgtccctggagaaagtcctcggaattaccgctcagaacagttctggtttgacttgtgatcccggaactggccatgtggcgtatctggccgggtgcgtcgtggtgatcttggaccccaaagaaaacaaacagcagcacatcttcaataccgctcgcaagtcattatccgcccttgcattcagcccagacgggaagtatatcgtgactggtgagaacgggcatcgccccgctgtccgtatatgggacgtggaggaaaagaatcaagttgccgagatgctggggcacaagtacggcgtggcttgcgtcgctttttctccaaacatgaaacatatcgtgtcaatgggatatcaacacgatatggtgctgaacgtgtgggattggaaaaaggatatagtggtggcatcgaacaaggtgagttgccgcgtgattgcgctgtctttttcagaggattcaagctatttcgttactgtggggaacagacacgtgcgcttctggttcctcgaggtgtccactgagactaaggtaactagcacagttccacttgtaggtcggtcaggtattctcggggaactacataataacatcttctgtggcgtggcctgtgggcgaggtcggatggccggcagtactttctgcgtgtcttactcaggactgttatgccagtttaacgagaagagggtgttggaaaagtggatcaacctgaaggtgtccttgtcctcctgcctgtgtgtctcccaagagcttatattttgcggctgtacagacggtatagtccgcatttttcaggcacacagcttgcactacttggccaacctgcccaaacctcactacttaggcgtagatgtggcccaaggccttgaacccagctttctattccatagaaaggccgaggcagtttatccggacacagtggctctcaccttcgacccaattcatcaatggctctcatgcgtgtacaaggaccattctatctatatctgggatgtcaaagacatcaaccgcgtgggcaaagtctggagcgaattgtttcatagttcctacgtgtggaacgtcgaagtgtatccggagtttgaggatcagcgagcttgtctcccctcagggtccttcttgacatgttcttccgataacaccatccggttttggaacttggactcctccccggactcccattggcagaaaaatattttttccaacacattgctgaaggtggtttatgttgagaatgatatccagcaccttcaggatatgagtcactttcccgaccgggggtcagagaatggcaccccgatggatgtgaaagctggtgttcgggtaatgcaagtctctcccgatggacagcatctcgcttccggcgacagatctggcaacctgcggatccacgaattacacttcatggatgagctcgttaaggttgaggcacatgatgctgaagtgctgtgcctggaatactccaagcctgagacgggcctgaccctgctggcttcggccagcagagatcgccttattcacgtcctgaacgtggagaagaattataacctggagcaaaccctcgacgaccattcctcgtcgatcactgctatcaagtttgcaggaaatagggatatccaaatgatttcctgtggggccgataaaagtatatactttagatctgctcaacagggttcagacgggctgcatttcgtgagaacacaccacgtcgctgagaagaccaccctatatgatatggatatagacattacccagaaatacgttgctgtggcatgtcaggatagaaacgtgagagtttacaataccgtgaatgggaagcagaagaagtgttacaaaggctcacagggcgatgagggaagcctgctcaaagttcacgttgacccctcaggaactttcctggcgacctcttgttcagataagagcatttctgttatagatttctactctggagaatgcatcgccaagatgttcggccattccgaaatcattacctcaatgaagtttacatatgactgtcaccacctgatcactgtgtcgggagactcttgcgtatttatttggcatctcggacctgagattacaaattgcatgaagcagcacctgcttgagatcgatcatcgccagcaacagcaacacaccaatgacaagaagagatccggacaccctcgccaagacacttacgtcagtaccccatccgagattcactcactctctcccggcgagcagaccgaggatgacttggaggaggaatgcgaacccgaggagatgctaaagactcctagcaaggattcattggaccccgatccaagatgcttgctcactaacggaaagttgccgctctgggcaaaaagactgctgggcgacgacgacgtggctgacggtctcgctttccacgccaagcgttcatatcagcctcatggccgctgggccgagcgggctggacaggaacctttgaagaccattctcgacgctcaagacttagactgctacttcacgcccatgaaacctgaaagcctggagaactctatcctggactccttggagccccaaagtctggcctccctgctgagcgagtctgagtcgccacaggaggcagggaggggacacccttcatttctgccccaacagaaagagagtagcgaagcatccgaactgatactgtactctctagaagccgaggtgaccgtaaccggcaccgattctcagtactgccgtaaggaggtcgaggctggccccggcgaccaacaaggcgacagttatttgcgcgtctcgtctgacagccccaaagaccagtccccccccgaggactctggtgaatctgaggccgacctggagtgctctttcgctgcgattcattcgcccgctccaccccctgatcctgcgcctaggttcgctaccagtctcccccacttcccaggctgcgcaggaccaaccgaggatgagctcagcttgcctgaaggtcccagtgtgcctagtagctcgctgcctcagactcccgagcaggaaaagttcctgcggcaccattttgaaacccttacagagtcaccctgtcgcgagctgttcccagcagcactgggtgacgtcgaagcttctgaggccgaagaccatttttttaaccctagactgtccatctcaacacagttcctctcctctttgcagaaagcatcccgcttcactcacacctttcctcctcgggctactcagtgcctcgtgaagagccctgaggttaagctcatggacaggggagggtcacaaccccgtgcggggaccggctacgcttctccggacagaacccatgttctcgctgccggaaaggcagaagaaactttggaggcctggcgtccacctccaccatgcctcacatctttggcttcttgcgttcctgcttcatctgtgctgccgacggatcgcaatttacccactcccacaagcgcccccacccccggactggcccagggagtgcacgcaccaagcacttgtagttacatggaggccaccgctagctctcgagcaaggatttcaagatcaatcagtctgggcgacagtgaaggaccaatcgttgcgacactagctcagcctctgagacggccgagctccgtgggcgagctcgcctccctgggtcaggagctacaagcaatcaccacagcaactacgcctagccttgactcagagggccaggagccagcactccgatcatggggcaatcatgaggccagagctaacctcagactcaccctgtctagcgcctgcgatggcctgctccagcctccagtggatacacagcctggagtcaccgtgcccgccgtatctttccccgcaccctccccagttgaggagtcagctctgcgactccacggtagtgcgttccgcccctccctcccagcccctgaaagcccaggcttgccggcgcacccctccaacccacagcttccagaggcccgcccgggtatccctggcgggacagcctccctcctggaacctaccagtggagcactgggcctgctgcaggggtcccccgctcgctggagtgaaccctgggtccctgtcgaggcactgccaccaagtccacttgagttatcccgagtgggcaacatcctccaccggcttcaaacaacattccaggaagcactggacttgtatcgggtgttagtctcctctggccaagtcgacaccggccaacagcaggctcgcacagagttagtgtcaacatttctttggatccactcccagttagaggcagaatgcttagtgggcacctcagtcgctccagcgcaggcattgccctcccccggccccccatctccgcctacactttacccgctggcttcacccgacctgcaggccctgctcgagcactacagtgaactattagttcaggccgtgagaaggaaggcacgaggccactag

SEQ ID NO: 211428 - DNA, 1302 bp, synthetic construct
  misc_feature 1..1302: note = Description of Artificial Sequence: Synthetic coding sequence
  source 1..1302: mol_type = other DNA
ggcggctacgcccggaacgacgccggcgagaagctgcccagcgtgatggcaggggtcccagcaagaagggggcaatcatctccacccccggccccgccaatctgtctccgcaggcgcacgagacttagtaccgcatccgaagagacagtccaaaaccgggtctcactggagaaggttttgggaatcacagcccaaaacagctctgggctcacctgcgacccaggcacggggcacgtggcctatctggccggcatgtggcgcatggggccagcaagtgagtcctgtggcgaagatagtatcgctccctctcttagtcgaacagtccctggtatgtactgcgtcgtagtaatcctggatccaaaagagaataagcaacagcacattttcaacaccgcccgcaaatctctgtctgccctggcgttctcgcctgatggcaaatatatcgtgactggggagaatgggcacagacctgccgtgcgaatttgggatgtggaagaaaaaaatcaggtggccgaaatgcttggacataagtacggcgtcgcttgcgtcgcattctctcctaacatgaagcacatcgtgtccatgggctaccaacacgatatggtcttgaacgtatgggactggaagaaggacattgtagtggcaagtaacaaagtcagttgccgcgttatcgctctctcattctcagaggacagctcctactttgtaactgtcggtaacagacacgttcgattctggttcctagaggtttctaccgaaaccaaagtgacatcaaccgtgccactggtagggaggagtggaattttaggggagcttcacaataacatcttttgcggcgtggcatgcggcaggggacgaatggccggttccaccttctgtgtgtcatatagtgggctactttgccagttcaacgaaaaacgagtcctggaaaagtggattaacctcaaagtctcccttagctcctgcctgtgcgtaagccaggagcttattttctgcggttgcactgacggcattgtccggatcttccaggcacattcgttgcactacctagccaacttgcctaagccccactacctcggcgtcgacgtcgcacaggggttggagccctcttttctgttccataggaaggctgaggccgtctaccctgacaccgtcgcccttacttttgaccccatccaccagtggctcagctgcgtctacaaggaccattccatctatatctgggacgtgaaagacattaacagagtggggaaagtatggagtgagctgttccattcatcttatgtctggaatgtggaatag

SEQ ID NO: 211429 - DNA, 2097 bp, synthetic construct
  misc_feature 1..2097: note = Description of Artificial Sequence: Synthetic coding sequence
  source 1..2097: mol_type = other DNA
atgagcgccgtggtggcccagaccctgcacgtgttcggcctgcggtcccacgtagctaataacatcttttattttgacgagcagattatcatctttccttcaggaaaccattgtgtcaaatacaacgtagatcagaaatggcagaaattcatcccaggttctgaaaagtctcaaggcatgctggctctatcaataagtcccaacagaagatacttggctatcagcgaaacagtgcaagaaaagcctgccattaccatctacgagcttagctcaatcccgtgcaggaagcggaaagtgctaaataacttcgactttcaagtgcaaaaatttatcagtatggctttttccccagactcaaaatatctcctggcacagacatctcccccggaatccaatcttgtttattggctgtgggagaaacagaaggttatggctattgtgaggatcgatactcagaataaccccgtttatcaagtgtccttctctccacaggataatacccaggtttgcgttaccggcaatggaatgtttaaacttttgagattcgctgagggtacattgaagcagacatccttccaaagaggcgagcctcaaaactacctggctcacacatgggtagccgacgataagatcgtggtagggacagatacaggaaaactgtttctctttgagtctggagaccagcgctgggaaacctctattatggtcaaggagcctacgaacggttctaaaagtcttgatgttatccaggaaagcgagagcttgattgaatttcccccagtttcaagcccactcccatcgtacgagcagatggtggctgcatcgagccattctcagatgtcaatgccacaggttttcgctatcgcagcatactcaaagggctttgcatgctctgccgggccaggcagagtcctgctgtttgagaaaatggaagagaaggacttttatcgcgaaagccgagaaatccggattcctgtagatcctcagtccaatgacccaagccaatctgataagcaggatgtcctgtgcctatgcttctctccgagcgaggaaacgctcgttgcttccactagcaagaatcaactttactccattaccatgtcacttacagagatttccaagggtgaaccagcacacttcgaatacctcatgtacccgctccattcagccccaatcacaggtctcgcaacctgtattaggaagccccttatcgcaacttgcagcctagatagatctattcgcctttggaattacgagacgaacaccctcgagctattcaaagagtaccaggaggaggcatactccatcagcctgcacccctctgggcacttcatcgtagtggggtttgccgacaagctgagactgatgaacctattgatcgatgatatcagatcattcaaggagtattccgtccgggggtgcggggaatgttcttttagtaatggtggccacctgttcgcagccgtcaatggtaacgtaattcacgtatacacaaccacatcattggaaaacatttcttccctaaaggggcacactggaaagataagaagcattgtgtggaacgccgacgacagcaaattgatatcaggcggaacagatggtgcagtctacgagtggaacctgagcactggtaaaagggagacggagtgtgtcctcaagtcctgttcctataattgtgtgaccgtatcccctgacgccaagataatcttcgccgtgggcagcgaccacacccttaaggagatcgccgactctttgatcttacgcgagatcagcgcttttgatgtcacgtataccgcgatcgtgatctcccacagtggtaggatgatgttcgtggggacctcagtgggaaccatccgagcaatgaagtacccgcttccccttcaaaaggaattcaacgaatatcaggctcatgccgggccaattaccaaggtctctagggctttgtcacccgggactcagagtcacacttgtctcctgcgggcgctgttcatcccctcaactagccagtgtcttttcagtctcttgctgttgtcttacctttttatacatcactcactaaatcaccacctgttaactatgaatatcctgttcgtttag

SEQ ID NO: 211430 - DNA, 501 bp, synthetic construct
  misc_feature 1..501: note = Description of Artificial Sequence: Synthetic coding sequence
  source 1..501: mol_type = other DNA
atgagcgccgtggtggcccagaccctgcacgtgttcggcctgcggtcacacgtagccaacaacatattctactttgacgagcagatcatcatttttccttcgggtaaccactgcgttaagtataatgtcgatcagaaatggcaaaaatttatccctggtagtgagaagtctcagggaatgctggctctaagtatttcaccaaaccggcgctacctggctattagcgagacagtgcaggaaaaacccgccatcacgatttatgagctgagcagtatcccctgtcggaagcggaaggtcctgaacaattttgactttcaggtccagaagtttatcagcatggcattttcccccgactctaaatatctcctagcacagactagtccacccgagtctaacctcgtatactggctctgggaaaagcaaaaggtgatggctatcgtcaggattgatacacagaacaatcctgtgtatcaggtctctttttccccccaagacaattag

SEQ ID NO: 211431 - DNA, 4473 bp, synthetic construct
  misc_feature 1..4473: note = Description of Artificial Sequence: Synthetic coding sequence
  source 1..4473: mol_type = other DNA
atggccggcaacagcctggtgctgcccatcgtgctgtggggccggaaagcccccacccactgtatctctgccgtgttgttgacggacgatggcgccaccatcgtgacaggctgccacgatgggcaaatttgcctttgggatctgagcgtggagctgcagatcaacccaagagcattacttttcggacacactgcatccatcacctgcttgagcaaagcctgcgcctcatcagacaagcagtacatcgtcagcgccagcgagagtggtgagatgtgcctttgggacgtttctgacggaagatgtattgagtttacgaaacttgcatgcacccacaccgggatccaattttatcagttttccgtcggtaaccagcgggagggaaggctgctttgccatggacactaccccgaaatcctcgtcgtggatgccacaagccttgaggtcctctactcgcttgtgagtaagatctctcccgattggatttctagcatgtctatcataaggagccataggacccaagaagatactgtcgtcgccctgtctgtgaccggcatcctgaaagtttggatcgtcacaagcgaaatttccgatatgcaggatactgaacccattttcgaagaggaaagcaagccaatctactgtcagaattgccagagcatcagtttttgcgcctttactcaacgcagcctcttggtcgtgtgttctaaatattggagagtatttgacgccggggactatagtttgctctgttcaggaccttcagagaatgggcaaacttggacaggtggcgacttcgtaagctctgacaaagtgatcatctggaccgagaatggacagagttacatctataagttgcctgcatcgtgtctacccgccagcgactccttcaggtcagatgtgggaaaggcagtggaaaatctgattcctccagtccagcacatcctgctcgatcgaaaggacaaggagttgttaatttgcccccccgtgactaggtttttctatgggtgtcgggagtactttcataagctgcttatccagggagattcatctgggcgcctcaacatttggaacataagcgacaccgcagacaagcagggctcggaggagggcctggcaatgacaacctcaatctccctgcaggaggcctttgacaagttgaatccatgccctgcgggcatcatcgaccaactgtctgtgatccctaactccaacgagcctctgaaggtgaccgcctcagtatatattccagcacatgggcgcctggtctgcgggagagaggatggaagcatcgtgatcgtgcctgctacacagacagccatcgtccagcttctacagggggagcacatgctgcgccgcggatggccccctcaccggacactccgcggacaccgcaataaggttacttgcctgctctatcctcatcaagtctctgcccggtatgaccaaaggtatctgatcagcggaggcgtcgacttttcagtaattatctgggacatattttccggggagatgaaacacatcttttgcgtccatggcggagaaataacgcagttgttggtgccaccagagaattgcagcgcgcgggtccagcactgtatctgctcagttgcttctgaccattccgtcggcttgctcagcctgagggagaaaaaatgcatcatgctggctagtaggcacttgtttcccatacaggtcattaagtggcgcccaagcgatgactacctggtggtcggctgttccgatgggagcgtatatgtgtggcagatggacaccggagctctagatagatgtgtgatggggatcacggcggtggaaatcctcaatgcctgtgacgaagcagtccccgctgctgtggattcactgagccacccggcggtcaatctgaagcaggcaatgactcggcgcagtctggccgcacttaagaatatggcccaccacaaactgcagaccttggctaccaacctacttgcgtcagaagcgtcggataagggcaacctccccaaatactcccataacagcttgatggtgcaggctatcaagaccaatctgacggatcccgatatccacgtcctgttctttgacgtggaggccttaattattcagctcctgactgaagaagcatcccggcctaatactgctctgatatcccctgaaaatctgcagaaagcatcagggagctctgacaaaggggggtcctttctcacaggcaaaagagccgccgtactcttccagcaagttaaagagactatcaaagagaacattaaggaacatctcttagacgatgaggaagaagacgaggaaattatgcgccagaggagggaagaatctgatccagagtaccggagctccaaaagcaagcccttaactttgctagaatacaacttgactatggacaccgcgaagctgtttatgagttgtctgcacgcctgggggctgaatgaggtattagatgaggtttgtctggataggttgggtatgctgaaacctcactgcacggtgagctttggacttctttctcgaggtggtcatatgtccctgatgctgccaggatacaatcagccagcgtgcaagctgtctcacggtaagaccgaagtcggccgcaaacttccagcatctgaaggagttggaaaaggtacttacggggtaagccgagccgtcaccacgcaacatctcctcagcattatcagtttggcaaatacactgatgtccatgaccaacgccacattcatcggagaccatatgaagaaagggccaactcgacccccacggccctctacacccgacttatctaaagcccgcggcagcccacccacctcctctaacatcgtacagggccagattaagcaggtagcggcccccgtcgtaagtgcccgctccgacgcagaccactccgggtctgaccctccaagcgctccagctctacacacctgttttcttgttaacgagggttggtcccagctcgcagcaatgcattgtgtcatgctcccggatttgctcggacttgataagtttcgaccacctctcctggaaatgcttgctcgccggtggcaggatcgctgcctagaggtccgggaggcagcgcaggccttattgttggcagagcttcgaagaatcgagcaagccggccgaaaagaagcaatcgatgcctgggctccctacctgccccaatatatcgaccatgttatttctcctggcgtcacctccgaagctgcacaaaccatcactactgccccagatgcttccggaccagaggccaaagtgcaggaggaggaacatgacctggtagatgatgacattactactggatgcctgtcttcagttccccaaatgaaaaaaattagcacctcatacgaggaacggcggaaacaggctacagcaatcgtgttactgggcgtaataggcgcagagttcggagccgagatcgagcccccaaaactgctgacacgtccaagaagtagtagccaaatccctgaaggctttgggttgacctcagggggatctaactattctttggcgcgacacacttgtaaagcactgacatttctcctcctccagccaccctcccctaagctcccacctcacagcactatcagaaggaccgccatcgatttgatcggccggggcttcacagtgtgggaaccttatatggacgtcagcgccgtgctaatgggattgctggaattatgtgccgatgccgaaaaacagttagccaacatcactatggggcttccccttagtccggccgccgattccgccagatccgcacggcatgcattgtccctgatcgcaactgctcggcctccagcctttattacaaccattgccaaggaggttcaccggcatactgctctggcagccaacactcaatctcagcagaacatgcacacgactaccctggcccgggccaagggggaaatactgcgagttatagaaattttgatcgagaaaatgccaactgatgtggttgaccttctggtggaggtcatggacataatcatgtactgtctagaaggttcgctcgtcaagaaaaagggcctgcaggagtgcttccctgcaatctgccgcttctacatggtttcttattatgagagaaaccaccggatcgccgtgggtgccaggcacggcagtgtggcactgtatgacatcaggactggaaaatgtcaaaccatacacgggcataagggtccaataacagccgtggcattcgcccccgacggacgctacctcgccacatactctaacacagactcccatatttctttttggcaaatgaacaccagcctattaggatcaatagggatgctgaattcggccccccagctaaggtgcatcaagacctaccaggtcccccctgtgcagcccgctagtcccgggagtcacaacgcactgaagttggcacgcttgatttggactagcaaccgcaacgttatccttatggctcacgacggaaaggagcacaggtttatggtgtag

SEQ ID NO: 211432 - DNA, 4374 bp, synthetic construct
  misc_feature 1..4374: note = Description of Artificial Sequence: Synthetic coding sequence
  source 1..4374: mol_type = other DNA
atggccggcaacagcctggtgctgcccatcgtgctgtggggccggaaagcacctactcactgcatctctgctgttcttctgacagacgatggtgcaaccatcgtgactggctgccatgatggacaaatttgcttgtgggacttgtcagtggagctccagatcaaccctcgagccttgcttttcggacacacagctagtataacctgcctgagtaaggcttgtgcgtcttcagataaacaatacattgtttccgctagtgagagcggcgagatgtgcctttgggatgtgtccgacggacgctgcattgagttcacaaaattggcttgcacacatacaggcatccagttttatcaattctctgtcggaaatcagcgcgaggggaggctgttgtgccacgggcactatccagagatcctcgtcgtagacgcaacctctcttgaagtgttgtacagcctggtgagcaaaattagtccagactggatttcatctatgagtatcattaggagccatagaacacaggaagataccgtggtggcactgtcagttactggtatcctcaaagtgtggattgtgacatccgagattagtgacatgcaggacaccgagcccatctttgaggaagagtctaagccaatctattgccagaattgtcagagcataagcttctgcgcatttacccaaagaagcttgctggttgtctgttctaaatactggcgagttttcgacgcaggtgattactccttactgtgttctggcccaagcgaaaatggacaaacctggacaggtggtgactttgtgtcaagcgacaaggtcattatctggactgagaacggccagtcctacatttataaactcccggccagttgtttgcctgcgagcgatagttttcgaagtgacgtcggcaaggctgtggagaatctcattccacccgtgcagcacattcttctcgaccgtaaggataaggagcttctcatttgtcctcctgttacacgcttcttttatggttgccgcgagtactttcacaagctactgatccaaggagactctagcgggagactgaatatctggaacataagtgatactgcagacaagcagggctcagaagaaggcttagccatgacaacgtcaattagcctccaagaagcttttgataagctgaatccttgcccggcagggatcattgaccagctgtcggtgatcccaaatagtaacgagcctttgaaggtgacggctagcgtgtatatccctgcgcatggcaggctcgtatgtggaagagaggacggaagcattgtgatagtcccagctactcagacagccatcgtgcagcttctgcagggtgagcacatgctgcgtaggggctggcctccacacagaaccttgaggggacataggaataaggtgacttgcctgctttatccacaccaggtcagcgctaggtacgatcaacggtacctgataagtgggggcgtcgacttttctgtcatcatatgggacatattctccggggaaatgaaacacatcttttgtgttcacggcggggagattactcagctgctggttccacccgaaaattgttcagccagggtccagcattgcatttgcagtgtggcttcagaccactccgtcggcctactgagcctgagagaaaagaagtgtatcatgctggctagtcgccatcttttcccgatacaggtgatcaaatggcgccccagcgatgactatctggtagtcggttgttccgatggaagcgtctatgtgtggcagatggacacaggagcactcgataggtgcgtcatggggattacagccgtcgagatcctgaatgcttgcgacgaagccgtacctgccgccgtggattccctgtcccaccctgccgtcaatcttaagcaggccatgacccgccggtcactcgcagccctcaaaaatatggctcaccataaattgcaaacactggctaccaacctcctagcgtctgaagcctctgacaagggtaaccttcctaaatattcgcataactcactgatggtgcaggccatcaaaacgaacctcactgacccagatatccacgtgctgttcttcgatgtcgaggccctaattatccagttgttgacagaagaagccagccggcctaacacagccctcatctcacccgagaatttacagaaagcgagcggaagcagtgataagggaggcagcttcctgacaggcaagagagccgccgtgttgtttcagcaggtcaaggaaactatcaaagaaaacattaaagaacacctgttggacgatgaggaagaagacgaggagattatgaggcagaggcgcgaagagagtgatccagaataccggagctctaagtctaaaccccttactcttctggagtacaatcttacaatggataccgctaaactatttatgtcctgcctccacgcatgggggcttaatgaggttctggacgaggtgtgcttggaccgtttggggatgttgaaacctcattgtaccgtgagttttggattactctctcggggcggccatatgagcctaatgcttccaggatataaccagccagcgtgtaagctcagtcacgggaaaacggaagtgggccgaaagttgcccgctagtgagggcgtcggcaaagggacatatggcgtgtcacgcgcggtgacaacccagcatcttcttagcatcattagtttggctaatactctgatgagcatgaccaatgccacctttatcggagatcacatgaaaaagggccccacgcgcccacctagaccttcaacccccgacctaagcaaggctaggggtagtccacccacctctagcaatatcgttcaaggccagatcaagcagggctggtcccagctggctgccatgcactgcgtcatgcttccagatctcctgggcttggataagttccgaccacctctgttggagatgctcgccagacgctggcaagatcgatgcctggaggtgcgagaggccgctcaggcccttctcctagccgagctacgccgcatagaacaggcggggaggaaagaagctattgatgcctgggcaccttatctgccacagtacatagatcacgtgataagccccggggttactagcgaggccgcccagaccatcaccactgccccagacgcgtccggcccagaagcgaaggtccaggaggaggaacatgatttggtagatgacgacatcacgacgggttgtctgtcatctgttccccagatgaagaagatttctacgtcatacgaagaaaggcggaagcaggcaactgctattgtgcttctgggagtgatcggggctgagttcggcgcagaaattgaacccccaaagctgctgacccgccccaggtcatccagtcagatccccgaaggattcggtctaacctccggcggctctaattatagcctggctaggcatacatgcaaggctctgactttccttttattacaacccccaagccccaagcttccaccgcatagcaccattaggaggaccgcgatagaccttatcggacgtggattcaccgtgtgggagccgtacatggacgtttccgccgtgctcatgggactgctcgagctatgtgctgatgccgagaagcagttagcgaatatcactatgggcctgccactctcgcctgctgccgattccgcaagatccgcacggcatgcactgagcctaatagctaccgctcgacctcctgcctttatcactaccattgccaaggaagtacacagacacacagccttagccgccaatacacagtcacagcagaacatgcataccaccacactggccagggcgaagggtgagattttgcgcgtcattgaaatcctgatagagaaaatgcctaccgacgtggtggacctgttagtggaagtcatggacattatcatgtactgtttagagggctctctagtcaaaaaaaaaggcttgcaggaatgtttccccgccatctgtagattctacatggtgtcctactatgagcgaaaccatagaatagccgtgggtgcacggcacggttccgttgccctgtatgacatccgaaccggcaaatgtcaaaccatccatggccataagggtccgattaccgctgtcgctttcgcgcctgatgggcgctatctggctacatattcaaacaccgacagccatatctccttttggcagatgaacacttctctgctggggtctattggtatgctgaacagtgccccgcaactgcgatgcattaagacatatcaggttccccctgtgcagccagctagccctggatcccacaatgccctgaagttagccaggctaatctggacatctaatcggaacgtgattttgatggctcatgacggtaaggaacacaggtttatggtgtag

SEQ ID NO: 211433 - DNA, 4374 bp, synthetic construct
  misc_feature 1..4374: note = Description of Artificial Sequence: Synthetic coding sequence
  source 1..4374: mol_type = other DNA
atggccggcaacagcctggtgctgcccatcgtgctgtggggccggaaagccccaactcattgcattagcgccgtcttactgaccgatgacggtgccaccattgtgacagggtgtcacgatggacagatctgcctttgggacctgagcgtcgagctgcagatcaatcctcgggcactcctgtttgggcacacagccagtatcacctgcctgagcaaagcctgtgcaagtagtgataagcaatatatcgtgtctgcgagcgagtctggtgagatgtgtctatgggacgtgtctgatggaagatgcatagaatttactaaactcgcctgcacacacaccggaatccaattttatcagttttctgtaggaaatcaaagggagggtcggttgttgtgtcacgggcactacccagagatcctggtagtggatgccacatcattggaagtcctctatagcttggtctcgaaaattagtcctgattggatttccagcatgtccatcattcgatcccatcgcactcaagaggatacagtggtagctctttcagtgaccggaattctcaaagtatggatcgttactagtgagatctccgacatgcaagatacggagccaatcttcgaagaggaatcaaagcctatatattgtcagaactgccagagcatttccttttgcgcctttacccagcgcagcttactggtagtgtgctccaaatactggagagtctttgatgctggtgactacagccttctttgctcagggccaagcgagaatggacaaacgtggaccgggggggacttcgtaagcagtgataaggtaatcatctggacagaaaacggtcagagttacatttacaaactgcccgcaagctgcttgcccgccagtgactctttcaggtccgacgtggggaaggccgtcgaaaatctgatccctcctgtgcagcacatcctgctggacaggaaggataaggaacttctgatatgtccccctgtcacacggttcttttacggttgcagagaatattttcataagctcctgatacaaggcgatagtagcgggaggctgaacatttggaacatttcagacacggccgataaacagggatctgaggaggggttggcgatgacaacatccataagcctccaggaggcttttgataagctgaatccttgtcctgcaggtatcattgaccagctgagcgttattccgaactctaacgagcctctgaaggtgaccgcctcagtgtatatcccagcacatgggcgcctcgtgtgtggccgcgaggacgggagtatagtcatcgtccctgcaacacagacagctatcgtccagttactgcagggagagcatatgctgcgcagaggctggcccccccatcgcaccctgcgcggtcacagaaacaaagtcacatgtctgctatacccacatcaggtgagcgctagatacgaccaacggtacctgatctcaggaggggtggacttttccgtaatcatctgggatatctttagcggcgagatgaagcacattttctgtgttcatggtggcgagataactcagctgctggtgccacctgagaactgcagcgccagggtccagcactgtatctgtagcgtggcttcggaccattccgtggggcttctgtctttacgggagaaaaaatgcattatgttggccagtaggcatctttttccaattcaagtaattaaatggagaccctctgatgattacctggtcgtgggatgctctgacgggagtgtctacgtgtggcagatggataccggggcattggataggtgcgtcatgggcataacagctgtcgaaatcctgaacgcgtgtgatgaggctgtcccggccgctgtggactccctgtcacacccagctgtgaacctgaaacaagccatgactcgcaggagcctggccgcgctcaagaatatggcccatcataaactgcaaacgctcgccacgaatctgctggcgagcgaggcttcagacaaggggaatttgcccaaatactcacataactcacttatggtgcaggcgattaaaactaaccttacggatcctgacattcacgtcttattttttgatgtggaagctttaatcattcagctgctgaccgaggaggccagccgaccaaacacggctctgatctctccagagaaccttcagaaggcgagcggttcctctgacaaaggtggctcctttctaaccggtaaacgggccgccgtactgtttcagcaggtgaaggagactatcaaggagaacattaaggagcacttactcgacgacgaggaagaagacgaagaaataatgagacaaagacgggaggaatccgaccccgaatatcgttccagcaagtctaagcctctgacactgctggagtataatttgaccatggataccgctaagctgtttatgtcctgcctccatgcctggggcctaaacgaggtgctcgacgaggtctgtctcgaccgtctgggcatgctgaagccacactgcacggtgtccttcggactgctttcgagaggggggcacatgagcttgatgctgcccggatataatcagcccgcctgcaagctgtctcacggtaagaccgaggtgggaagaaagctacctgcctccgaaggagtggggaaaggaacgtatggagtgagtcgggctgtgacaactcagcacctgctgtcgatcatctctcttgccaacactctgatgagtatgacaaacgccacatttattggggaccacatgaaaaagggaccaacacggccaccaagaccgtccactcctgatttgtctaaggcacgggggagtccacccacttctagtaatattgtgcaagggcagatcaagcagggctggagccagttagctgcgatgcactgcgtcatgttaccagaccttctgggactcgacaagttcagaccccccttgctggagatgctggccaggaggtggcaggataggtgtctcgaggtgagagaggccgctcaggcattactgctggctgagctgcggaggattgagcaggccggccggaaggaggctattgatgcctgggcaccctatctccctcagtacattgatcacgtgatcagtcccggcgtgacaagcgaagccgcacagactattaccacggcacccgacgcgtctggtccagaggcaaaggtccaagaggaagagcatgaccttgttgatgatgatatcacaacaggttgcttatcatcagtgccacaaatgaaaaagatatctacttcgtatgaggaacgcagaaagcaggctactgctatagttttactgggcgttataggagccgagtttggggcagagattgagccacctaagctgctaacaaggccccgctctagctctcaaataccagagggattcggtttgacctctggcggcagtaattactccctggcaaggcacacttgtaaggccctgacctttttgctacttcaacctcccagccccaaattacccccgcactccacaatccggagaacagcgattgatttgattggtaggggtttcaccgtatgggagccctacatggatgtcagcgccgttttgatgggacttctggagttgtgtgctgatgccgagaagcagctggctaacatcacgatggggttacccctgtctccagcagctgatagtgcacgctctgcacgtcacgcgctgtcactgatcgctactgcccgtccaccagcatttattacaaccatcgccaaagaagtccaccgccatacagcattggcagcgaacactcagagccaacaaaacatgcatacaacaactctcgctcgcgccaaaggagaaatcctgcgggttattgagatcctgattgagaagatgcccacagacgtcgtggatctgctggtggaggtgatggatatcatcatgtattgtttggagggttcattggtgaaaaaaaagggactgcaggagtgctttcctgccatctgtcggttctatatggtgagctactatgagcgaaatcacagaattgccgttggtgctaggcacggatctgtggccctctatgacatcaggactggaaaatgtcagacgatccatggccacaaaggcccaattaccgccgtagcattcgccccagacggaaggtacctggccacctacagtaacactgattctcacatctctttctggcagatgaacacttccctgctgggctctatcggcatgctgaactcggccccccagctccgctgtattaaaacatatcaagtgccacccgttcagccggctagccccggctcgcacaatgccctgaaattagctcggctcatatggactagtaacagaaatgtgattctgatggcacacgacggcaaggagcaccggttcatggtatag

SEQ ID NO: 211434 - DNA, 2448 bp, synthetic construct
  misc_feature 1..2448: note = Description of Artificial Sequence: Synthetic coding sequence
  source 1..2448: mol_type = other DNA
atggccggcaacagcctggtgctgcccatcgtgctgtggggccggaaggctcctacacactgcatctccgcagtcctgcttactgatgacggggcaactatagtgactggctgtcatgatggccagatctgtttatgggacctgagcgttgagctgcagataaacccaagagctctgcttttcggacataccgccgtgctttttcagcaggtaaaggagacgattaaggaaaatataaaggagcatctcctggatgatgaagaagaggatgaagaaatcatgagacagagacgggaagagtctgatcccgaatacaggtcttctaaatctaagcccctgacactcttggaatataatctgacaatggacactgccaaattattcatgtcgtgtctccacgcttggggcttgaacgaggtcctagacgaagtctgcttagatcgtctaggaatgcttaagcctcactgtaccgtaagcttcggcctgctaagtaggggaggccacatgtcactgatgctgcccgggtacaaccagcccgcatgcaaattgtcccatggcaagaccgaggttggaagaaagttaccggcttcagaaggggtagggaaaggcacatacggggtcagtcgagcagtgactactcagcacttgttgtccattatcagcctcgctaacacgctgatgtccatgaccaacgcaaccttcattggtgaccacatgaaaaaaggacccacccggccaccgcgcccttcaacccctgatttgtcaaaggctcgcgggtctcctcccacatcatcgaacatcgttcagggccagattaaacaggtggctgccccagtagtgagcgcacggagcgacgccgaccactccggaagcgacccgcccagcgctcccgccctgcacacatgtttcttggttaatgaggggtggtctcagctagcagctatgcactgtgttatgctacctgacctgcttggtctagacaagtttagaccaccacttcttgaaatgttagcacgcaggtggcaggacagatgcctcgaggtgcgggaggctgctcaggctctgctgctagctgagctccgccgaatcgaacaggctgggcgcaaggaagctattgacgcctgggctccgtatctgccacagtatatcgaccacgtcatatctcccggggtcaccagcgaggctgcacaaaccataacgaccgcacccgacgcaagtggtcctgaagctaaggtgcaggaggaggaacacgacttggtggatgatgatatcaccactggctgtctttccagtgtcccgcagatgaagaaaatttccactagttatgaggaaaggcgtaaacaggctaccgctattgttctcctgggcgtcattggtgccgaattcggtgcggaaatcgagccaccaaagttgcttactcgacctcgaagctcatcacaaatcccggagggctttggcctcacttcgggcggatctaactattctctggctcggcatacttgcaaagcgctgactttcctgctgctacaacctccttcacccaagcttccaccgcatagcaccattcgccgcaccgctatcgaccttatcggaaggggctttactgtgtgggaaccttatatggatgtgagtgccgtgttaatgggtttgttagagctctgtgccgatgctgaaaaacagctggcaaacattacaatgggtctgcctctcagtcctgcggcggatagcgcccgcagcgcaaggcacgcgctgtccctcatagctaccgcacggcctccagccttcatcaccaccattgctaaggaggtacatagacatacagctctcgcggccaacacacagagccagcaaaatatgcacactacgacgctcgctcgcgccaaaggggaaatcctgagggtcattgagattttaattgaaaaaatgccaaccgatgtcgtggacttacttgttgaggtcatggacatcatcatgtactgcctcgaaggtagccttgtgaagaagaaaggtctgcaggagtgctttccagctatctgccggttttatatggtgtcatactacgagaggaatcaccggatcgctgtgggggcgcgccatgggtccgtggcgctctacgatatccggacaggaaagtgccagactattcacggacacaagggccccattacagctgtggcgtttgcacccgatggacgctacctagccacatactccaatactgatagccatatcagtttctggcaaatgaatacgagcctcttaggaagcatcggtatgctcaactcagcaccacaactgagatgcattaagacctatcaggttcctcctgtacagcctgcaagcccaggaagccataatgccctcaagctagccagacttatatggacaagcaaccggaacgtcattctcatggctcacgatggcaaagagcaccggttcatggtgtag

SEQ ID NO: 211435 - DNA, 3309 bp, synthetic construct
  misc_feature 1..3309: note = Description of Artificial Sequence: Synthetic coding sequence
  source 1..3309: mol_type = other DNA
atgcggaccagcctgcaggccgtggccctgtggggccagaaggccccaccacactccatcactgccatcatgatcactgatgaccagcggacaattgtcacgggttctcaggaggggcagctctgcctttggaatctgagccacgaacttaagatctccgcaaaagagcttctttttgggcattccgcgtccgtgacctgcctcgcacgggccagagacttttccaagcagccatatattgtgagcgccgcagaaaatggcgagatgtgtgtttggaacgttactaacggccagtgcatggagaaagcaacgttaccatacagacacaccgccatttgctattatcactgctccttcaggatgaccggcgagggttggctgctatgctgtggggaatatcaggacgtcctgattatagacgcaaagactctggcggttgtgcattcattccggtcaagccagttccccgattggattaattgtatgtgcatcgtacactccatgaggattcaggaagatagccttcttgtggttagtgtggcgggggaactcaaggtgtgggatttgagctccagcataaactccattcaagaaaaacaggatgtgtatgaaaaggaaagtaagttcctggagagcctgaattgtcagaccattagattctgcacctacaccgagcggttgctcctggtagtgttctctaagtgctggaaagtgtacgattactgcgattttagcctgctgctgacagaagtgtccaggaatgggcagttttttgccgggggtgaagtaatcgctgcgcaccgaatccttatctggaccgaggacggacatagttatatctatcaactgctgaatagcggcctgtcaaagtccatttaccctgcagatggtagagtgctgaaagagactatttacccgcacctcctttgcagcacatccgtccaagagaataaagagcagagccgaccttttgtgatgggatacatgaatgagcgaaaggagcccttttataaggtgctgttttcaggtgaagtgtctggccgaattaccctttggcatatcccggacgtccccgtgtccaaatttgatggaagtccgcgtgaaatcccagtaacagcaacctggacgttgcaggataactttgacaaacatgacacaatgagccagtcaattattgactatttttctgggctgaaagatggggctggtacggccgtggtgacaagcagcgagtatatcccctcattggataaactcatctgcggctgcgaagacggtacaatcattataacccaggccctcaacgcggccaaagcaagactactcgaggggggcagtctggtgaaagactctccgcctcacaaggtgctgaagggtcatcaccagtctgtaacaagccttttataccctcatggacttagctccaaattggatcagtcttggatgctatccggtgaccttgattcttgtgtcattctatgggatatcttcacggaggaaatcctgcacaagttttttttagaggctgggccggttacatcccttctgatgtccccagaaaaattcaaactgagaggtgaacagattatatgttgtgtctgcggtgatcacagtgttgccctgctgcacctggagggtaaatcttgtctgttgcacgcccggaaacacctttttcccgtgaggatgatcaaatggcatccggtagagaatttcctcattgtcggctgtgcggacgattcagtgtatatttgggaaattgagacagggaccctggaacgacacgagacaggcgagagggcccgcataatcctgaattgctgcgatgattcgcagcttgtcaaatcagtgctccctattgccagcgaaaccctaaaacacaagagtatagagcagcgaagcagcagcccctaccagctaggacctctgccttgtccgggactccaggtggagtcatcgtgtaaagtgaccgacgcaaagttttgtccccgccccttcaatgtcctacccgttaagacaaaatggtcaaacgtcggctttcacatattgctgttcgatttggaaaaccttgtggagctgctgcttcccacacccctgtcagacgtcgactcctcatcctccttttacggcggagaggtgcttcgtagggctaagtctacggtggaaaaaaaaacgctcacccttcggaagagtaaaactgcctgcggccccctatcagctgaggccctcgcgaagcctataactgaaagtctggctcaaggcgataacaccattaaatttagtgaggaaaacgacggtatcaagcggcagaaaaagatgaagatctcaaaaaagatgcagccaaagccgtccaggaaagtggacgcatcccttacaatcgataccgcgaagctgtttttgtcatgtctgttgccatggggcgtggacaaagaccttgattacctgtgcattaaacacctgaatattcttaagctccaaggccccatcagtctaggtatttctttgaacgaagacaatttttccttgatgctgcccggctgggacctgtgcaattccgggatgatcaaggactactcaggcgtgaacttgttctcacgaaaagtcctggacctcagcgacaagtacacagctacactgccaaatcaggtggggatcccccgcggtttagagaataactgtgattccctgagagagtctgataccatcgtgtacctgctcagtaggctttttctcgtgaataagctcgttaatatgccccttgaactggcctgcagagtgggcagttcatttcggatggagtccatacataacaaaatgcgcggagcagggaatgacattttgaatatgtcctctttttactcatgcctgcgaaatgggaagaacgaaagccatgtccccgaggcggatctcagcctacttaaactgatctcctgttggcgcgaccagagtgtgcaggtgaccgaggccatccaggctgtgctactggcagaggtccagcaacacatgaagtcactcgggaagatccccgtgaattctcagccggtgagcatggccgagaacggcaactgtgagatgaaacagatgctacccaaacttgaatggactgaagagctcgaactccaatgcgtgagaaacacactgcccctgcagacccctgtaagtcccgtcaaacacgacagtaactccaatagcgccaacttccaggatgtggaagacatgccagatagatgcgcacttgaagagtctgaatctccaggggagccacgccaccacagctggatagcgaaagtttgcccctgtaaagtgagttag

SEQ ID NO: 211436 - DNA, 3309 bp, synthetic construct
  misc_feature 1..3309: note = Description of Artificial Sequence: Synthetic coding sequence
  source 1..3309: mol_type = other DNA
atgcggaccagcctgcaggccgtggccctgtggggccagaaggccccaccgcacagtatcaccgctattatgataacagacgatcagcgaaccattgttaccgggagccaggagggacagctctgtttgtggaaccttagtcatgagctaaagatctctgcaaaggaacttttgtttggtcattctgccagcgtgacttgcctcgcgcgggccagagacttctctaaacaaccatacattgtctcagcagccgagaatggcgagatgtgcgtttggaatgtcaccaacgggcagtgtatggagaaggctacccttccttatcggcatacggcgatctgttactaccattgcagctttcgcatgaccggcgagggttggctcctgtgttgcggcgagtatcaggacgttctgataattgatgccaagacactggctgtggtgcactcatttaggagctcacagttccctgactggatcaattgtatgtgcatcgtccactctatgcgtatacaggaggatagccttctggtcgtgagcgtcgctggcgaactcaaggtctgggatttatcgagctccatcaacagtattcaggagaaacaggatgtgtatgagaaggaatcaaaattcttagaatctctgaactgccagaccatacggttctgcacatacacagagcgcctgttgctggtggtctttagtaaatgctggaaggtctatgattactgcgacttttctctcttactgaccgaggtgagccggaatgggcagttcttcgctggcggagaggtaatcgctgcacaccgcatcctgatatggactgaagacgggcattcatacatataccaactgcttaacagcggcttgtccaaaagcatttatccagcagatggccgggtgctcaaggaaactatttatccacacctgctgtgcagtacatcagttcaggagaataaggagcagtccagaccttttgttatggggtatatgaacgaaaggaaagaacccttctacaaggtgttgttttcaggggaagtatcaggacgcattaccctgtggcatatcccagatgtgcccgtctctaaatttgacggcagtcccagagaaattcccgtgacggctacctggacactacaggataattttgacaagcacgacacgatgagccagtccattatcgactatttctcaggattgaaagacggtgcagggactgctgttgtgactagtagcgaatacataccaagcctggataagctcatctgcggttgcgaggacggcaccattatcatcacacaggccctcaatgcggcgaaagccagactgctggagggcgggtctctcgtgaaagactccccccctcataaggttctgaaaggacatcatcagagtgtgacgagcttgctgtatcctcatgggctgtcctctaagctcgaccagagctggatgctgtcaggcgacctggacagctgtgtaatcctctgggacatattcacagaagaaattctgcataagttcttcctggaagccggacccgtaacctctctcctcatgtcccccgagaaatttaagcttaggggggaacagattatctgctgcgtgtgcggagatcacagcgtggcactgctccatctggaagggaagtcttgtctgcttcatgccaggaagcatttgtttcctgtgagaatgatcaagtggcaccccgtggagaattttctgattgtgggctgtgccgacgattccgtttacatctgggagatagaaaccggcactctcgaacgccacgaaacaggcgagcgcgcaaggatcattctgaattgctgcgatgactcacaactggtgaaatccgtgctcccgatcgcgtctgagacccttaaacataagagtattgagcagaggtcctcatccccatatcagctcgggccactcccgtgccctggactgcaagtagaaagctcgtgtaaagttaccgacgctaagttttgtccccgtcctttcaatgtactgcctgtcaagacaaaatggagcaacgtgggctttcatatcctgctttttgatttggagaacctggtggagctgctgctccctactccattgtcagacgtggattcatcttcctctttctacggtggggaggttctgcgaagggcaaaatctactgtggagaaaaaaacactgactctgcgcaaatccaaaacggcctgtgggccgctatctgcagaagccctagccaagcctattacagaatcccttgcccagggtgacaataccatcaagtttagtgaggagaatgacggcattaagcgtcagaaaaaaatgaagatttccaagaaaatgcagcccaagccatcccgaaaggtggatgcttctctgactatcgacaccgctaaactgtttctaagttgcctgcttccatggggggtggacaaagacctggactacctctgtataaaacatcttaacatcctgaagcttcagggtcctatatccctgggaatcagcctgaatgaggacaatttttctctgatgctcccaggctgggacctctgcaatagtggtatgatcaaggactacagcggcgtgaacctgttctcgcgcaaggtcttggacttatccgataaatacaccgccactttgcctaaccaggtgggcattccccgggggctggaaaataattgtgactccctgcgtgaaagtgacacaatagtgtacctgttatcgcgacttttcctggtgaacaaactggtcaatatgcccttggagctcgcatgcagggtgggcagctcattcaggatggagagcattcataacaaaatgagaggcgctggcaatgacatcttaaatatgagctcattctacagttgcttacgtaatggcaaaaatgaaagccatgtgcccgaagccgatctgagcctactcaagctgatcagttgttggcgggatcaatctgtccaggtcaccgaagccatacaggccgtgttgctggcagaggtgcaacagcatatgaaatctctaggaaaaattccagtgaattctcaacccgtttctatggccgaaaatggtaattgcgagatgaagcagatgttgccaaaactggaatggacagaagagctggaattacagtgtgtgcgaaataccctgcccctgcagacaccggtttctccagtcaagcatgacagcaatagtaattccgctaattttcaggatgtggaagatatgccagaccgctgtgcattggaagagtcagagtcccctggagagccccgacaccactcttggattgctaaggtgtgtccatgcaaagtttcctag

SEQ ID NO: 211437 - DNA, 3300 bp, synthetic construct
  misc_feature 1..3300: note = Description of Artificial Sequence: Synthetic coding sequence
  source 1..3300: mol_type = other DNA
atgcggaccagcctgcaggccgtggccctgtggggccagaaggccccaccccactctatcaccgccattatgattactgatgatcagaggaccatagttactggatcccaggaaggccagctctgtctgtggaacctgagtcacgagctgaaaatttccgctaaagaactcctcttcgggcactcagcgtctgtgacctgccttgctagggcacgtgacttcagtaagcagccctacattgtaagcgctgccgagaacggtgagatgtgtgtttggaacgtgaccaacggccagtgcatggagaaagcaacactgccataccgccacactgcaatctgctactaccactgtagtttccgcatgacaggcgaaggatggctactttgttgcggcgaataccaagatgtgctcatcattgacgcaaaaaccctcgctgtggtgcacagtttccggagctctcagttccctgattggatcaactgcatgtgcatcgtccacagtatgcgtatccaggactctctcttggtggttagtgtagctggcgagctgaaagtgtgggatctgtcctccagtatcaactctattcaagaaaagcaagatgtttacgagaaagagtctaagttcttggagtccctcaactgccaaaccattagattttgtacctacacggagaggctgttgcttgtggttttcagtaaatgttggaaggtgtatgactattgtgatttttccttgctcctgacggaggtgagccgaaacggccagttctttgcagggggagaggtcattgctgcccataggatactgatatggactgaggatgggcatagctacatctaccaattgctaaactccggactctctaaaagtatctaccctgcggacggaagagtgcttaaggagaccatctacccccatctgctgtgttccaccagcgtccaagaaaataagagcaggccatttgttatggggtatatgaatgaaagaaaagaaccattctataaggtgctgttttccggcgaggtctctggcagaatcacactgtggcacatccccgatgtgcccgtaagcaagtttgacgggtcaccccgagaaattcccgtgaccgcaacatggactttacaagataattttgataagcacgacacaatgtcgcaatccattatcgactactttagcggactgaaggatggcgccggaaccgcagtggtgacgagcagcgagtatattccttccctcgataagctgatctgcggctgcgaagacggtacaatcattataacacaagcactgaatgcggctaaggctcgcttgctggaaggtggcagtctggtgaaagattcccccccacacaaagtactcaaggggcatcaccagagtgtcaccagcctgctatacccccatgggctatcctcaaaactggaccagtcttggatgctctcgggtgatttggacagctgcgtgattttgtgggacatctttacagaggaaatcttacacaagttcttcctcgaagcaggacccgtgacaagtctgctgatgagtccagaaaaatttaaacttcggggagagcaaattatttgctgcgtgtgcggcgaccattcagtcgcactcctacacctggagggcaagtcttgcctgctccacgctaggaaacacctattcccagtaagaatgattaagtggcacccagtggaaaactttctgattgtaggctgcgccgatgactcagtgtacatatgggagattgagacgggtaccttggaaaggcacgagactggagagcgcgcccggatcatcctgaactgttgtgacgacagccagctggtaaagagtgtcttaccaatcgcttctgagacgttgaagcataaatcaatcgaacagcgtagctcttccccttaccaactaggaccgctcccctgtccagggctccaggtcgagtcatcctgtaaggtcaccgacgccaaattctgtccgcgtcccttcaacgtgcttccagttaaaaccaagtggtccaatgtggggttccatatcttgttattcgacctggagaatctcgtggaactattgctgcccacacctctgtccgacgtcgactcctcgagctcattctacgggggcgaagtcctcagaagggcaaagtcaacagttgaaaaaaagaccctgactttgcgaaaaagcaaaactgcctgcggtccactatccgccgaggccctagcaaaacccataacagaatccttggcacagggggacaatactatcaagttttccgaggagaatgacggcatcaaacgccaaaagaagatgaagatcagcaagaagatgcagcccaaaccttctcgcaaggtagacgcctccctgacaatagacacagccaaactgttcctgtcctgtctgctcccctggggagtcgataaggatcttgactatctgtgtataaaacatctaaacattctgaagctgcagggcccaatcagcctggggatctctctgaacgaggacaatttttcattaatgctgcccggctgggacttgtgcaactccggcatgatcaaggattatagcggagttaacctttttagtcggaaagtcctcgatctgtctgacaagtatactgccacactgccaaaccaggtcggcattccgcgcggcttggaaaacaattgcgatagcctccgagagtcagacaccattgtatatttattgtcacgactgtttttggtgaataaactggttaatatgccactggagctggcatgtcgggtcggcagcagtttccgcatggaatcgatacataacaagatgagaggcgccggaaatgatattctgaatatgtcctccttctactcttgcctccgtaacggcaagaacgagtctcacgttccagaggctgacctatcgctgctcaagctgatttcctgttggagggaccagagcgtgcaggtgactgaggcaatccaggccgtcctgctcgccgaagttcaacagcatatgaagtcactgggtaaaatccccgttaacagccagcccgtctccatggccgagaatggtaattgcgaaatgaagcagatgttacccaagttggagtggaccgaggaattagaacttcagtgcgtgcggaataccttgcctctgcagacaccagttagtcccgtcaaacacgattctaatagcaattctgcaaactttcaggacgtggaagacatgccggaccgatgcgcactcgaggaatccgagtccccgggtgagcctcgacatcactcttggatcgctaaagtttgcccttgtaaggtctcctag

SEQ ID NO: 211438 - DNA, 2328 bp, synthetic construct
  misc_feature 1..2328: note = Description of Artificial Sequence: Synthetic coding sequence
  source 1..2328: mol_type = other DNA
atgcggaccagcctgcaggccgtggccctgtggggccagaaggccccaccccattccatcactgcaattatgatcacggacgaccagcggactatcgtgacaggttcccaggaagggcaactgtgcttgtggaacttgtcccatgagctgaaaatttctgcgaaggaattactatttggccattccgcctcagtgacttgtctcgcccgtgcccgcgacttctccaaacaaccatacatcgtctctgcagcagagaatggcgagatgtgtgtctggaacgtgaccaacggacagtgcatggaaaaggccaccctgccatacaggcacactgctatttgttactaccactgctccttccgcatgacaggagaggggtggttgctgtgttgtggagaatatcaggacgtcctgatcattgacgccaagacgttagctgtcgttcactcattccggtcgtcccagttccccgactggattaattgtatgtgcatcgtgcactcgatgcggatccaggaagatagtctgctggtggtctccgttgccggagagctgaaggtctgggatctctcatcatcgatcaatagtattcaggaaaagcaggatgtctacgaaaaagaatctaaattccttgagagcctgaattgccagaccatccgattttgcacctataccgaaaggctgttgcttgtagtcttctcaaagtgttggaaagtgtatgattattgcgacttctcgcttctgctcaccgaagtgtcccggaatggccagttttttgcaggtggggaggtgattgcagcccatagaatacttatctggaccgaggacgggcattcttacatataccaattattgaatagcggtttaagcaaatcaatctacccagctgatggacgggtgttgaaagaaactatttatcctcacttgctgtgcagcacatcggtccaagagaataaagaacaatctcggccttttgtgatgggttatatgaacgagaggaaggaaccattctacaaagtgctgtttagtggcgaggtatctggccggatcactttatggcatattcctgacgtacctgtcagcaaatttgacggctcgcctcgtgaaattcctgttaccgccacatggactctgcaggacaatttcgataagcatgatactatgtctcagagcattattgactacttttcgggactgaaggacggggctggcacagccgtggtgacttcatctgagtacattccatcacttgataaacttatctgcggctgtgaggacggcaccataattatcacacaggcgttgaacgccgctaaagcgcggttgctggagggggggtccttggtgaaggactcgcctcctcacaaggttctcaagggccaccatcagagcgtgacaagcctattgtatcctcatggactgagcagcaagctcgaccagagttggatgctgagcggcgacctggattcttgcgtgatcctgtgggatatcttcacagaagaaattctgcataagttcttccttgaagctggccccgttacctccctgctgatgtccccagagaagtttaaactacggggcgaacaaatcatctgttgcgtttgtggagatcatagcgtggcactactgcatttagagggcaagagttgtctgctccacgccaggaagcatcttttcccagtaagaatgatcaagtggcaccccgtggaaaatttcttgatagtgggatgcgcagatgattctgtttacatctgggagatcgaaacagggacactcgaacgccatgagaccggggaacgagccagaattattctgaactgttgcgacgactcgcaattggtgaagagcgtgttacccattgcctcagaaaccttgaagcataagtctatcgagcagaggtctagcagtccttaccaactgggaccactgccttgccctggactgcaggtggaaagctcgtgcaaagtgaccgatgcaaagttctgcccacgcccattcaacgtactgcccgtgaaaaccaaatggagcaacgttgggttccacatcctactgttcgatctcgaaaacttagtggaacttcttctgcctacacccttatcagacgtagattcctcttcatccttttatggcggggaggtgctgcgccgcgccaagtctaccgtcgaaaaaaaaacactgacactgagaaaatctaagactgcttgcggaccattgtcagcggaagctttggctaagccgatcaccgagagcctggcccagggagacaatactataaaattctcagaggagaatgatggcattaagagacagaaaaagatgaaaataagctag

SEQ ID NO: 211439 - DNA, 1119 bp, synthetic construct
  misc_feature 1..1119: note = Description of Artificial Sequence: Synthetic coding sequence
  source 1..1119: mol_type = other DNA
atggagcccgcccccagcgccggcgccgagctgcagccccccctgtttgccaacgcctctgatgcgtacccctcggcctgcccctccgcgggggcgaacgcctcaggaccgccgggtgcaagatcagcgtccagtctggcactcgctatcgccatcactgccttgtattccgccgtttgcgccgtgggactgctgggcaacgtgctcgttatgtttggcattgtccggtacacaaagatgaagaccgccacgaacatttacattttcaatctggccctcgcggatgctttagccacctcaacactcccgttccagtccgccaagtatcttatggaaacctggccgttcggcgaactcctgtgcaaggcagttctttcaatcgactattacaatatgttcacgtcgatcttcactctgacaatgatgagcgtcgaccgctatatagcagtctgccaccccgtcaaggctctggactttcgaaccccagccaaggcgaaactgataaatatatgcatctgggtgcttgcctctggagtgggcgtgccgattatggtgatggcagtcactagacctagagatggcgccgttgtatgtatgctgcaattcccctcaccctcctggtactgggataccgttacgaaaatctgtgtgttcctcttcgccttcgtggtccccatccttatcatcacagtgtgctacgggttgatgctgctgaggcttagatcagtaagactactctccggctccaaagaaaaagatcggtccctgcgcaggatcactagaatggtgctggttgtggtgggcgcatttgtggtgtgttgggcaccgatccacatctttgtcatcgtgtggacgttggtagatatcgatagacgagaccccctggtggtggccgccttgcacctttgcatcgcacttggctacgccaatagcagccttaaccccgttctctacgcctttttggatgagaattttaagaggtgcttcagacagctgtgccggaagccatgcggcagacccgaccctagttccttctccagggcccgggaggctaccgcaagggagcgggtcaccgcctgtaccccctctgacggtccgggcggaggggcagctgcctag

SEQ ID NO: 211440 - DNA, 837 bp, synthetic construct
  misc_feature 1..837: note = Description of Artificial Sequence: Synthetic coding sequence
  source 1..837: mol_type = other DNA
atgcggaaggagacccccccccccctggtgccccccgccgcccgggaatggaatctgcccccaaacgcccccgcctgtatggaaagacagttagaggcagcccgttaccggtccgacggagctttgctgcttggagccagttccttgagtggccgttgctgggcgggttctctgtggctgttcaaggacccatgtgccgcgcccaatgaaggattctgtagtgcgggcgtacagacagaggccggcgtggctgacctcacatgggtgggtgagagaggtattctagtcgcgagcgacagcgcgcatgctgcccaggtgacatgcgtggctgcttcgccacacaaagatagtgtttttctgagttgctccgaggacaatcgcatcttattgtgggatacaagatgccccaagccagcaagccaaattggttgctctgcgcccggctacctgcccaccagcctggcttggcacccacagcaatcagaggtttttgtcttcggggatgagaatggaacagtgtctctcgtggacaccaagtccacatcttgcgtgttaagtagcgctgtacactctcagtgtgtcaccgggctcgtgttcagcccacattcggtcccattcctggcgtcacttagtgaggactgctccttagccgttttggattcttctctgtccgagctcttcaggtcccaggcccacagagactttgtgcgagacgcaacttggtccccactgaatcattcattgttgaccacagttggttgggatcaccaagttgtacaccacgtggtccctactgaaccattgcctgcgccagggcccgcttcagtaaccgagtag

SEQ ID NO: 211441 - DNA, 876 bp, synthetic construct
  misc_feature 1..876: note = Description of Artificial Sequence: Synthetic coding sequence
  source 1..876: mol_type = other DNA
tgatgcgccgcccccaacgagggcttctgcagcgccggcgtgcagacagaagccggggtcgccgacctaacttgggtgggggaaagggggatcctagtagcgtccgactccggcgctgttgaactgtgggagctcgacgaaaatgagacactgattgtgtctaagttttgcaaatatgagcatgacgatatcgtgtcaacggtgtccgtcctgtcctccgggactcaggccgtatctggctcaaaggacatctgtatcaaggtgtgggatttagcacagcaggtggtactgtcctcgtatcgggctcatgcagcccaggtgacttgtgtggcagcctccccgcataaggatagcgtgtttctcagctgttcagaagacaaccgcattttattgtgggacacacgatgccccaaacccgcctcacagattgggtgttctgccccagggtatctgcctacatctctggcctggcaccctcagcagtccgaggttttcgtttttggcgatgagaatgggactgtgagtctggtcgataccaagagtacctcatgcgttctgtcatcagccgtacattcccagtgtgtgacagggctggtgtttagccctcataggctcgatctcagccagccaagtccccccagtgactccgtcccatttctagcctcccttagcgaggactgcagtctcgcggtgctggactcctctctcagcgagctctttcggtcacaggcccatcgtgacttcgtgcgcgatgcgacatggtctcccttgaatcactccctactaaccactgttgggtgggatcaccaagtcgttcaccacgtggttcccactgagcctctgccagccccaggccctgcctccgtcactgaatag

SEQ ID NO: 211442 - DNA, 942 bp, synthetic construct
  misc_feature 1..942: note = Description of Artificial Sequence: Synthetic coding sequence
  source 1..942: mol_type = other DNA
atgaagctgaccgacagcgtgctgcggagcttccgggtggccaaggtatttcgagagaattcggataagatcaattgtttcgacttctccccgaatggcgagacggtgatctcttcatcagatgatgacagcattgtgttatacgactgtcaggagggcaagcccaaacggaccctctacagtaaaaaatacggtgtggatttgatcaggtacacccacgccgccaatacagtcgtgtacagttccaacaagatcgatgataccatacggtatctgagtctccatgataacaagtatatcaggtactttcctgggcatagtaagcgcgtggtggccttgtcaatgtcgcccgttgacgacacctttataagcggcagcttggataagactatacgcctttgggacctgcgctcccccaattgccaggggctgatgcacttgcagggaaaacccgtgtgcagcttcgaccctgagggcctgatcttcgccgcgggagtgaatagcgagatggtaaaactttatgacctgaggtcgtttgataagggcccattcgccacttttaaaatgcagtacgatagaacatgcgagtggacaggcctcaagttttctaatgacggaaagctgatccttataagcacaaacggctcttttatcaggctgatcgatgcctttaagggagtggtgatgcatacctttggagggtacgctaattctaaggcggtcaccctggaagctagtttcactcctgactcccaatttattatgattggctcggaggatggcaagattcacgtgtggaatggagaaagcggcatcaaagtggccgtactcgacggcaagcatactggaccaattacttgtctgcagtttaaccccaaatttatgacattcgctagtgcgtgctccaacatggctttttggcttccgactatcgatgactag

SEQ ID NO: 211443 - DNA, 1359 bp, synthetic construct
  misc_feature 1..1359: note = Description of Artificial Sequence: Synthetic coding sequence
  source 1..1359: mol_type = other DNA
atgatgggctgcttcgccctgcagaccgtggacaccgagctgaccgccgatagcgtagagtggtgccctttacagggatgccgtcacctgttggcatgcggaacttatcagttgagaagaccagaggatagacccgctggaccacaaaacaaaggggggatggaggttaaggagcctcaagtgcgactcggcaggctgttcctctatagcttcaacgacaataactcaattcatccactagtggaggtgcagcggaaggatacttctgcaattcttgacatgaagtggtgccacattcccgttgcaggccacgcgctgcttggactggccgatgcctcaggatcaatccaactccttcggttagttgagagcgaaaagtcacatgtcctcgagccactctcctctcttgcattggaggagcaatgtttggctctgagtctagactggagcacgggtaagaccggccgggcgggcgatcagcctctaaaaatcatatcaagtgacagcaccggacagcttcaccttctcatggttaacgaaacaagacctagactccagaaggtcgcatcgtggcaggctcaccaattcgaagcttggatcgcagccttcaactactggcaccccgaaatcgtgtactccggcggagacgatgggttgctccggggatgggataccagagtgcctggtaagtttctttttaccagtaagcggcacacaatgggggtgtgcagcatccagagtagcccacaccgtgaacacattttggccaccggctcctacgatgagcacattctactgtgggatacacggaacatgaagcaaccactcgccgacacgcctgttcaggggggtgtgtggcggatcaaatggcatccctttcatcaccatctgctcctcgctgcgtgcatgcacagcggatttaaaatcctgaactgccagaaggccatggaggaacgccaggaggctacagttctgacttcccatacactccccgactcccttgtgtatggcgctgattggagctggctcctgttccgcagcctgcagagggccccatcctggtcgtttccttcgaacttgggaaccaagactgcggacttaaagggggcaagtgaattgccaactccttgtcacgaatgccgggaggataacgacggtgaaggccatgctcggccccagtccggtatgaagcctcttaccgagggcatgcgtaaaaacgggacctggctgcaggccactgccgccacgacaagggattgtggagttaatcctgaggaggcggactccgccttcagcctgttggccacatgcagcttctatgaccacgccttgcatctgtgggagtgggagggcaactag

SEQ ID NO: 211444 - DNA, 1074 bp, synthetic construct
  misc_feature 1..1074: note = Description of Artificial Sequence: Synthetic coding sequence
  source 1..1074: mol_type = other DNA
atgagcgccttcgagaagccccagatcatcgcccacatccagaagggatttaactacacagtatttgactgcaagtgggtgccctgttccgctaaattcgttaccatggggaattttgccagagggacaggagtaatacaactatacgagatacagcacggggatctgaagctcctgagggagatcgagaaggctaagcctatcaaatgcggcacctttggtgccacctcactgcaacagcgatacctcgccactggtgactttgggggcaacctacacatttggaatctcgaagcacccgaaatgcccgtctattcagtcaaaggccacaaggaaataattaacgccattgatggaatcggcgggctagggattggcgagggagcaccagagatcgtgacaggcagtcgggacggtaccgtaaaggtctgggaccctcgtcagaaagatgaccctgttgcgaatatggagccagttcagggggagaacaagagagattgttggaccgtcgccttcggcaatgcatataaccaggaggaacgggtcgtgtgcgctgggtacgacaacggcgatatcaagctgtttgacttgcgcaacatggctcttaggtgggaaacaaacattaagaacggagtctgtagcctggaattcgaccgcaaggacatttctatgaacaaactcgtggctacaagtttggagggaaagtttcacgtctttgatatgcggacgcagcacccaaccaaaggattcgcatcagttagcgaaaaggcccacaagtccacagtgtggcaggttagacacctaccacagaaccgagaacttttcctgaccgccggcggggctgggggtctgcacctgtggaagtatgaatatccgatccaacgttcgaagaaggactctgaggggatagaaatgggagtagctgggagcgtgagcctgctccagaatgtgactctcagtacccagcccatatcatccctggactggagtccggacaaacgcggtttgtgcgtctgctccagttttgaccagacagtccgggtcctcatagtcacaaagctcaacaagatttag

SEQ ID NO: 211445 - DNA, 867 bp, synthetic construct
  misc_feature 1..867: note = Description of Artificial Sequence: Synthetic coding sequence
  source 1..867: mol_type = other DNA
atgagcgccttcgagaagccccagatcatcgcccacatccagaaggggtttaattacaccgtatttgactgtaagtgggtgccctgtagcgcaaaatttgttacaatgggcaacttcgctcgcggaaccggggttattcaactgtatgaaatccagcacggagaccttaaactgctccgggaaattgaaaaagcgaaaccaattaaatgcggcacattcggcgccacctcgctccaacaacggtatctagccaccggggatttcggaggcaaccttcacatatggaatttggaggctccagagatgccggtatattctgttaaaggccataaggaaataattaatgcgattgatggcattggagggttaggcatcggcgaaggcgcccctgaaatcgttactgggtcgagagacggcaccgtgaaggtttgggaccccagacagaaggacgacccagttgccaatatggagcccgtccagggagaaaacaagcgagactgctggacagtggcctttggaaacgcgtacaatcaggaggaacgggttgtctgcgcagggtacgacaacggggatatcaagctgtttgacctgaggaacatggccttgcggtgggaaaccaacattaagaacggcgtttgtagcctcgagttcgataggaaggatatctcaatgaataagttagtggccaccagcctcgaaggcaagttccacgtgtttgacatgcgaacacagcatccaaccaaggggtttgcgtcggtatcagagaaggctcacaaaagcaccgtctggcaggtaagacacctgccgcagaacagagagttgttcctgacagctggcggggccgggggtcttcacctgtggaaatag

SEQ ID NO: 211446 - DNA, 3816 bp, synthetic construct
  misc_feature 1..3816: note = Description of Artificial Sequence: Synthetic coding sequence
  source 1..3816: mol_type = other DNA
tgacgggacttccagagcgaggtgctgctgagcgccatggagctgttccatatgactagtggaggtgatgccgccatgttccgagatggtaaggagccgcaaccttccgccgaggcagccgctgctccttccctagccaacattagctgctttacacagaagcttgttgagaagctttatagtggcatgttctccgccgacccgaggcacatcctcctgttcatattggagcacatcatggtggtaatcgagactgcgagctctcagagggacactgtgctgagtaccctgtacagttctctgaacaaagtgatcctctattgcctctctaaacctcagcagtcactttctgagtgcctcggcctgttgtccatacttggcttcctgcaagaacactgggatgtggtttttgccacgtacaacagtaatattagcttccttctatgcttaatgcattgcctgctgctccttaacgagcggtcctaccccgaaggattcgggctcgagcccaagccaaggatgtcaacgtaccatcaggtttttctgtctccaaatgaagacgtaaaggagaagcgcgaggatctcccaagtcttagtgatgtgcagcacaacatccagaagacagtgcagacgttatggcaacaattggtggcacagcggcagcagaccttggaagacgcatttaaaatcgatttgagcgtcaaaccaggagaacgcgaggttaagattgaagaagtaaccccactgtgggaggaaacgatgctcaaggcttggcagcactacttagcgtctgagaagaaatccctcgcctccaggtcgaatgtggcacatcactctaaggtgacactctggagtggctcgctgagctcggctatgaagctcatgcctggtcggcaagcgaaagatcccgaatgcaagacagaagacttcgtcagttgcattgagaactatagaagacggggacaggagctctacgcgtcgctttacaaggaccacgtccagcggaggaaatgtggaaacattaaggccgccaatgcgtgggcaaggatccaggagcagctgttcggtgagctcgggttgtggagtcagggggaggagacaaaaccttgcagcccttgggagctggattggcgcgagggaccagctcgcatgcgaaagcggattaagaggttaagtcctttggaagccctcagctctggcagacataaggagagtcaggacaagaatgaccatatcagccagacaaatgcggagaaccaagatgaactcacactgagggaagcggagggcgagcccgacgaagttggcgtggattgcacacagctcaccttctttcctgccttacatgaaagcctccactcggaagattttttggagttgtgccgcgagcgtcaggtcatactgcaggaacttctggataaagaaaaagttacgcaaaagtttagtctggtcatagtgcagggacacctggtgtcggagggggttttactcttcgggcaccagcacttctacatttgtgaaaacttcactctgagcccaaccggcgacgtctattgcacccgtcactgtctatcaaatatcagcgatccctttattttcaatctgtgttcaaaggaccggagcacagatcactacagctgccagtgccactcatatgcagacatgcgggagttacgccaagctcgctttttactacaagacatcgcccttgaaatcttctttcacaatgggtactccaagtttcttgtgttttataataacgaccgaagcaaggccttcaagtccttttgcagcttccaaccgtctctgaaagggaaggccacttctgaagacacactgtccctgcgccgctacccggggtccgatcggataatgctgcagaagtggcagaaacgagacattagtaacttcgagtatcttatgtatctcaataccgctgctgggcggacctgcaacgactacatgcagtaccccgtgttcccttgggttctggctgattacacaagcgagaccttgaacctggcaaacccaaaaatcttccgggacttgtccaagcccatgggcgcacagactaaagagcgaaaattaaaattcattcagcgattcaaggaagtcgaaaagaccgagggggatatgaccgtccagtgtcactattatacccactattcctccgccattatcgtggcctcttacctggtgcgcatgcccccgtttactcaggctttttgtgcgctgcaaggtgggtcctttgatgtggccgaccgcatgtttcacagcgttaagagcacatgggagtccgcaagtagagaaaatatgtctgatgtgcgcgaactcacacccgaattcttctacctgcctgagttcctcaccaactgtaatggggtcgagtttgggtgcatgcaagatggtaccgtgttgggggacgtgcagcttccaccttgggctgacggggaccccagaaaattcatttctctacatcgcaaagccctggaatcagattttgtgtccgcgaacctacatcactggatagatctcatcttcggctacaagcagcagggccccgccgcagtggacgctgtcaacatcttccacccctatttttacggagatagaatggatctgtcgtccatcaccgaccctctaattaagtcaacaatactgggattcgttagtaacttcggccaagtacccaaacagctctttaccaaaccacatcccgcccgcaccgccgctggaaagcctctgccaggcaaagacgtgtcaacgcctgtgagtctccccggtcaccctcagcctttcttctacagcctccagtcactgagaccttcacaggttactgtaaaagatatgtatctgttctccctcggaagcgagtcgcccaagggagccatcgggcatattgtctctacggagaaaaccatcctcgccgttgagcgcaacaaggtactcctcccacccttgtggaaccggacgttctcctggggttttgatgattttagctgttgcttggggagctatgggtctgataaggtcctgatgacgttcgaaaatctcgccgcctggggacgctgtctctgcgctgtgtgtccctccccaacaacaattgtgacctccggaacttctactgttgtatgtgtgtgggagctgtctatgacaaagggtcggccccgcggcctgagactgcggcaagccctatatgggcacacacaggcagtcacttgtttggctgcaagcgtcacattttctctgctggtgtctggcagccaggactgcacatgcattctgtgggatctagaccacttgacacatgtgacacggctcccagcccatcgtgaagggatcagcgcgatcaccatcagcgatgtgtccggcacaattgtttcgtgcgcaggcgcccacctgtctctatggaatgtgaacggccagccccttgcctccatcactaccgcttggggacccgagggcgcgatcacctgttgttgtctgatggagggccctgcttgggatacatcccagatcatcataaccgggtcccaagatggcatggtccgcgtctggaagacagaggacgtgaagatgtctgtccctggtagacctgctggagaggagcctcccgcccagcctccgagtccccgcgggcacaaatgggagaagaatcttgccctatctcgggagctggacgtgtctatagctcttaccgggaaacctagtaaaacatcaccagccgtgacagccctggccgtgtctcgcaaccacaccaaactgctggtgggtgacgagcggggtaggattttttgctggagcgctgacggttag

SEQ ID NO: 211447 - DNA, 6804 bp, synthetic construct
  misc_feature 1..6804: note = Description of Artificial Sequence: Synthetic coding sequence
  source 1..6804: mol_type = other DNA
tgaaagctggccagccaggccatcgagcccgacgtgctgcggcagttcctaggactgggcatcccaagcagcttgtccgcaactaccaagattctagactcctcccatacccatcgaggcaatccaggatgctccggctcccaaactgcgcaggggctcgcagagggcccatggcccgcagctcctgacgctgggctgcacccaggcgtaacacaagccccccaacctctcggagaaagtcaggactccacaaccgcgttgcaaacagctctcagcctcataagtatgaccagccctaggaatcttcagccccagcgggcggcactcgcaccaagtttcgtggagttcgacatgtctgtggaggggtacggatgtctgtttattcctaccctcagcaccgttatgggcacgagtacagaatactctgtgagtggcggcattgggaccggtgcgactcgtccttttccacctccagggggactgacctttagttgttggtttctcataagccgacatggggccgctactgagggccacccattacgattcctgactctggtgagacacctggcgcgaaccgaacaaccttttgtctgtttcagtgttagcctgtgccctgatgacctgagcttggtggtgtcgacagaggagaaagaattccagccactggatgtaatggaaccagaggatgactccgaaccatccgccggttgtcagctccaggtgagatgtggacagctattggcttgcggacagtggcaccatctggcagtggttgtcaccaaggagatgaagcggcactgtactgtttctacctgtctggacggacaggttatcggaagcgccaagatgctatatatccaggcactccctggcccatttttaagcatggatccttctgcctttgtggatgtgtacggatatatcgcaaccccaagggtctggaagcaaaagagcagtcttatctggagactgggaccaacttatttatttgaggaggccatctctatggagactctggaagttattaacaaacttggaccaagatattgtggcaatttccaggctgtgcacgtgcagggagaggacctagatagcgaggcgaccccattcgtcgcagaagaaagggtttcctttggactccacatagcctctagtagcatcacgagtgtagcagatatccgtaatgcttataacgaggttgattcccggctaatcgctaaggagatgaatatttcctcacgggataacgcaatgcccgttttcctgttaaggaactgtgcagggcatctgtccgggtctctaaggactataggtgccgtcgctgtaggtcagctaggtgtgagggtctttcattcatccccggccgctagtagtctggacttcatcggtggtccggcaatcctgttgggactgatttctttggcaaccgatgatcatacaatgtacgccgccgtgaaagtgctccactctgtactgacttccaacgcaatgtgtgactttctcatgcaacatatctgcggataccagatcatggcctttttgctgcggaagaaggctagtctcctgaatcacaggatttttcagttgattctctcagttgctgggaccgtcgaactgggttttcgaagcagtgcaatcaccaataccggagtcttccagcatattctgtgcaatttcgaactttggatgaatacagcagataatcttgaactatccctattttcccaccttctggagatactgcagtcgcctcgtgaggggccccgcaatgctgaggcagctcatcaggcccagctgataccaaagctgatctttctgtttaacgagcccagtctgatcccaagcaaaattagcaccatcattgggattttggcttgccagctcagaggccacttttctacccaagatctactgcgaattggactgttcgtcgtctatactctgaagcccagttccgttaacgagcggcagatttgcatggatggggccctcgatccgtccctgccagcggggagtcagactagtggcaagacaatctggctgaggaaccagttgttggagatgctcctttcagtgattagctcacctcagctccacctgagcagtgagtccaaagaggaaatgtttctgaaactcgggccagactggtttctgctcttgctgcaggggcatcttcacgcgtcgactacagtcctggcacttaagctgctgctgtactttctcgccagtccctctctaaggacgagatttcgggacggtttgtgcgccggcagctgggtggaaagatctaccgagggtgtcgacatcgtgatggacaacctcaagagccagagtccccttcctgaacagagcccgtgcctgcttcccggtttcagggtcttgaatgatttcctcgcccaccacgtccacattccggaagtttacctgatcgtctccacctttttcctccaaacgcctctcaccgagctcatggatggcccaaaagattcccttgatgccatgcttcagtggctgctccagcgacatcatcaggaagaggtgttgcaggccgggctgtgtaccgaaggagctctgctgttactggagatgctcaaggctacaatgtcccagccactggctggcagcgaagatggcgcgtgggctcagacttttcctgcctctgtgttgcagttcttgagcctggtccaccggacctacccacaggacccagcttggagggctcccgagtttttgcaaacgcttgcgatcgccgccttccccttgggtgctcagaaaggtgttggcgctgagagtaccaggaacactagcagtcccgaggcagctgccgagggtgatagtacagtagaagggttgcaagcccctactaaagcccacccagctcgaaggaagctgagggaattcacacagctcctactgagagaactccttctgggagccagctcaccaaaacagtggcttcctctggaggtgctgcttgaggcgtctcctgatcacgctacaagccagcagaaaagagacttccaatccgaagtcctgctgtccgcaatggaacttttccatatgactagtggtggagatgcagcgatgttccgtgatgggaaggagccacagcccagcgccgaagccgctgccgctccttccttagcgaacatctcctgctttactcagaaactagtggagaagctctactccggtatgttttcggcagacccccggcacattcttctgtttatcctggaacacattatggtggtgatagaaaccgcgagctctcaaagagatactgtactgtcaactctctactcttctctcaacaaagtcatcctctactgcctgagcaagcctcaacagtcactgagcgaatgtctgggtctgctgtcaattttaggatttctgcaagagcattgggatgtagtctttgccacatacaactccaacatcagcttcctcctgtgcctcatgcactgcctgctgttactcaatgaacgcagttaccccgagggatttggactggagcccaagccacggatgtcaacgtatcaccaagtttttctgtcacccaacgaagatgtgaaggagaagcgggaagacttacccagcctcagtgacgtgcaacacaatatccagaagacagtgcagaccctttggcagcagctggtcgctcagcgccagcaaacacttgaagatgccttcaagatcgacctgagcgtgaagcctggagaacgcgaagttaaaattgaagaagtgacgcccctgtgggaggagacgatgctgaaggcctggcagcactacctggcaagcgaaaagaagtctttggcatctagaagtaatgttgcgcaccatagtaaggtgaccctgtggagcggcagcctctcctccgccatgaagttgatgcccggtcggcaagcgaaggacccagagtgtaagaccgaggattttgtatcatgtattgaaaattacagaaggcgtggccaggaactgtatgcaagtctgtataaggatcacgtccagcgccgcaaatgcgggaacattaaggccgctaacgcctgggcacggattcaggagcagctctttggagagctcggactttggtcccagggcgaagaaaccaagccatgttccccttgggagctggattggagagagggtcctgcgcgcatgaggaagagaatcaagaggctgtcaccactggaggctctgtctagcggtcgacataaagagtcccaggacaaaaatgatcacatctcccagacaaatgccgaaaatcaggatgagttgaccttgcgagaggccgaaggggagccggacgaggtcggcgtagactgcactcagctaactttttttccggccctgcacgagagcttgcattcagaagacttccttgagttgtgtcgcgagcgccaggttattctgcaagagctgcttgataaagaaaaagtgactcagaaattctcattagtcattgtccagggccatttggtgagcgaaggtgtgctactcttcggtcaccagcacttctacatatgcgaaaattttacgctctctcccaccggtgatgtatactgtacccgtcattgtttaagcaatatatccgatcccttcatctttaatctttgctccaaggaccgctcaactgaccactactcgtgccagtgtcatagttatgccgatatgcgggaactcagacaggcacggtttctcctgcaggatatagccctcgagattttctttcataacggatattcgaagtttttagtgttctataataatgaccggtcaaaggcctttaagtccttctgtagcttccaaccgagccttaagggaaaagctactagcgaagacaccctgtccctgaggcggtatcccgggtccgatcgaatcatgctgcaaaagtggcagaagcgggacatttcaaactttgagtacctcatgtacctcaatacggctgccggacgaacatgtaacgactacatgcagtatccggtttttccttgggtgctggcagattatacctctgaaactttgaatcttgccaaccctaagatttttcgtgatctgagcaagccaatgggagcacaaacaaaagaaagaaagttgaaatttattcaacgctttaaagaggtcgaaaagactgaaggcgacatgactgtgcagtgtcactattacacccattactcaagtgccatcatcgtagcctcttatttggtgaggatgccaccattcacacaagccttttgtgcgttacaagggggtagcttcgacgtcgctgataggatgtttcatagcgttaagagtacatgggaatccgcctctcgcgagaacatgtcggatgtcagggagcttacacccgagtttttttatctgccagagttcctcactaactgcaatggcgtggaatttggttgtatgcaggacggtacagtgctcggtgacgttcagctcccgccatgggcagatggtgaccccagaaagtttattagcctccaccggaaggccttggaatccgatttcgtgtccgctaacctgcatcactggattgatctcattttcggttacaaacaacagggcccggcagccgtggacgcggtcaatatctttcacccatatttctacggtgaccggatggatctctcgtctatcaccgaccctctgattaagagtaccatcctcggctttgtttctaatttcggtcaggtccctaaacagctgttcaccaaaccccaccccgcccgtacagccgcaggaaaacccctgcctgggaaagacgtgagtacgccagtgtccctgcctgggcacccccaaccattcttctactcacttcaatccctcagaccatctcaggtcacggtaaaagatatgtacctcttctcacttggctcagagagcccaaaaggagccattggccacattgtgtcaacagagaagaccatccttgcggttgagcggaacaaggtactgcttcctccgctctggaaccgaaccttcagttggggcttcgacgacttctcgtgttgtttgggctcgtatggttccgataaagtgttgatgacattcgagaatctggctgcgtggggccggtgtctctgtgcagtgtgcccatctcctacaacgatagtgaccagtggcaccagtaccgtggtctgcgtgtgggagctgtcaatgacaaaaggtcggcccaggggactgcgcctacggcaggctctgtacggccacacccaagcagtgacatgtctggcggccagtgtcacattcagtttactggtctcaggctcacaggactgcacctgcatcctgtgggatttggatcacctgactcacgttactcggctgccagcgcatagagaaggaatatcggcgattaccatcagcgatgttagtggcaccatcgtgtcctgtgccggagcgcacttgtccctgtggaatgtaaatggccaacctctggcctccattaccactgcttgggggcccgagggtgcaattacatgttgttgtctcatggagggacctgcttgggacacgagtcagattataattaccgggagtcaggacgggatggtgcgcgtgtggaaaacagaggatgtcaaaatgtccgtaccaggtctccagatgggcaggaagcgggaggcggcagaggccctcgcgcagcagtgccaggcggaaggcggcagaggtgactggggcctttctagtgcctaccgcagaaatcctcaaggccttctgccccacagtagccaaggtagagcatcaggcaaccacagttctgcagcccagccgtccccgtggccaatgggactactgtag

SEQ ID NO: 211448 - DNA, 9555 bp, synthetic construct
  misc_feature 1..9555: note = Description of Artificial Sequence: Synthetic coding sequence
  source 1..9555: mol_type = other DNA
atggaggccgaggacctgagcaaggccgaggaccggaacgaggacccagggtccaagaacgagggacagttagctgccgttcagcccgatgtgccacacggcggtcagtcctcatcaccaacagcattgtgggacatgctagaacggaagttcctggaataccaacagctaactcataagtcacctatcgagcggcagaagagcttactcagcctgctgcctctgtttcttaaagcgtgggagcattctgtcggcatcatttgctttccgtcattgcagcgactcgcagaagacgtctccgatcaattggctcagcaattgcaaaaggccttggttgggaagcctgccgaacaggccaggctggcagctggacagctgctctggtggaaaggcgacgtcgatcaggacggatatctccttctcaagtcagtttatgtactgacggggaccgacagcgagaccttgggacgcgtagctgagtcaggcttacctgctttgctgctgcagtgtctgtacctgttctttgtctttcctctggacaaagacgaactccttgagtcagacctccaggtgcagaagatgttcgtgcagatgttactgaacatatgctccgattcacagggcttggaggggcttttatccgggagcgagttgcagtctctgctcattgctactacttgtttgcgcgagcatagctgttgtttctggaaggagcccaccttttgtgtattacgggccatctctaaagctcagaacctctcaatcatccaatatctgcaggccactgactgtgttcgcctgtcccttcagaatttgtctagactgaccgatacattgcctgcaccagaagtgagcgaagctgtgtccctaatcctgggatttgtgaaggactcttaccccgtttcctcggctttatttctggaatttgaaaatagcgaaggttatcccctacttctgaaagtcctattgcggtatgacggactaacgcagtctgaggtagacccccaccttgaggaactcctcggcttagtcgtttggctgaccacatgcggcaggagcgagttgaaggtgtttgattcaattacctaccctcagctcgagggattcaaatttcatcatgaggctagcggggttacagtgaagaaccttcaggccttccaagttttgcagaatgtcttccataaggcctctgattccgtgctctgcatacaagtactctctgtgattaggacaatgtgggcctggaatgctcggaactttttcctcctcgaatggactttacagccaatttcccagtttgttgaaataatgcccctgaagcctgcgcctgtacaagagcacttctttcagctgttggaagccctggtgtttgagctccactacgtgccacacgagatactgcgcaaggttcagcatctcattaaagagtcccctggccccagctgtaccctgatggcgctgcagtctattctgtccatcgctgggggggatccattatttaccgacattttcagggacagtggcctgctaggactgctcctggcccagttgagaaagcaggcgaaaattatgcggaaatcgggcaataaagtctctacccccggagtgcaagaccctgagagagagctgacatgcgttatgctgcgcattgtggtcaccttgctgaagggaagcgtgcggaatgccgtcgtgctgaaggaccatggtatggttccattcataaaaatcttcctggacgacgagtgttacagagaagcgtccctgtctatccttgaacagctcagcgccattaacgccgaagagtacatgagtattatagttggggctctgtgtagtagcactcaaggcgaactgcagctaaagctagacctccttaagagcttgctgcgcattcttgtcaccccaaaggggagagctgctttcagggtcagctctggctttaacgggcttctgtccctgctgtccgatctggagggaagcctgcaggaaccccctctccaagcatggggcgcagtctcacctcgacaaactctggagctggtgctctacacactgtgtgcggtctctgctgccctccattgggatcctgttaacggatacttcttccgcaggaacggccttttcgagaagttagcggaggatctctgcttactgggttgttttggagctctggaagaggagggcaacctgttgagatcttgggtagataccaaagcccggccctttgccgacttgctgggaacagctttctctagtagtggcagtttacctccacgaattcagagctgtctgcagattctcggatttttggattctatggccagtggtaccctgcatcttcgcggagaccttaaagaaagcctgcgtacaaagcagggtcctgttgtggacgtgcagaagggggagacaggcagcgatcctcaacgtaattttaaacaatggccagacctggaggaacgcatggatgaaggagatgccgctatcatgcatcccggcgtggtttgtataatggttaggctattgccacggctatatcacgaagaccacccacagctgtctgaagagatacagtgtagcctggctagccacatccagagtctagtgaaatcagaaaagaatcggcaggtgatgtgtgaagcaggattattggggaccctaatggcgtcatgtcacagagcgctggttaccagtggctcaccactgcactcccgccttattaggatattcgagaagttggccagccaggccatcgaacccgacgtgctacgccagtttttgggattgggcataccctctagtctcagtgctactacgaaaatcctcgatagcagccacactcatcggggaaatcccggctgctctggcagccagacagcccaaggcctcgcagagggaccatggccagcagcccctgacgccggcttgcatccaggcgtaactcaagcaccccagcccctgggagagtcccaggactcgaccactgccttacagaccgcgcttagcctgataagtatgactagccctcgcaatctgcaaccccagcgggcagctctcgccccatcctttgtggaattcgatatgagcgtggagggttacgggtgtctgtttattcccactctcagcaccgtgatggggacatcgaccgagtacagcgtgtccggcgggattggaaccggggccacccggccgttcccacctcccgggggtcttaccttttcttgttggttcttgatcagtaggcacggagccgctaccgaaggccatcccctccggtttctgacactggtaagacatctggcaaggaccgagcagccttttgtatgtttctctgtgtcgctgtgtccagacgatttgtcattggtggtcagcaccgaggaaaaggagttccaacctttggacgtgatggagcccgaggacgattccgaaccctctgcaggttgtcaactgcaggtccgatgcggtcagctgctggcttgcggccagtggcaccacctcgcggtggtggtgacgaaggagatgaagcgacactgcaccgtctctacctgtctggacggccaggtgatagggtccgcaaagatgctctacattcaggcactgcctggcccctttctgtccatggacccaagcgcatttgtcgatgtctatggctatatagctaccccgagggtgtggaagcagaaatcgtctctgatttggcgcctagggccgacctacctctttgaagaagctatctcgatggagacgctcgaggttataaacaaactaggaccccgctattgtgggaacttccaagccgtgcacgtgcagggtgaagatctcgattccgaggccactcccttcgtggctgaagagagggtttcgttcggtctgcatatcgcctcatctagtattacctctgtggcagacattcgaaacgcctacaacgaagtggattctcgcctgatcgcaaaggaaatgaacatatccagccgcgataatgccatgccagttttccttctccggaattgcgctggacacctgtctgggtcacttcgtaccattggtgccgtggcagttggtcagctcggcgttagggtgttccactcttcaccagccgcctccagtctggatttcatcggaggaccagctattctgctggggttgatctcactggctactgatgatcatactatgtacgcagccgtgaaggtactgcacagcgtgttaacctccaacgctatgtgcgatttccttatgcagcacatatgcggctatcagatcatggccttcctgctgcggaagaaagcatcactgctcaatcaccggatctttcagctgattctctctgtggctggcacagtggagctcggctttaggtctagcgcaattaccaatacaggagtcttccagcatatcctctgtaactttgaactctggatgaacaccgccgataatttggagctaagtctgttcagccatctgctggagatactgcagtctccacgcgaaggtccacgaaatgccgaggcggcccatcaggcccagctcattccgaagctcatctttctatttaatgagccaagcttgattccctcgaaaatttccaccattatcgggatccttgcttgccaactgcgcggccatttttcaacacaggaccttttacgaataggcctgtttgtcgtctacacacttaaaccgagctctgtgaacgaaagacagatttgcatggacggagcgttggaccccagtctgcccgccgggtcacaaacttccggcaagaccatttggctgaggaatcagcttctggagatgctcctgagcgtcatttccagcccacagttacacctttctagtgaaagcaaggaggagatgttcctgaaattgggcccagattggtttttattgcttctgcaaggccacctgcacgcgtcaactaccgtcctggctctgaagcttctcctctacttcctggcttcccctagtctcaggactcgattcagagacggcctgtgcgccggctcttgggtggagagatccaccgaaggagtcgatatcgtgatggataacctaaaatcacagtccccactcccagaacaatctccatgcttgttgccggggtttcgggttctaaatgactttctcgctcatcatgtccatattcctgaggtgtatctgatcgtatccacttttttcctgcagaccccattgacggagctaatggacggacctaaggattccctagatgctatgctgcagtggttattgcagcggcaccatcaggaggaggtccttcaggcaggactgtgcaccgaaggcgctctgttactcctcgagatgctaaaggctacaatgagtcagccacttgctggatcagaggatggcgcctgggcccaaacttttcccgctagtgtattgcagttcctttcactggtgcataggacttatccccaggatccagcatggcgcgctcctgagttccttcagaccctggccatagcggcgttcccccttggggcacagaagggagtgggcgcagaaagtacaaggaacacctcctctcccgaggctgccgccgaaggagattctacggtggagggcttacaggctcccaccaaagctcatcctgcgcggcgtaaacttcgggagttcacccaactgttgctgcgagagctcctcctaggggcctcaagccctaaacaatggctgccccttgaagtgctcctggaggcatcgcctgatcatgcaacctctcagcagaaacgcgatttccagtcagaggtgttgctctccgccatggagctgtttcacatgacgtccggaggcgacgctgctatgtttcgggacggcaaagaacctcagccatcagccgaggcggcagccgcaccatcccttgcaaatatcagttgctttacacaaaagctcgttgagaagctgtatagcggtatgttttcggctgatccgcgacatatcctgttgtttattcttgagcacattatggttgtgattgaaaccgcaagttcacagcgggacacggtgttgagcaccctgtatagctcactgaacaaagtcatcttgtactgtctgagcaagccccagcaatctttgtcggagtgtctgggcctcctctcaatcttgggctttctgcaagagcattgggacgtcgtgttcgctacttacaatagcaatatctcgttcttattgtgcctcatgcactgtctccttctgcttaacgagcggtcttatcccgagggatttggccttgagcctaagcctcgcatgtcaacttatcaccaagtgttcctgagtccaaatgaggatgtgaaggagaaaagagaagacctgcccagcttgtcagatgtccaacataatattcagaaaactgtccagaccttgtggcagcagttggtggcgcaaagacagcaaacactcgaagacgccttcaaaatcgatctttcagtcaagccaggcgagcgagaggtgaaaatcgaggaagtaacacctttgtgggaagagaccatgctcaaggcatggcaacactatctcgccagtgaaaagaagagcctggctagtagaagcaacgtcgcccatcatagcaaagtcacactgtggagtgggtctctgtcatccgccatgaaactgatgcctggacgacaggcaaaggatccagagtgtaagacagaggactttgtgtcttgtatcgagaattaccgccgaagggggcaggagttgtacgctagcctgtataaagaccatgttcagcgtcgcaaatgcggcaacataaaggcagctaacgcctgggcgcggattcaggaacagctcttcggggagctgggtttgtggtctcaaggagaggagactaaaccttgctctccctgggagctcgattggcgcgagggccccgccagaatgcgcaaaaggatcaaaaggctgagtccactcgaggcactctcatctgggcggcacaaagaatcccaagacaagaacgatcacatctcccaaaccaatgctgagaatcaagacgagcttacccttcgggaagcagaaggggagcccgacgaggtcggcgtcgattgcactcaactgaccttcttccccgcattacacgaaagcctgcacagtgaggatttccttgagttatgcagggagcggcaggtgattcttcaggaacttctggacaaggagaaagtgacgcagaaattctctttagtgattgtgcaggggcatcttgtttctgagggtgtgctgctcttcggccaccagcatttttacatttgtgaaaactttacactgtctcctacgggagacgtgtattgcactcggcactgtctttcaaatattagcgacccatttattttcaacctatgtagcaaggatcgctctacagatcactattcttgccaatgccactcttacgccgatatgagagaactgcggcaggctcgcttcctcttgcaggatattgccctagaaattttcttccataatggatacagtaaatttcttgtgttctacaataatgacagatcaaaagcattcaagtccttttgctcattccagccctcattgaaaggcaaggcaacttctgaggatactctgagcctgcggaggtatccggggtcggaccggattatgctgcaaaaatggcagaagcgggacatttcaaattttgaatacctgatgtacctcaatacagccgctggcaggacctgcaacgactatatgcagtaccccgtgttcccttgggttttggcagactatacaagcgaaaccttaaacctggctaacccgaagatcttccgggacctgtctaaacctatgggagcccagacgaaagagaggaagctcaaattcatccaacgctttaaggaggtggaaaaaaccgagggggacatgacggtccagtgccactactacacccactactcatccgccatcatcgtggcatcctacctcgtgcggatgccgccattcacccaggccttctgtgcactacaaggtgggtcattcgatgtggccgatcggatgttccattccgttaagagcacttgggagtctgcttcccgcgagaacatgtccgacgtgagagagttgacacctgaatttttctacctgcccgagttcctgactaattgtaatggggtcgaattcggatgtatgcaggatggcacggtgttaggcgacgtgcaacttccaccatgggccgatggcgacccccggaaatttatttctctgcacagaaaagccttggaaagcgatttcgtttctgctaacctgcaccactggattgatctgatatttgggtacaaacaacaagggccagccgctgtagatgcggtgaacatctttcatccctacttctatggagacaggatggaccttagctccattaccgaccccctgatcaagtcaacaatcttaggcttcgtgagcaatttcggccaggtgcctaaacagcttttcaccaagccccatcccgcaaggactgctgccgggaagccgcttcccggcaaagacgtctccacccctgtctctctaccaggacaccctcagccattcttctacagcctccagtccctacgtcctagccaggtaactgttaaggatatgtacttgttttccctcggaagcgaatctccaaagggggccatcggtcatatcgtgtctacagagaagacgatactggctgtggaacgcaataaggtgctcctgccaccattgtggaaccggacattttcctggggatttgacgatttctcgtgttgtctcggctcatatggttccgacaaagtgctgatgacattcgaaaatctggccgcgtggggccggtgtctatgtgctgtctgcccgtctccaaccacaattgttacctccggaacctctacagttgtttgcgtgtgggagctgtctatgacgaagggccgcccaagaggcttgagacttaggcaggccttatacggtcacacgcaggccgtgacctgcctggctgcttccgtaacctttagcctcctggtgtcgggaagccaagactgtacatgtatcctgtgggacctcgaccatctgacacacgtgactaggctgcctgcccaccgcgagggcatctcagccattactattagtgacgtctccgggactatagtgtcttgcgctggcgcccacctgagtctttggaatgtgaatggccagccattagccagcatcactacagcatggggacccgagggagctatcacatgttgctgtttgatggaggggcccgcatgggatacaagtcagataattattaccggcagtcaagacgggatggtgcgggtgtggaagacagaggatgttaagatgtccgtaccgggacgcccagctggggaggagccgccagctcagcctccatcccctagaggccacaaatgggaaaagaacttggccctttcccgagagcttgacgtgtctattgctctgactggaaaaccaagtaagacttctcctgctgttaccgccctagccgtgtctagaaaccacaccaagctgctggttggagatgaacgcggcagaatcttttgctggagtgcagatggttag

SEQ ID NO: 211449 - DNA, 1965 bp, synthetic construct
  misc_feature 1..1965: note = Description of Artificial Sequence: Synthetic coding sequence
  source 1..1965: mol_type = other DNA
atggaggccgaggacctgagcaaggccgaggaccggaacgaggacccaggaagtaaaaacgaaggccagctagcagccgtccaaccggacgtgcctcacggtggccagagcagtagtccgaccgctctctgggacatgctcgaacgaaagtttcttgaatatcagcagcttacccacaagagccccattgaacgccaaaaatcactgctgagcctgctccccttgttcctgaaagcctgggaacactctgtggggattatttgcttcccatcactgcagcggttggccgaggacgtctccgaccagctggctcaacagctgcaaaaagctcttgtagggaagccagcagagcaggccagactggccgcaggccagcttctctggtggaagggtgatgtagaccaagacggctaccttctccttaagtcagtgtatgtgctcaccggtactgactccgagactctcggtcgcgttgctgagagtggcctccctgctttgcttctccagtgcttgtacctgttttttgtcttccccttagacaaggatgaactcctggaaagcgacctccaagtccagaagatgtttgtgcagatgctgttgaacatttgctctgacagccaaggcctcgagggtctactgtccggttccgaactgcagtcacttctcattgctacaacctgtctcagagaacactcctgctgtttctggaaagagcccacattctgcgtactccgggccatctccaaggcccaaaacctgagtattattcaatacctccaagcaacggactgcgtgaggttatcactccagaatttgagccggctcacagacaccctgcccgcgcctgaagtgtccgaagcagtctcgttaatcctgggattcgtgaaggattcttatcctgtcagttcagcccttttcttggaattcgagaattctgaaggttatccactattgctgaaggtcctgctgcgctacgacggccttacccagagcgaggtcgacccccatctggaagaattgctaggcttggttgtgtggttgaccacatgcggccgctctgaactgaaagtgttcgactccatcacctacccccagctggagggattcaagtttcatcacgaggccagcggcgtgaccgttaaaaatttacaagcttttcaagtccttcaaaacgtcttccataaagcttctgattcagtgttgtgtattcaggtcctatctgtgattagaacaatgtgggcgtggaacgctaggaattttttcctgttagagtggacgctgcaacccatttcccagtttgtcgaaattatgccactcaagccagcacctgtgcaggagcacttcttccagctgctggaagccttagtgttcgaactgcactacgtcccacacgagattctccgaaaagtgcagcatcttatcaaggagtctcccggacccagttgcacactgatggccctgcaatcaattctgagcatagcaggcggtgacccattgttcacagacatcttccgcgatagcggtctgcttgggctgctgttagcccaactcagaaaacaggcaaaaatcatgaggaaatccggaaacaaggtgagtactcccggcgtccaagatccagagagggagctgacatgtgtaatgctgcgcatagtcgttaccctcctgaaaggttccgtgcgaaacgcggttgtgttgaaggatcacggaatggtaccattcattaagatcttcttagatgacgagtgttatcgggaggcctctcttagtattttggaacagctgtctgctattaacgctgaagaatacatgagcataatcgtgggagctctgtgcagtagcacacaaggagaacttcaactgaaacttgacctgttaaaagtaatcagcagccctcccctgcggctcgcatccttgtggatatgcaccaagaggtctacttttgcccaggctttcgtatttatgtag

SEQ ID NO: 211450 - DNA, 1659 bp, synthetic construct
  misc_feature 1..1659: note = Description of Artificial Sequence: Synthetic coding sequence
  source 1..1659: mol_type = other DNA
tgagacgacaccgtggtgtgggccgaggagtgcgtggcctgcgccaattggctgtggatgaacaccgccgataatttagaactcagcctgttctcccatctactcgagatccttcaaagtcccagagagggaccacggaatgctgaagcggcccaccaggcccaactgatccccaagttaatctttctgttcaacgagccctcccttattccttcgaagatcagtacaatcatcggtatcctggcttgccagctacggggtcacttctccactcaggatctcttgcgcattggtttgttcgtggtttatacactgaaaccaagctctgtgaatgagagacaaatttgtatggacggtgctctcgacccttccctgccagcagggtctcagacttccgggaagaccatatggctgagaaatcagctgctggaaatgctgcttagtgttatctctagccctcaattgcatctgtctagtgaaagtaaggaggaaatgttcctaaagctaggacccgactggtttcttcttttactgcagggacatttgcacgccagtaccactgtgctcgcgctgaagcttctcctgtattttttggcctcaccatccctgcgtacaaggttcagggatggattgtgtgcaggctcttgggttgagcgctctaccgaaggcgtggacatcgtgatggataatctgaaatcacaatcgcccctgcctgagcaatcgccctgcctgctgccaggtttcagggtactgaacgatttcctggcccatcatgtgcatattcctgaggtttatcttattgttagtacctttttcctgcagacgcctttgaccgaattaatggatggaccaaaggacagcctggatgccatgctgcagtggctgttgcagcgacaccatcaggaggaggtgctacaggctggtctttgcacggagggcgcactgcttttgctggaaatgttgaaagcaaccatgtcacaacctctggccggctccgaggatggggcatgggctcagacttttccagccagtgtgcttcagtttctcagcctcgtgcatcgcacatacccgcaagatcctgcctggcgcgctccggagtttcttcagacattagccatagcagcctttcctctaggtgctcagaaaggagttggagccgagtctactaggaataccagttcaccagaggccgcagccgaaggtgactcaaccgtagaaggcttgcaggctcctaccaaggctcaccctgctcgcaggaaactgcgggaattcacgcaattgttgttgagagaactcttgctgggagcctcgagtcccaaacagtggcttcccctggaggtcctgctggaggcctcccctgatcacgctaccagccagcagaagagggacttccaatccgaggtcctgctttcggcaatggaactgtttcatatgacaagcggcggtgatgccgccatgttcagagacggtaaggagccccagccaagcgcggaggccgccgctgcaccctcccttgcaaacatttcttgttttacccaaaaactcgtggaaaaactgtactcaggaatgttctctgctgaccccagacacattcttctgtttattctggagcatattatggtcatttcagcccctctccaggccagagatttctcgtag

SEQ ID NO: 211451 - DNA, 3129 bp, synthetic construct
  misc_feature 1..3129: note = Description of Artificial Sequence: Synthetic coding sequence
  source 1..3129: mol_type = other DNA
atggaggccgaggacctgagcaaggccgaggaccggaacgaggaccctggttccaagaacgagggtcagttggccgctgttcagcccgacgtccctcatggtggacagtcttcaagcccaaccgcattgtgggacatgctggagcgcaaattcttagaatatcagcaactaacgcataaatcacctatcgagcgccagaaatcgctgctcagcttactcccccttttccttaaggcatgggaacactcggtcgggatcatatgtttcccctcactacagagactggccgaggacgtaagtgatcaattggctcagcagctgcagaaggctctggtcggaaagcctgccgagcaggctaggcttgcagcaggccagctgctctggtggaagggcgacgtcgatcaggacggctacctgcttttgaagtcagtttacgttctcaccggcacagactcagaaacactgggtagggtggcggagtctgggttacccgccctgctgttgcagtgcctctatctgttcttcgtattcccccttgataaggatgaactactggaaagcgatttacaggtgcaaaagatgtttgttcagatgctgttaaacatatgctcggactcccagggattagaaggactgttgtctggaagtgagcttcagagtctgctgatagcgaccacatgcctgcgagagcactcctgctgcttctggaaagaaccaacattctgtgtactacgagccattagcaaagctcagaacctgagtatcatccagtatttacaagcaaccgattgtgtcagactgagcctgcaaaacctatcaagactcactgacactctgcctgccccagaggtaagtgaggcagtcagcctcatcctgggtttcgtgaaggattcatatcctgtgtcaagcgcactgtttctcgaatttgaaaattcggaaggatatcctttactgttaaaagttcttctcagatacgatggcttaacccagtccgaggttgacccacacctggaggagcttctgggactggtcgtctggttaacaacttgcggacggagtgagcttaaggtatttgatagtattacatacccacagctcgagggctttaaattccaccacgaggcgtccggagttacagtgaagaacctacaggcattccaggtgctgcagaatgtgttccataaggcaagcgactcagtcctgtgtatccaggtgctgagtgtgataaggaccatgtgggcgtggaatgctaggaatttttttctactggagtggaccctgcagcccatcagccaatttgtggaaataatgcccctgaagccggccccagttcaggagcattttttccagctgctggaggccctggtcttcgagctgcattacgtgccgcatgaaatcttgcgaaaggtacagcacttaattaaagagtccccaggaccttcatgtacgctgatggccttacagagcatcctgtctatcgccggtggcgacccactgtttactgacatctttcgagattctgggctgttagggctacttctggctcaacttagaaagcaggctaagattatgcgaaagagcggcaacaaggttagtacaccaggtgtgcaggatccagaacgcgaactgacgtgcgtcatgctgcgaattgtggtgacactgctgaagggctcagtgcgcaacgccgtcgtcttgaaggatcacggcatggtcccgtttattaagatcttcttggacgacgagtgttacagagaagctagcctaagcatcctggaacagttgtccgctattaacgcggaggaatacatgagcattatagtgggagctctctgttcttccacgcaaggagaattgcagctgaagctcgacctgctcaagagtctactgagaatccttgtgacccccaaaggcagggccgccttcagagtgagcagcggctttaatggactgttgagtcttctaagtgacctggagggttccctccaggagcctccactccaggcttggggggctgtgtctccgaggcagacactagagctggttttgtatacactgtgtgccgttagcgccgcactccattgggaccctgtgaatggctacttctttaggaggaatgggctgttcgaaaagctcgccgaggatctctgcctgttaggctgctttggtgccctagaggaggagggcaacctgctgagaagttgggttgatacaaaggcacggccatttgccgatcttttgggcaccgcctttagctcatctgggtcccttcctccaagaattcaaagctgtttgcagattctcggctttctggactcaatggcatctggaacactacacctccgcggtgacctcaaggagagcctccggacaaagcaaggcccagtcgtggacgtgcaaaaaggcgagacagggagcgaccctcagcgcaacttcaagcagtggcccgacctcgaagaacgtatggatgagggcgacgccgccataatgcacccaggcgtggtttgcatcatggtccggctgctgcctagactgtaccacgaagatcatccacagttgagcgaggaaatccaatgttccctggcctcacacatacagagcctggtgaaatccgagaaaaacagacaggtcatgtgcgaggcaggcctcctcgggacgctgatggccagctgccaccgagccctggtgacttctggcagccctcttcattctcgattaatcagaatctttgagaagcttgcaagccaggcgatcgagcccgacgtgctgcgccagttcctcggcctggggatcccttcttccctgtccgcaactactaaaattcttgattcatcacacacacatcgcggcaatcctggctgttcgggaagccagactgctcagggtctcgctgaggggccatggcccgcagctcctgacgcagggctgcaccccggagtaacccaggcacctcagcccttgggcgagagccaagactccaccactgctctccaaaccgccttgagcctcatatccatgaccagtcctcatatttggaaacccaacatttggaaagacaatctcgctcagaagcccgtggccggcgatgcagctcagtgcaatatcttcccaccggcctcatcggtgctgtag

SEQ ID NO: 211452 - DNA, 9531 bp, synthetic construct
  misc_feature 1..9531: note = Description of Artificial Sequence: Synthetic coding sequence
  source 1..9531: mol_type = other DNA
atggaggccgaggacctgagcaaggccgaggaccggaacgaggacccaggctccaagaatgagggccagctcgcggccgtacagcctgatgttcctcatggtggacaatccagcagccctaccgcactctgggatatgctggaacggaaattcctcgagtaccagcagctcacacataagtcccctatagaaagacagaaatctttgttgagcctgcttcccctgtttcttaaagcatgggagcactctgtgggaatcatttgctttccgtctcttcagaggctagcagaggatgtctcagatcagctggcccaacagctccagaaggcactcgtcggaaagcccgctgaacaagcgcgcttggccgcgggtcaactcctctggtggaagggagacgtggaccaggacggatacttgctgctgaagagcgtgtatgtcctcacaggtacagactctgaaaccctaggccgggtggctgagtctgggttgcctgccttgttactgcagtgtttgtatctttttttcgtcttccctctcgataaggacgaattgctggagtccgacctgcaagtccaaaagatgtttgtgcagatgctgctcaacatttgttccgatagtcaaggtctggaaggcctactcagtggctccgagctacagtcgctcctcatcgctacaacctgtctgcgggagcattcctgctgtttctggaaggagcccacgttctgcgtgctgagggccatttctaaagcacagaatctgagcattatccaatacttacaggctacggactgcgtgcggttgagcctccagaacttatcgagactgaccgacactctgccagcgcccgaggtgagcgaagccgtttctctgatattgggcttcgtgaaggacagctaccccgtctcctctgccctgttcctggaatttgaaaactccgagggctaccccctcctactaaaggtgctgttgaggtacgacgggctgacccagtcagaggttgatccacacctcgaggagctgttgggactcgtggtgtggctgactacttgtgggcgctcagaactgaaagttttcgattcaatcacttacccccaactggagggctttaaatttcaccatgaggcgtccggggttaccgtgaaaaatttgcaggccttccaggtgctgcaaaacgtgtttcataaagctagtgactccgttctttgcattcaggtgctgtccgtgattcggacaatgtgggcatggaacgctaggaacttcttcctgctggagtggactctgcaaccaatttcccagttcgtggagatcatgcctctgaaacccgccccagtccaggaacatttctttcaattgctggaagccctggtatttgagctgcattatgtcccacatgagatcttgcggaaagttcagcacctaattaaggagagccctggtcccagttgtactcttatggccctgcagtctattctctccatcgctgggggagatccactctttaccgatatttttagagattctgggctcttgggactgcttctggcccaactgaggaaacaggccaagattatgcgcaagagcggcaataaggtttccacccccggagtacaggatccagagcgggaactgacatgcgttatgctgcgtattgtagtcacccttctgaaggggagtgtccgtaatgccgtcgttcttaaagaccatggaatggtgcctttcatcaaaatctttctcgacgatgagtgctatcgagaggcctctctctccattctcgaacaactcagcgcaatcaatgcggaggagtacatgtccattattgtcggagccctatgcagctcaacacagggggagttgcagctgaagctcgatctgctgaaaagcttgcttcgcatcctcgtcacccctaaagggagagcggcctttagggtgtcttctggatttaatggtctgctttccctgctgtccgacctggaaggctcgctgcaggagccaccactgcaagcctggggagcagtgagtcccaggcagacacttgagcttgtgttatataccctctgcgccgtgagtgctgcgctgcactgggatcccgtgaacggttattttttcagacgcaacggcctcttcgaaaaactggccgaggatctttgtctgctaggctgtttcggtgccctggaagaagaaggcaacttgctgagatcatgggtggatactaaagcacggccttttgctgacttgttagggaccgcattcagcagctctggaagtctgccacctcgcattcagagctgtttgcaaatactcgggtttttagacagcatggcatcaggaaccctccaccttcgaggcgacttgaaagaatccctgagaacaaagcagggtcctgtagtggacgtacagaagggggagacgggaagcgatccacaaaggaatttcaaacagtggcctgacctcgaggaaaggatggacgagggcgatgcagcaataatgcatcctggtgtcgtgtgcataatggtcaggttattgccccgcctgtatcacgaggaccatccgcaactgtctgaagaaatccagtgctcccttgcatctcatattcagtcccttgttaagagcgaaaaaaatcgacaggtcatgtgcgaagcaggtcttctgggcacgctgatggcttcttgtcacagggcactggtgacaagcggctctcccctacattcacgcctcattcgcatcttcgaaaagctcgctagccaggccatcgagcctgatgtactccggcagtttctcgggctgggcattccaagctctcttagtgccacaacaaagatcctcgactcatcacacactcaccggggtaatcccggatgctctggatcccaaaccgctcagggccttgctgaaggtccatggccggcggcccccgacgctgggctccatccgggggtgactcaggcccctcagcctctcggagaatcccaagacagcactaccgccctccaaacggccctcagcctgatctctatgacatcgcctaggaatctgcaaccacagcgagccgctctggctccatcctttgtggaattcgacatgtcagttgaaggttacggctgtctattcattcctacattaagcaccgtgatgggcacaagtaccgagtactctgtgagcggtgggatcgggaccggggcgacccgtcccttccctcccccaggaggcctaacgttctcgtgttggttcctgatttcccgccacggggctgcgactgagggacacccactgcgcttcctgaccctagttcgccatttagccaggactgagcagccctttgtctgtttttctgtcagcctgtgtccagacgacctgagtctggtggtttctacggaagaaaaggaatttcagccactcgatgtcatggaacctgaagacgatagcgaaccctccgcaggctgccagctccaggtgcggtgtggccaacttctcgcctgcggccagtggcaccatctcgccgtggttgtcacgaaagaaatgaagcgacactgcaccgtgtctacctgcttggacgggcaagtgattggttctgcaaaaatgctgtacatccaagccctgcccgggcccttcctctccatggatccttctgccttcgtggatgtgtatggttatatagctactccccgcgtgtggaagcagaagtcctctctcatttggcgcctgggaccgacttacttgtttgaagaggctatatctatggagacattggaggtgatcaacaagctcgggccacgctactgcgggaatttccaggccgtgcatgtgcagggtgaggatctcgattcggaggcaaccccttttgtagccgaggaacgagtgtcctttggccttcacatagcatcgtccagcattacctccgtggccgacatcaggaacgcatacaacgaggtggatagcaggctgatcgcaaaggaaatgaatatcagttccagagataatgcgatgcccgtcttcctgcttcgcaattgcgccggccacctctcagggtccctgcgcaccatcggcgctgtcgctgtgggccagctaggagtaagggtcttccactcatcccctgcagcaagctcgctggactttatcgggggtccggcgatcctgctcggattaataagtctggctaccgatgaccatacgatgtacgccgcagtgaaagtcctccacagcgttctaacgtccaatgctatgtgcgactttcttatgcagcatatatgcggctatcagataatggcatttcttttaaggaagaaggcctcgctgctgaaccaccgtatctttcaactaatcctgtccgtggccggaactgttgaactcggcttccgaagtagcgccattacaaacacaggagtcttccagcatatcctttgtaacttcgagctgtggatgaacacagccgataatctcgagttgtccttgttctcacatctcctggagatactccagagcccgcgcgagggacccagaaatgcagaggctgcacaccaggcccagctgatcccaaaacttatttttctgttcaacgagccctctctgataccaagcaaaatttcaacaatcatcgggatcttggcttgtcagctgcgcggtcatttctcaacgcaagatctcctgcgtattggcctgtttgttgtttatactctgaagccatcttctgtgaacgagagacaaatttgcatggacggtgccctggatccctcgttaccggctggcagccagacaagcggaaaaaccatctggctgaggaaccaactactggaaatgcttttgtccgtgatctcttcacctcagttgcacctgagcagtgagagcaaagaggagatgtttctcaagctgggccctgactggttccttctcctccttcagggccacctgcacgcaagcactactgtccttgccttaaagctgttgctgtacttcctcgctagtcctagtttgcgcacccgctttagagatgggctatgcgctggatcctgggtcgagaggagcacggaaggtgtcgacattgtcatggacaatctgaaatcccaatcacctctgcctgagcaaagcccttgtctgctcccaggttttagagttctgaacgattttctcgctcatcacgtgcatattcctgaggtatatctcatcgtcagcacatttttcttacaaacacccctgacagaactgatggatggcccgaaggattctctggatgctatgcttcaatggctgcttcaacgccatcatcaggaagaagtgctacaggccgggttgtgcaccgagggcgctctccttctcctggaaatgctgaaggctaccatgagccagcctttggctggatcagaagacggcgcttgggcacaaaccttccccgccagcgtgctccagtttttaagtcttgtgcaccggacttaccctcaggaccctgcctggagagcacccgagttcctccagacgttagctattgctgcatttcccctcggtgcccagaagggcgtcggcgccgaatccaccagaaacacttcgtccccggaggcagctgccgagggagattcaaccgtagagggattacaggccccgaccaaggcacatcccgccaggaggaagctacgtgagtttacccagctgctcctcagggagctgctcctcggcgcgtcttcccccaagcagtggctgcctctggaagtgttactggaagcttcgcctgaccatgccacaagtcagcagaagcgggacttccagtccgaggttctgctgtccgccatggaactgttccacatgacatccggtggagatgctgctatgtttagagacggcaaggagccccagccctccgctgaagctgcggccgctccttcgctcgccaatatctcatgtttcactcagaagctcgtcgagaaattatacagtgggatgttctcggccgaccctcgccacattcttctcttcattctggaacatatcatggtggtgattgaaacagccagcagtcaaagagacactgtcttatctactctgtacagcagccttaataaagtaatcttatactgtctaagcaagcctcagcagtcactgagcgagtgcctcggccttcttagcattcttggtttcttgcaggagcactgggatgtggtcttcgccacctataacagcaacatatcgtttctgctgtgcctcatgcactgtctgctgctcctgaatgagaggtcttaccctgagggcttcggtcttgagcccaagccgcgcatgtcaacataccaccaggtgtttttgagcccaaatgaagacgtgaaagaaaaacgcgaggacttaccgagcttgtcagatgtgcaacataacatccagaagactgtgcagaccctctggcaacagctggtggcccaaagacagcagacgctcgaggacgcctttaagattgatctttccgtgaagccaggcgagcgggaggtcaagatcgaagaggtgacaccgctgtgggaggaaacaatgctaaaagcatggcagcactacctggcctctgagaaaaagtctctggcatctagatctaacgtcgcccatcatagcaaggttactctgtggtccggctccctttcctctgcgatgaagctgatgcccggccggcaagcgaaagaccctgaatgtaaaactgaggactttgtcagttgtattgagaactacagaaggcgggggcaggaactgtatgcctccctatacaaagatcacgtgcagcgacggaaatgcggcaacatcaaagccgccaatgcctgggcacgcatccaagaacagctttttggggaactgggactgtggagtcagggcgaagagaccaagccttgcagcccctgggagcttgactggcgggaaggccctgcacggatgcgtaagagaatcaaacgtctcagtcctttggaggctctatccagcggtcgacacaaagagtctcaagacaaaaatgatcacatctcccagacaaatgcagagaaccaagacgagctgacattgcgggaggccgagggcgaaccagacgaggtaggggtggactgtacccaactcaccttttttccggccctccacgaaagcttgcactccgaggactttctcgagctgtgccgggaaagacaggtgatcctacaagagctcctagacaaggagaaagtgacccagaagttttccctagtcattgttcagggccacttagtcagtgaaggggttctcctgtttggccaccagcacttttacatatgcgagaactttactttgagtcccacgggagatgtgtactgcacacggcactgtctgagtaatatttccgacccgttcatctttaacctatgttcaaaggacaggtctacagatcattattcctgccagtgccattcctacgcagatatgcgcgagcttagacaagcccgtttccttttacaggatatagctttagagatatttttccacaacggatatagcaagtttctcgtattttataacaatgaccggtccaaggcattcaagtctttttgtagcttccagccgtccctgaaaggcaaagccacttccgaggacacgctgtctctgagacgctatccaggatctgataggatcatgctgcagaagtggcagaagcgcgatatctcaaattttgaatacctaatgtatctgaacaccgccgctgggcggacctgcaacgattacatgcagtacccagtcttcccttgggtgctggctgactacacttccgagactctgaatctggcaaatccaaaaatatttcgcgatctgtcgaaacctatgggtgcccaaactaaagaaaggaagttaaagttcatacagagatttaaagaggttgagaaaactgagggggacatgactgttcaatgtcactactatacgcactacagctccgctattattgtcgctagctacctggtgcgcatgccaccattcacccaggctttttgtgcactccagggcggctcgttcgacgtcgctgaccggatgtttcattctgtcaaaagcacgtgggagtctgcctcgagggaaaatatgtcagatgtcagggagctgacccctgaattcttctatctgccagagttcctgacaaactgcaacggagtagagttcggatgcatgcaggatggcacagtccttggcgacgtacagctccccccgtgggcggacggtgatccaagaaagttcatctccctgcatagaaaagcattggagtccgattttgtttcagccaatctgcaccattggatagacctcattttcggttataaacagcaaggtcctgccgccgttgacgcagtaaacatctttcacccctacttttacggggatagaatggatttgagcagcatcaccgaccctctgataaaatccaccatacttggcttcgttagtaatttcggtcaagtgccaaaacagttatttaccaaaccccatcccgctaggaccgcagcagggaagcctctccccggcaaggacgtgtccacccccgtaagcttgcccggccatcctcaaccttttttttacagcctgcagtctctgaggccaagccaggttacagtgaaggatatgtatctgttctctctgggtagtgagagccccaagggagcgatcggtcatatcgtttccaccgaaaagaccatcctggcagtggagagaaataaggttcttctccctccactatggaataggaccttcagctgggggtttgatgatttcagctgctgcctgggcagctatggaagtgataaggtattgatgacttttgagaacctggccgcctgggggcggtgcctctgtgctgtgtgtccgtcgccgacaacaattgtgacttccggtacctcaacggtagtgtgtgtgtgggagctatccatgaccaaagggcggccacggggcctgcggctgcgacaggctctgtacgggcatacacaggcagtgacatgcctggccgctagcgttacattctcccttcttgtgtccggctcccaggattgtacttgtatactttgggacctggaccacctgacccacgtcacaaggctgcccgcacatcgagagggcatcagcgcgatcaccattagcgatgtctccgggactatcgtgtcatgcgccggcgctcatcttagcctatggaacgtgaatggacaaccgcttgccagcattaccacagcatggggcccagagggagccattacgtgctgctgtctaatggaaggcccggcttgggatacatctcagatcatcataacaggttcgcaggacgggatggttagagtttggaaaacagaggatgtaaaaatgagtgtgcctgggctgcaaatgggtagaaagcgcgaggccgcggaggcattggcccagcaatgtcaagctgagggcggccgcggggactggggactctcttctgcttaccggaggaacccccaaggcctcttgcctcacagttcccaaggccgcgcgtctggaaaccattcttccgccgcacaaccgagtccttggcccatgggattgctatag

SEQ ID NO: 211453 - DNA, 3159 bp, synthetic construct
  misc_feature 1..3159: note = Description of Artificial Sequence: Synthetic coding sequence
  source 1..3159: mol_type = other DNA
ctgaacagcgacctgctgtgccacggcatggaggccgaggacctgtcgaaagcggaggatcggaatgaagatcctggcagcaagaatgagggccagctggcggctgtccagccggatgtgcctcatgggggccaatcttcatcccccaccgccctctgggacatgctggagaggaagttcctcgagtatcagcagctaacacataaaagtcctattgagcgccagaagtccctgttatcactcctccctctgtttttgaaggcctgggagcactcagtcggtatcatttgcttcccttcgctgcagagactggcagaggacgtcagcgaccagttggctcaacagttacagaaagctctggtaggtaagccagcagagcaagcaagacttgccgccggacagctcctgtggtggaaaggcgacgtagatcaggatggctacttactgctgaagagcgtttacgtactgaccggcactgatagtgaaactcttgggagggtcgcggagtctgggcttccagctcttttgttacagtgtctttatctattcttcgtattccctctggataaggatgaactcctcgagtctgatctgcaggtccagaagatgttcgttcaaatgctgctcaacatctgcagcgactctcaagggttggaaggtttgctcagcggatcagaactgcagagcctactgatcgctacaacatgcttgagggagcatagttgctgcttctggaaagaaccaaccttctgcgtgcttcgggccatatccaaggcacaaaatctgagtataatccagtacctgcaggcgacagactgtgtgcgattgtcactgcagaatctgagtcggttgaccgacaccttgcctgccccagaggtttcagaggccgtttctttgatcctgggtttcgtgaaggattcctacccggtctcgagcgccctattcctggagttcgaaaactccgaaggctatcccctgctgctcaaggtgcttctcaggtacgacggactgactcagagtgaagtggacccacatcttgaggaactgcttggactggtcgtgtggctgaccacctgcgggcgctcagagctaaaagtgtttgacagcatcacctatccacagctggaggggtttaaatttcatcacgaagcttctggggtgaccgtaaaaaacctgcaggcatttcaggtattacagaacgttttccacaaggcgagcgatagcgtgctatgcatccaggtgttgagcgttatcagaacaatgtgggcatggaatgcccggaattttttcctgctcgagtggactctccagcctatatcacagtttgtggaaattatgcccctgaaaccagcacccgttcaggaacacttttttcagctactcgaggccctcgtcttcgagctacactatgtgcctcacgagattctgcggaaagtgcagcatctaattaaagaatctccaggcccgagctgcactttaatggctctgcagtctatcctcagtatcgcaggcggggacccgttatttaccgatatcttcagggactctggactgctaggcctgttgctggctcagctgagaaagcaggccaaaatcatgaggaagtcaggtaataaagtcagtacccctggggtccaggacccagaacgagaactgacttgcgtgatgttacggattgtcgtcacgcttttgaagggctctgtgagaaacgcggtggttctgaaggaccatgggatggtgccatttatcaaaatatttctggatgacgaatgttatagggaggcatctctgtccatccttgagcaactgtctgctatcaatgccgaggagtatatgtctattatcgttggcgctttgtgttcttccacccagggcgagctgcaactgaagctggatctgctgaagagcctacttcgcatcctggtcacacctaagggaagagccgcctttagggtgtcttctggctttaatggactgctgtcactgttaagtgacttggaaggatctctacaggagccacccctgcaagcgtggggcgcggtgagcccgcggcagacactggagcttgtgctgtatacattgtgcgccgtgtcagcggccctccactgggatccggtgaacggctatttttttcggagaaatggactgtttgaaaaactggcagaggacctgtgtcttttggggtgttttggggcgctggaagaagagggtaatctgttgagaagctgggtagacacaaaggctcgcccctttgctgacctcttgggcactgctttctctagctccggctctctgcccccaagaattcagtcttgcctgcaaatcctgggatttctggactcaatggcctctggcactcttcacctgcggggcgacctgaaggagagcctgcggacaaagcagggaccagtcgttgacgttcaaaaaggcgaaacaggttccgatccacaacggaactttaaacagtggcccgacctggaagagagaatggacgagggggacgccgctattatgcaccccggtgttgtgtgtatcatggttcggctgctgccacgcctctaccatgaggatcacccgcagctcagcgaagaaattcagtgttccctcgcatcacacatacagtccctagtgaaatccgaaaagaacaggcaagtgatgtgcgaggctgggctgctggggacattaatggctagttgtcacagggctttagttacatccggtagtccattgcacagcaggcttattagaatcttcgagaaactcgctagtcaggccatcgaacctgatgtgctgaggcagttcctgggactgggtataccctccagcctttctgcgacgacaaagatattggactctagtcatacccaccgcgggaaccctggctgcagcggctcccagaccgcacaggggctggcggaggggccctggccagccgcacctgacgctggcctacacccaggagtcacacaggccccccagcccctgggcgagtcccaagatagtactactgcactgcaaaccgccctgtcattgatttcaatgacttcaccggtcgccggatcccagacaagtggtaagactatctggctcaggaaccagttgttagaaatgcttctgtccgtgatatcatccccccagctccatttaagctcagagtag

SEQ ID NO: 211454 - DNA, 1875 bp, synthetic construct
  misc_feature 1..1875: note = Description of Artificial Sequence: Synthetic coding sequence
  source 1..1875: mol_type = other DNA
atgctgcagaagtggcagaagcgggacatcagcaacttcgagtacctcatgtacctgaacacagccgccggcagaacttgcaatgattatatgcagtacccagtgtttccctgggtcctggcagattacacatctgaaacacttaatctcgctaaccccaaaatcttccgggacctctctaagccaatgggagctcagacaaaagagcgtaaattgaagttcattcagcgattcaaagaagtggaaaagacggagggggatatgacagtgcagtgtcactattatactcactattcatctgccataatcgtggctagctacttagtgagaatgcccccttttactcaggccttctgtgcactgcagggaggctcctttgacgtggctgataggatgtttcactcggtgaaatctacgtgggagtccgcctccagagagaatatgtcagatgtcagggagctcacgcctgagttcttttaccttcccgagttcctgaccaactgcaacggtgttgagtttgggtgcatgcaggatggcaccgtcctgggcgatgtccagcttcctccatgggcagatggcgaccctcgcaagttcatctccctgcacaggaaagccctggagtcggattttgtgagcgcaaatttgcaccattggatcgacctcattttcgggtacaaacaacagggccccgccgccgtagacgcagtcaatatttttcacccatatttttacggggatcggatggatcttagctccatcactgacccactgatcaaatctacaatcctggggtttgtcagtaattttggccaagtccctaagcagttgttcactaagccccatcctgcccgcacagccgcagggaagcctcttcccggaaaggatgtctccaccccggtctcattacctggccacccgcagccctttttctatagtctgcagagcctgcgcccgtcgcaggtgaccgtgaaggatatgtatttgttctccctgggctccgaaagccctaaaggagccataggccatatcgtttctacagaaaaaaccatccttgcagttgagcgcaataaagtcctactgccccccctgtggaatcgcaccttttcctggggattcgacgatttctcatgctgcctgggctcctacgggtcagataaagtgctgatgacttttgagaacctagccgcatgggggagatgtctatgcgcagtgtgcccatcgccgacgaccatcgtgacttctggcacctcaaccgtggtctgcgtgtgggaactttcaatgacaaaagggaggcctaggggcttacgactccggcaggcactctatgggcacacccaggccgtaacgtgtctggctgcaagcgtaactttcagcctactagtatccggatcccaggactgtacatgcatcctctgggatctggaccatcttacccatgtcacacggctgcctgcccatagagagggtatctccgcgattacaatctccgacgtctctggcactatcgtgtcttgcgccggagcccacctgagcctgtggaacgttaacgggcagccactggcatcaataaccacagcttgggggcccgagggggcgataacatgttgttgtctgatggaggggccagcctgggacacatctcagatcatcatcacaggcagtcaagatggcatggtccgggtctggaagaccgaggacgtaaaaatgtccgtcccgggaaggccagccggagaggagccacctgcccaacctccaactctctctatggcagatggcacatcaatgaagcgaatgtccacacatacccggagagcagagcagcacgccggaaactgtgaccttgtgatgccctcctgcacacgaaactatacatag

SEQ ID NO: 211455 - DNA, 1704 bp, synthetic construct
  misc_feature 1..1704: note = Description of Artificial Sequence: Synthetic coding sequence
  source 1..1704: mol_type = other DNA
atggacgacaaggacatcgacaaggagctgcggcagaagctgaacttttcttattgtgaagagactgagatcgagggacaaaaaaaggttgaggagtctcgggaagcctcctcccaaacgccagagaagggcgaggtgcaggatagcgaggccaagggcactccaccctggactcctctctccaatgtccacgagctcgatactagtagcgagaaagataaggagtcccctgatcaaatactgcggactcctgtgtcacaccccctaaagtgcccagaaacccctgctcagcccgactcacgcagcaagctgttgccaagtgattccccttctacacccaagactatgctgtcacgactggtgatctcccccaccggaaagctaccatctagaggcccaaagcacctgaaactgactcctgcacccctgaaagacgagatgacatcgctggcactggtgaatatcaacccattcacacccgaatcttacaagaaattgtttctgcaatcgggcggaaaacggaagatccgcggcgatttggaagaggcagggcctgaggagggtaagggcggcctgcctgcaaaacgatgtgtactgcgggaaaccaatatggcttctcggtacgagaaggagtttctggaggtcgagaaaatcggcgtgggggagtttgggacagtgtataaatgtatcaaacgcctggatggatgtgtatacgcgataaagagaagtatgaaaaccttcaccgagttatccaatgagaactccgccctgcacgaggtatacgcgcacgctgttctcgggcaccaccctcacgtggtgcggtactattctagctgggctgaggacgaccatatgatcatacaaaatgagtactgtaatgggggttcgctccaggcggccatttctgagaacactaaaagtggcaatcactttgaggagccgaaactgaaggatattctgttgcagatttccctcggtctcaactacattcacaatagtagcatggtgcacctggacatcaagccatctaacatttttatttgccacaaaatgcagagcgagtccagtggagtaatagaggaggtcgaaaacgaggcagattggttcctgtccgccaacgtgatgtataagatcggcgacctaggtcacgctacttctattaataagcctaaagtggaagagggagattcacgctttctagccaacgagatactgcaggaggactatagacacctgccgaaggccgatatattcgcgctcgggctgacaatcgccgtagcagccggggccgagagcttgcccacgaacggggcggcctggcaccatattcgtaagggtaatttccctgatgtgcctcaggagctgagcgaatctttctcatcactgctgaaaaatatgatacaacccgatgccgagcagcgaccctcagctgcggccctggcccgcaacaccgtgcttcgtcccagcttgggcaagactgaagaactgcagcagcagctcaacctggaaaagttcaaaaccgcaactctcgaaagagaactgcgagaagcccagcaggcccaatcaccacagggatatactcaccacggcgacactggagtgtccggcacacacacaggctccaggtcaaccaaaagactggtgggcggcaagtctgctcggtcctcgtctttcacctctggggaaagggagcccttgcattag

SEQ ID NO: 211456 - DNA, 846 bp, synthetic construct
  misc_feature 1..846: note = Description of Artificial Sequence: Synthetic coding sequence
  source 1..846: mol_type = other DNA
atggtgaccatcctgatgcgggccatcaacagcctgggcatccacgtgctggatagcagcaggcccacagatcccttgtctcactccagcaattccagctcggaacccgccatgttcatagaggacaaagctgtggatacactggcctacctgagtgatggagacgctcgagcggggctgaacggcctacaactggcagtgctggcccgcctctccagccgtaagatgttttgtaagaaatccggacagagctactcacccagtagagtattgattactgagaatgacgtgaaggagggcttgcagagatcccatattctgtacgacagggcgggagaggagcactacaactgtatctcagctctccataaatctatgcgcggatccgaccagaacgcatccctgtattggctcgctagaatgctggagggaggtgaagatccactttacgttgctaggcgactggtgcgattcgcaagcgaggacatcggactcgcagatccatctgccctgacccaggcagtagccgcctatcagggatgccacttcatcggtatgcctgagtgcgaagtgttactagcccagtgcgtcgtgtatttcgcacgggccccaaaatctatcgaagtgtacagcgcttacaataacgtgaaggcttgtctgcggaatcatcaaggtcccctgccacccgttccacttcatctcaggaatgcgccaactagactgatgaaagacctcggctacggcaaaggttacaaatataacccgatgtactctgaacctgtggatcaggagtatttgccggaggagctcagaggtgtggacttttttaaacagaggcgatgctag

SEQ ID NO: 211457 - DNA, 1338 bp, synthetic construct
  misc_feature 1..1338: note = Description of Artificial Sequence: Synthetic coding sequence
  source 1..1338: mol_type = other DNA
atgctgcagggcaagcccctggccgacaccatgcggcccgacaccctgcaggactactttggccagtcaaaagcagttggccaagatacacttctccgctcgcttctggaaactaatgaaattccctccctaattttgtggggtccccctgggtgcgggaagacaactctcgcacatatcatcgccagcaactccaagaagcacagcattcgatttgtgactctgagtgccaccaacgcgaaaacaaatgatgtaagggatgttattaagcaagcccagaacgaaaaatctttttttaagcgcaagactatcctattcatagacgagatacatagattcaataaaagtcagcaggatacgttcctgccccatgtggagtgcggaaccatcacactgattggagctacaacagagaacccctcattccaggtgaatgctgcattactgtcccggtgcagagtgatagtcctggagaagcttcccgtggaggccatggtgacaatcctaatgagagccatcaatagcctggggatccacgtgttagactcttctcgccctaccgaccctctttcgcatagctccaacagcagctccgagcccgctatgtttatcgaggataaggccgtggataccctggcctacctgtctgacggcgacgcacgcgcagggctcaacggccttcagctggccgttttagctaggctgtcctctcgcaaaatgttttgcaaaaaatctggacaatcttactctccttccagggtgctcattactgagaacgacgtgaaagaggggctccaacgatcacacattctttacgatcgcgcgggggaagagcactataactgcatatctgctctgcacaaatccatgcgaggatccgatcagaatgcatctctgtactggctggctcgtatgctggagggcggggaagatccgctgtacgtggctagacgactggtacgatttgcctccgaggatatcggcctcgcggacccttccgccctcacacaggccgtggccgcgtatcagggctgccacttcattggcatgccagaatgcgaggtcctactggctcagtgtgttgtttactttgcgcgtgccccaaaatcgatcgaggtgtactcagcttacaataatgtgaaggcttgcctccgaaaccaccaggggccacttcccccggtaccattacatttgcgaaatgcccccacgcggctaatgaaggatttaggatatggaaagggctataagtacaacccgatgtattctgaacccgtcgaccaagaatacctccccgaggagttaaggggtgtggacttttttaaacaacgcagatgttag

SEQ ID NO: 211458 - DNA, 1923 bp, synthetic construct
  misc_feature 1..1923: note = Description of Artificial Sequence: Synthetic coding sequence
  source 1..1923: mol_type = other DNA
atggaggtgagcggccccgaggacgaccccttcctgagccagctgcatcaggtgcagtgccctgtctgtcagcaaatgatgcctgccgcacacatcaactcccatttggaccgctgcttgcttctccacccagcaggacacgccgagcccgcagccggttcccaccgcgccggagagagggccaaggggccaagccctccaggtgcaaagaggaggcgcttgtcagagtcatctgcactgaaacagcctgctacacctacagccgcagagtccagtgagggggaaggagaggagggggacgacggcggggagactgaatcacgcgagtcctacgacgcaccccccactccttccggcgcacgattgatacccgactttccggtggcccggagtagctcgcccggtcgcaaggggtctggtaaacggcctgccgcagctgccgccgctgggtcggcaagcccgcgtagttgggacgaggctgaggcccaggaagaggaggaggctgtgggcgatggtgacggcgacggggatgctgatgccgacggcgaggacgatcccggccattgggacgccgacgcggcagaggccgccactgcttttggtgcttcgggcggcggcagaccccatcctcgagcattggcggcagaggagatcaggcaaatgctgcagggtaagcccctagccgatacaatgagaccggacaccttgcaggattatttcggacagtcaaaagctgtgggacaggatactctgctccggtcactccttgaaactaatgagattccatctctgattttgtgggggccgcccggctgtggaaaaaccaccttggcccatatcattgcaagcaactccaaaaaacattcaattaggttcgtgactctctctgccaccaacgctaaaacaaacgacgtgcgcgacgtgataaagcaggcacagaatgaaaagtcattcttcaagcggaaaaccatcctcttcatagacgaaattcataggtttaataaaagccagcaggtcaatgcagctctcctcagccgatgtcgggtcattgtcttagagaaactcccggtggaggctatggtgacgatcctcatgagggctattaattccctgggtatccatgtgctcgattccagtagacctacagacccactgagccactccagcaacagtagtagcgagcccgcaatgttcatcgaggataaggccgtcgacacgttggcatatctgtccgacggcgacgcaagggcaggtctgaacggcctccagctcgccgttctcgccagactatccagtaggaagatgttctgcaaaaagtcaggacagtcctatagcccgtcacgcgtgctgatcaccgagaatgacgtcaaggaaggacttcagcggagccacatcctgtatgaccgcgctggggaggagcattataactgtatcagtgccctgcacaaatccatgcggggttcggatcagaacgcatctctgtactggctggctcgcatgctcgagggcggtgaagaccctctgtacgttgcccgtcgtctggtgcggtttgcatctgaagatatcgggctggcggatccctctgcgttaacccaagccgtggcggcttatcagggctgtcattttataggaatgcccgagtgcgaggtgctgctggcacagtgcgttgtctactttgcccgggctccgaaatccatcgaagtgtactcggcgtacaataatgtgaaagcctgcctgcgcaaccaccagggcccactgccaccggtgccactgcacctaagaaacgcacccacgaggcttatgaaggatttaggctatggaaaggggtacaaatacaatcctatgtactcagaacctgtcgaccaggagtacctgccagaagagctgaggggggtagatttcttcaagcagaggcgatgttag

SEQ ID NO: 211459 - DNA, 1998 bp, synthetic construct
  misc_feature 1..1998: note = Description of Artificial Sequence: Synthetic coding sequence
  source 1..1998: mol_type = other DNA
atggaggtgagcggccccgaggacgaccccttcctgagccagctgcaccaggtgcagtgccccgtatgccagcaaatgatgcctgccgcccacataaattcacatcttgacaggtgcctcttacttcaccccgccgggcacgctgaacccgccgcagggagccaccgcgcgggcgaacgagcaaaagggccttctccccctggtgcaaagcgtcgccgcttatctgagagctctgccttgaaacagcctgctacacccacagcagctgagagcagtgagggcgaaggggaggagggcgacgacggtggagagaccgagtcccgtgaatcctatgatgcccctccgacccctagtggagcacggttgattccagactttccagtggctaggagctcatccccagggcggaagggaagcggcaagcggcccgcggctgcggcagctgctgggagcgcgagccccagatcttgggacgaagcagaagcccaggaggaggaggaagccgtgggagatggagacggcgacggcgacgccgacgccgacggtgaagatgaccctgggcattgggatgctgatgcagctgaagccgctacagctttcggagcgagcggcggtggaaggccccaccctcgcgccctggccgctgaggaaataagacagatgctccagggaaaacccctggcagacactatgaggcctgacacgcttcaagattacttcggacagagcaaggctgtgggtcaggacacgctgctacgatctctcttagagactaacgaaattccctcactcatcctatggggccctcctggatgtggtaagacaacactggcccacatcatcgccagcaacagtaaaaaacacagcatacgattcgtcaccctgagtgctacaaacgccaaaacgaatgatgtgagggacgtaattaagcaggcacagaacgaaaaaagcttcttcaaaaggaagaccatactattcatcgacgaaatccaccgcttcaataagtctcagcaggatacttttctgccacacgtggaatgtggaaccataacactgatcggggcaaccacggaaaaccctagtttccaggtgaatgccgccctgctgtcacggtgcagggtaatagttctcgagaagctgcccgtggaggcaatggtgacaatcctaatgagggctattaacagccttggaatacacgtcctagacagcagccggcccactgacccactcagtcactcaagcaactcttctagcgagccagcgatgttcattgaagataaagcagtcgatacgttagcctaccttagcgatggagacgctcgagccgggctaaacgggctgcagctggctgtgcttgcaagactcagctcacgtaagatgttctgcaagaaatcggggcagtcatatagtccttccagggtactgattactgagaatgacgttaaagaagggctgcaacgctcccacatcttgtacgacagagccggcgaggagcactacaactgcatctctgccttgcataagagtatgagaggaagcgatcagaatgccagtctgtattggctggcacgcatgctcgaagggggggaggatcctctttatgtggcacggcggttggtccggtttgcctccgaagacatcggcctcgccgatccctctgctctcacacaggctgtggcggcatatcaaggatgccactttattggcatgcccgagtgtgaagtgctcctcgctcagtgtgttgtctacttcgcccgtgcgcctaaatcaatcgaggtctactctgcctataacaacgtcaaagcttgtctacggaaccaccaaggcccactccctcccgtgcctctgcaccttagaaacgccccgacacgtctcatgaaggacttgggctacggtaagggctacaaatacaaccctatgtatagtgagcctgtggaccaggaatacttgcctgaagagctccgcggggtagatttcttcaagcaacgccgttgttag

SEQ ID NO: 211460 - DNA, 4299 bp, synthetic construct
  misc_feature 1..4299: note = Description of Artificial Sequence: Synthetic coding sequence
  source 1..4299: mol_type = other DNA
atgagcgagaagaagctggagaccaccgcccagcagcggaagtgcccagaatggatgaatgtccagaataagagatgtgccgtcgaggagcggaaagcttgtgttagaaaatcagtgtttgaggacgatctccccttccttgaattcactgggagcatcgtttattcgtacgacgcctccgactgtagctttctctcagaagacatcagtatgagcctcagcgacggagacgtcgttggattcgatatggagtggccaccactgtataaccgcggcaagctgggcaaggtcgctctgattcagctttgcgtctcggaaagcaaatgctacctgttccatgtatcgagcatgtccgtgtttcctcagggactgaagatgctgttggagaataaagctgttaagaaagcgggagtcggaatagaaggcgaccagtggaagttgttgagagacttcgatattaaattaaagaacttcgtggagctgactgatgttgcaaataagaagttgaaatgtaccgagacatggtcactgaactctctggttaaacacctcctcggcaaacagctgctgaaggacaaaagcattaggtgttccaactggtcaaagtttcctctcacagaggaccagaagctgtatgcagccactgacgcctatgccggcttcatcatttaccggaacctcgaaatcctggatgacacagtgcaaagattcgcaataaacaaggaagaggaaattttactgagtgacatgaataagcaactgaccagcatcagcgaggaggtgatggacctcgcgaagcatttgccccacgcatttagtaagctggagaacccccgacgggtgtctatacttttgaaggatatttctgaaaatctgtacagcctgaggcgaatgataatcgggagcaccaacatcgagactgagctacgtccctctaataatctcaacttgctgtctttcgaggactctacgactgggggcgtgcagcagaagcagatcagggaacatgaggtgctgatccacgtggaagacgagacatgggacccgaccctcgaccatctcgctaagcacgacggcgaagacgtgctggggaacaaggtggaaaggaaagaagatgggttcgaggacggcgtggaggataacaagcttaaagagaatatggagcgggcctgcctaatgtcgctggatatcaccgagcatgaactgcaaatcctcgaacagcagagtcaggaggagtacctgtctgatatcgcttacaagtcaaccgagcacctgagccctaatgataacgaaaatgacacatcctatgtgattgagtctgacgaagatctggagatggagatgctcaagcatctgtcccctaatgacaatgagaatgatacgagctacgtgatagagagtgatgaagacttggagatggaaatgttgaagtccttggaaaaccttaacagcggaactgtagagccgactcattctaagtgtctaaagatggaaaggaatttgggacttcccacaaaagaggaggaagaagatgacgaaaacgaagccaacgaaggtgaggaggacgacgacaaggattttctctggcctgcgccgaacgaggaacaggtgacctgtctcaagatgtacttcggtcactcctctttcaagcctgtccaatggaaggtgatccactcggtgttggaagagcgccgggataatgtcgcggtgatggccacaggatacggaaaatctctctgtttccagtaccctccggtttatgtggggaagattggccttgtgatctctccgctcattagcctcatggaagatcaggtcttgcaactgaaaatgagtaacattcctgcgtgtttccttggctctgcccagtctgagaacgtattaaccgacatcaagctgggcaaatatagaatagtgtacgtgacaccggagtattgttccggcaatatgggattacttcagcaactggaggctgacatcggcattaccctaattgcggttgatgaggcacactgcatctccgaatggggccacgacttccgggatagctttcggaagctgggctcacttaaaacagcattacccatggtgcctatcgtcgctctgacagccaccgcatcgagcagcattcgcgaggatattgtgagatgcttgaatctgaggaatccacaaataacttgcacaggttttgacagacccaacctctacctagaagtgcgcaggaagactggcaatatcctccaggacctgcagccgttcctcgtgaaaacatccagccattgggaattcgagggtccaactatcatctattgcccctccagaaaaatgacgcagcaggtcaccggagaactgaggaaactcaacctaagctgcggaacatatcacgcagggatgtctttctcaaccaggaaagacatccaccaccgcttcgtccgggacgaaatccagtgcgtgattgctactatcgcatttggcatggggataaacaaggccgatatccgccaggttatccattacggcgcccccaaagatatggaaagctactatcaagaaatcggcagggctgggcgggatggcctgcaatcaagctgtcatgtgctctgggcgcctgctgacattaacctgaaccgccacttactgacggaaataagaaatgagaaatttagactgtataagcttaaaatgatggcaaagatggaaaagtatctgcacagtagtagatgtaggcggcagattatcctgtcccattttgaggacaagcaggtacagaaggcaagcctgggcattatggggactgagaagtgctgtgacaattgtagatcgcgtctcgatcactgttactccatggatgattcggaggataccagttgggactttggtccccaagcattcaaattgctctcagccgtggatattttaggagaaaaatttgggataggcctgcctattctcttcctgcggggctctaattctcaacgactggccgaccagtaccgacgtcatagcctgttcggcaccggcaaagaccagacagaatcttggtggaaagccttctccagacaattaatcaccgagggtttccttgtagaagtgtcacgatataacaagtttatgaaaatttgtgccctgaccaaaaagggcagaaactggctgcacaaagcgaatacagagtctcaatctctcatactgcaagccaatgaagagttgtgtcctaagaaactgttgcttccatccagcaaaaccgttagctcgggaactaaggaacattgctataaccaagtcccagtggagttaagtacagagaaaaaatccaacctggaaaagttgtactcctataagccctgtgacaaaatctcctctgggtcaaacatctcaaagaaatccataatggtgcagtcccccgagaaggcatattcttcgtctcagcccgtgatctcggcccaggagcaagaaacccaaatcgtcctatatggtaaactcgtcgaggcccggcaaaagcacgccaataaaatggacgttccccccgccatcctcgccactaacaaaattctcgtggacatggccaagatgcgcccaactactgtcgaaaacgtgaagagaattgatggagtatcagaagggaaagctgctatgttggccccactgctcgaggtgatcaagcatttctgtcagaccaacagtgtgcagaccgacctattcagctcgaccaaaccccaagaggagcagaaaactagcctcgtcgccaaaaacaagatctgtaccttatctcaatccatggccatcacctattctttgttccaagaaaagaagatgcctctcaaaagtattgccgaatctagaattctgcccttgatgaccatcggcatgcacctatcacaagccgttaaggctggttgcccattggaccttgaacgagcaggactgacaccagaggtgcagaaaattatagccgatgtgattcgaaacccgccagtaaatagtgacatgtccaagatttccctcatccggatgctggttccagagaacatcgacacatatcttatccacatggcaatcgagatcctaaagcacgggcccgacagtggcctccagcccagttgcgacgtaaataagcgcagatgctttcccgggtccgaagagatttgctccagctctaagcgcagcaaggaggaagtggggatcaataccgagacttcgagtgccgagaggaagagacgtctacccgtgtggtttgcaaagggcagcgatacctcaaagaagctcatggacaagacaaagcgagggggcctgttcagctag

SEQ ID NO: 211461 - DNA, 738 bp, synthetic construct
  misc_feature 1..738: note = Description of Artificial Sequence: Synthetic coding sequence
  source 1..738: mol_type = other DNA
atggcccaggaggagggcggcagcctgcccgaggtgcgggcccgggtgcgcgctgctcatgggattcctgacctggcacagaagttacacttctatgatcggtgggccccagattatgatcaggacgtagcgactctcttgtatagggccccacgcctggctgttgattgtctgactcaagccctgcctggcccaccccatagtgcgctgattctggatgtcgcttgtgggacgggccttgtagccgcggaattgagggccccaggcttcttgcagttgcacggcgtcgacggcagcccagggatgctcgaacaggcccaagccccagggctgtaccagaggctctctctctgcactctgggacaggagccgttgccgtcccctgaaggtacatttgatgcagttttaatcgtcggcgccctttctgatggtcaggttccttgtaacgcaatccctgagctccatgtaactaagcccggagggttagtatgcctgacaacccggacgaattcatcaaacctgcaatataaggaggcattggaggcaacgctggacagattggagcaggctggaatgtgggagggcttagtagcctggcccgtggaccgtctgtggaccgcaggatcctggctgcccccctcttggcggtggtaccctgcgtccttacctagaatggcttcctccccagctctcagcacctgtaccgaaagtggccgccgcccacgcctgagaaagtag

SEQ ID NO: 211462 - DNA, 798 bp, synthetic construct
  misc_feature 1..798: note = Description of Artificial Sequence: Synthetic coding sequence
  source 1..798: mol_type = other DNA
atggaggccctgccccccgtgcggagcagcctgctgggcatcctgctgcaagtcaccaggctttccgtcctgctggtgcagaatagagaccacctgtataatttcctcctgctcaaaataaatttgttcaatcactgggtatccggcctagctcaagaggctaggggctcctgcaactggcaggcccatctgcctctgggcgccgcggcatgtcctctcggccaggccctttgggcaggattagcgctgattcaggttcccgtatggctggtgctccagggccctcgcctcatgtgggcaggcatgtggggcagcaccaaagggctggggctggcattgttaagcgcttgggaacagcttggcctgagcgtggccatatggacggacctgttcctatcttgcctgcatggcttgatgctggtagccctcctcttagtggtggtcacatggagggtctgtcagaagagccactgtttccgtcttggccgccagctgtctaaagccttgcaagtaaattgtgttgtaagaaaattgcttgtacagctccgcagactctactggtgggtcgagacaatgaccgcacttacaagttggcacctggcctacttgataacgtggaccacctgtctcgcctcccatctactgcaagccgcctttgaacatactacccagctggcagaagcacaggaagtcgagccacaggaagtgtcagggagctctctgttaccatcgctttcggcctctagtgattctgaatcggggaccgttctacctgaacaggagacaccccgggaatag

SEQ ID NO: 211463 - DNA, 456 bp, synthetic construct
  misc_feature 1..456: note = Description of Artificial Sequence: Synthetic coding sequence
  source 1..456: mol_type = other DNA
atgaccaacgaggagcccctgcccaagaaggtgcggctgagcgagactgattttaaggtgatggcgcgcgacgagctgatcctgaggtggaagcagtatgaagcgtacgttcaggctctggaggggaaatacactgacctgaatagcaatgacgtgacaggactacgagaaagcgaagagaagttgaaacagcagcagcaagagtcggccagacgtgagaacatccttgtgatgcgactggcaaccaaggagcaggaaatgcaagagtgtactacacaaattcagtatttgaagcaggtgcagcagccttccgtggcacagctgcggagtactatggtagatcccgccattaatctgttttttctaaagatgaagggggagctggaacagactaaggataaattggaacaggcacagaacgagcttagcgcttggaaatttacacccgaccgatag

SEQ ID NO: 211464 - DNA, 1191 bp, synthetic construct
  misc_feature 1..1191: note = Description of Artificial Sequence: Synthetic coding sequence
  source 1..1191: mol_type = other DNA
atgaccaacgaggagcccctgcccaagaaggtgcggctgagcgagactgattttaaggtaatggcacgggatgagctgatcctccgctggaaacagtatgaagcatatgtgcaggccctggagggcaagtatacagacttgaatagtaatgatgtcacagggcttcgcgagtcagaagagaaactcaagcagcagcagcaggagtctgcaagacgggaaaacattttagtgatgcgactcgcgaccaaagagcaggagatgcaggagtgcactacacagatacaatatctgaaacaggtgcagcagccgagcgtggctcagctgcggagcacaatggtggatccggccatcaacctgttcttccttaagatgaagggcgaattggaacagactaaggacaagctcgaacaggcccagaatgaactgtccgcatggaaatttacacccgacagccagacaggaaaaaaattaatggctaagtgtcgcatgttgattcaagagaatcaggagctcggtcgccagctatcacagggacgaatcgcccagctggaggccgagctggcccttcagaagaaatactcagaggaactgaaatcatctcaggacgagctcaatgacttcattatacagctggacgaggaggtggagggcatgcagagtaccattctcgtcttgcagcagcagttgaaggagaccagacagcagttagctcagtaccagcagcagcagagccaggccagcgcgcccagcacgtcccgcaccaccgcaagcgaaccggttgaacaaagcgaagctacaagtaaagattgttccaggctgactaacggtccctcaaacggtagtagttcacgtcagaggacgagcggcagcggcttccacagggagggcaacactacagaagatgactttcccagtagccctgggaatggaaataagtcttccaactccagcgaggagcgcactggccgaggaggatccggctacgttaatcagctgagtgctgggtacgaatcagtcgactccccaaccgggagtgaaaatagcctgacgcaccagagtaacgacaccgattcttcacacgacccacaagaagagaaggcagtatctggaaaaggcaatagaactgtgggcagtcgccacgtccagaacgggctggatagcagtgtaaacgtgcagggctccgtcctctag

SEQ ID NO: 211465 - DNA, 1083 bp, synthetic construct
  misc_feature 1..1083: note = Description of Artificial Sequence: Synthetic coding sequence
  source 1..1083: mol_type = other DNA
atgaacgcccccctgggcggcatctggctgtggctgcccctgctgctcacatggcttacgccagaagtgaactcatcatggtggtacatgcgagcgacaggcggatcctccagggtgatgtgcgacaacgtccctggactggtgagtagccagcgacagttatgccacagacatccggacgtcatgagagccataagtcagggcgtcgccgaatggacagccgaatgccagcaccagtttcgacaacatcggtggaactgcaacacacttgatcgagaccattcactgtttggccgagtgctccttagatcctcgagggagagtgcatttgtctatgccattagcagcgcaggcgtggtgttcgcaattactagggcgtgcagtcagggcgaggtgaagagttgttcttgtgaccctaaaaaaatgggctccgccaaagactctaaaggaatcttcgactgggggggatgtagcgacaacattgactacggaataaagttcgctcgcgcctttgtggatgcaaaagagcgtaagggcaaggacgcccgtgctctgatgaacttgcataacaatcgcgcaggccggaaggccgtaaagagattcctgaagcaggaatgcaaatgccatggcgtttctgggtcctgcacactgagaacctgctggctggctatggccgactttcggaaaaccggtgactatctgtggcgaaaatacaacggggctatccaagtcgtaatgaaccaagatggtactggttttactgtggctaatgagaggtttaagaagcccaccaagaacgacttagtgtactttgaaaacagtccagactattgtatacgagatcgggaggccggctcactcggaaccgctggccgcgtgtgcaatctgaccagccgagggatggattcgtgtgaggtcatgtgttgcggcagggggtacgacaccagtcacgttaccagaatgaccaagtgcggctgcaaattccactggtgttgcgcagtgaggtgtcaagactgtctggaggctctcgatgttcacacctgcaaggcccccaagaatgccgactggaccactgccacatag

SEQ ID NO: 211466 - DNA, 1113 bp, synthetic construct
  misc_feature 1..1113: note = Description of Artificial Sequence: Synthetic coding sequence
  source 1..1113: mol_type = other DNA
atgggcctgtgggccctgctgcccggctgggtgagcgccaccctgctgctggccttagccgcgctccccgcagcactcgcagctaacagctcaggcagatggtggggtattgtgaatgtcgcaagttctacaaatcttctaacagacagtaagagtctgcaactcgttctagagccctcccttcagctactcagcaggaaacagcggcgcctcatccgccagaaccctggaatactgcacagcgtgtccggcggcctgcagtccgcagttcgagagtgtaaatggcaatttcgaaacaggcgctggaattgccccactgcaccgggcccacacctgtttggcaagattgttaaccgcggctgtcgagagacagcttttatatttgctattacgtccgctggtgttacacacagcgtcgctagatcctgcagcgaggggtccattgagtcttgcacttgcgactaccgccgaaggggtcccggagggcccgattggcattggggaggatgcagcgataatatcgactttggaaggctgttcggaagagagtttgtggacagtggtgagaagggcagggatcttcgcttcctgatgaatctccataacaacgaagccggccgcaccacagtgttcagcgaaatgcgccaggagtgcaaatgtcacggcatgtccggctcctgcacggtgagaacttgctggatgaggctcccgacccttcgggccgtcggggacgtactgcgcgataggttcgatggcgcctcaagagtgctctacggaaacaggggtagtaaccgggcctcgagagccgaactcctgcgcctggaacctgaggatcccgcccataaaccaccatcaccccacgatcttgtttacttcgaaaaatctccaaatttctgcacatatagcgggcggctgggaacagccggtacagctggccgagcctgtaacagttcctcccctgccctcgacggttgcgaactcctttgctgcggccgaggccacagaacgaggacacaaagagtgaccgaaagatgcaactgcactttccattggtgttgccacgttagctgccgaaattgcacgcacaccagggtgctgcacgaatgtctctag

SEQ ID NO: 211467 - DNA, 588 bp, synthetic construct
  misc_feature 1..588: note = Description of Artificial Sequence: Synthetic coding sequence
  source 1..588: mol_type = other DNA
tggcactggggcggctgcagcgacaacatcgacttcggccggctgttcggccgcgagttcgtggactccggtgaaaagggcagggatctgcggtttttgatgaatttacataataatgaagctggtcggaccacagtgttcagcgaaatgaggcaggagtgtaagtgtcacgggatgagtggcagttgcaccgtgcgcacctgttggatgcggttaccgactttgcgagccgtaggcgacgtgctgagagaccggtttgatggcgcatccagagtattgtatggtaacaggggctctaacagagcttccagagcggagctgctgagactcgaacccgacctcgtgtattttgagaaatctcctaacttctgtacttattctgggaggctcggcactgcaggtactgccggtagggcgtgtaactccagcagccctgcccttgacgggtgtgagttgttgtgctgcggcagggggcataggacgcggacacagagagtgactgagcgctgcaactgtacctttcattggtgctgccacgtgagttgtcgcaattgcacccacacaagggtcttgcacgaatgcctttag

SEQ ID NO: 211468 - DNA, 1254 bp, synthetic construct
  misc_feature 1..1254: note = Description of Artificial Sequence: Synthetic coding sequence
  source 1..1254: mol_type = other DNA
atgggcagcgcccacccccggccctggctgcggctgcggccccagcctcagcctaggccagccctctgggtgctgttgtttttcctgcttctgctggcggctgccatgccaaggtccgccccaaatgatatactcgatttacggctgccacctgagccagtcctgaacgccaacacagtatgtctaaccctgcccgggcttagtagacgacagatggaagtgtgcgtgcggcatcctgatgtggcggcctccgctatacaggggatacagatcgccattcacgaatgtcaacatcagtttagagaccaaagatggaattgctcttctctcgagactagaaacaagattccctatgaatcaccgatattctcacgaggattcagggagtctgcctttgcttatgccattgccgccgccggggttgtgcatgcggtgagtaatgcatgcgcactagggaagctcaaggcttgtgggtgcgatgctagccggaggggggatgaggaggcattcaggaggaagctccacagactccagcttgacgcactccagagaggcaaaggactcagccacggggtccccgaacatccggccctgcccactgcctctcccggccttcaggattcgtgggagtggggcggatgtagccccgacatgggcttcggcgagcgctttagcaaggattttctggacagcagagagccacacagagatatccatgcaaggatgcgcttacacaataatagggtgggccggcaagcggttatggagaatatgagaagaaaatgtaaatgtcacggaacctcggggtcttgtcaattaaaaacctgctggcaagttacacctgagttccggactgtgggcgccctcttgcgtagccgattccacagagctactctcatcaggccacacaacaggaacggaggccagctggaaccaggacctgctggtgcgcctagtcccgccccgggtgctcccggcccccgacggcgtgccagtcccgccgatctcgtgtactttgaaaagtcccctgacttctgcgagcgggaacccagactggattccgcaggaacagtgggccgactttgcaataaatcttcagccggcagcgacggttgtgggtccatgtgctgcggtaggggacataacatcctccgacaaaccagatcagagcgttgccattgtcggttccattggtgctgttttgtggtatgcgaggagtgtaggatcacggaatgggtgagcgtatgcaaatag

SEQ ID NO: 211469 - DNA, 1170 bp, synthetic construct
  misc_feature 1..1170: note = Description of Artificial Sequence: Synthetic coding sequence
  source 1..1170: mol_type = other DNA
atgctggaggagccccggccccggcccccccccagcggcctggccggactgctgtttctcgcgctctgctctcgggccttgtcaaatgaaattctgggcctgaagctgcctggtgaaccacctcttaccgccaatactgtttgcttaacacttagcggcctatctaaacggcaactgggtctgtgtctaagaaaccccgatgttacggcatctgctcttcaaggtctccacattgcagttcacgaatgccagcaccagcttcgagatcagcggtggaattgctctgctctggaaggagggggaaggctgccccatcattcagccattttaaaacgcggtttccgggagtctgcgttctcattctcaatgctagcagcaggcgtgatgcacgctgtggctacggcctgttcactcgggaagcttgtttcttgtggctgcgggtggaaagggtcaggtgagcaggacagactcagagccaagctgctccaacttcaagctctttcccgcggaaaatcgtttcctcattctcttcctagcccaggccccggctcttccccttctccagggccgcaggatacgtgggagtggggaggttgcaaccacgacatggacttcggcgagaaattcagcagggacttcctggatagtagagaggccccacgagatatccaagccaggatgagaatccacaataatcgggttgggagacaagttgtgacagaaaaccttaagcggaagtgcaaatgtcatggcacaagcgggtcctgccagtttaaaacgtgttggcgtgcagctcctgaatttcgtgctgtcggcgctgcacttcgcgagaggctcggccgcgcaatatttattgacactcataaccgcaatagcggcgctttccaaccacggttgagacccaggcggctcagcggggaactcgtctactttgagaaatcgcccgacttttgcgaacgggatccaactatgggaagccctgggacaagggggcgagcatgcaataagaccagccgacttttagacggatgtggctcgctgtgctgtggcagaggacacaacgttcttcgccagacacgggttgaaagatgccattgtagattccactggtgctgctacgtgctctgcgacgagtgtaaagtaacagaatgggtgaatgtgtgcaaatag

SEQ ID NO: 211470 - DNA, 576 bp, synthetic construct
  misc_feature 1..576: note = Description of Artificial Sequence: Synthetic coding sequence
  source 1..576: mol_type = other DNA
atgctggaggagccccggccccggcccccccccagcggcctggccggtttgcttttccttgccctttgcagccgcgccctcagcaacgaaattctgggcttaaagttgcctggcgagcccccactaacagccaatacagtttgtttgactctctccgggcttagtaagagacagctgggcttgtgccttagaaatcccgatgtgactgcatctgccctgcaaggcctccacattgccgtccatgagtgccagcatcagcttcgagaccagaggtggaactgctcagccctggagggaggagggagattgcctcatcacagcgccatcctgaagcggggcttccgggaatctgcattcagttttagtatgctggccgccggtgtcatgcatgccgtggcgactgcgtgttccctgggcaaactggtttcttgtggatgcggttggaaggggtctggcgaacaggatcggctacgagcaaagctgctacagctgcaagccctcagtcgcggcaaactgcccggcaccagccggcacgagtgtgagagcacaacaaccgggtggggcgccagatggtag

SEQ ID NO: 211471 - DNA, 309 bp, synthetic construct
  misc_feature 1..309: note = Description of Artificial Sequence: Synthetic coding sequence
  source 1..309: mol_type = other DNA
atgctggaggagccccggccccggcccccccccagcggcctggccgggctgcttttcctcgctctctgctcaagagccctgagcaatgagatactgggcctcaagctgcccggggagccgcctctcactgctaacacagtatgcttgacgctttcagggcttagcaagcgacagctcggactgtgcctgagaaatccagacgtgacggcctctgccctgcaaggcctgcacatcgcagtgcatgagtgtcagcatcagttgcgggaccaacgttggaattgcagtgcacttgaaggagggggccggtag

SEQ ID NO: 211472 - DNA, 354 bp, synthetic construct
  misc_feature 1..354: note = Description of Artificial Sequence: Synthetic coding sequence
  source 1..354: mol_type = other DNA
atggccctggagaccgtgcccaaggacctgcggcacctgcgggcctgtctgctgtgcagtttggtcaaaacgatagatcagttcgagtacgatggctgcgacaactgtgacgcatacctccaaatgaagggcaatagggaaatggtgtatgactgtacatcgtctagtttcgatgggattattgccatgatgtctccagaggatagctgggtaagtaaatggcaacgagtgtccaattttaagcctggtgtgtatgccgttagtgtcaccggccgactgccacaggggattgtgagagagttgaagtccaggggcgtggcctacaaatcgcgcgacacagcgatcaagacctag

SEQ ID NO: 211473 - DNA, 1059 bp, synthetic construct
  misc_feature 1..1059: note = Description of Artificial Sequence: Synthetic coding sequence
  source 1..1059: mol_type = other DNA
atggcccccctgggctacttcctgctgctgtgcagcctgaagcaggcgttgggctcatatccaatttggtggagcctggctgtgggccctcagtatagctcgctcgggagccagcctatcctgtgtgccagtatcccaggcctggtgcccaagcagctgaggttctgccggaattacgtggagatcatgccctcagttgctgagggtatcaagattgggatacaggaatgtcaacaccagttccgaggtagaagatggaattgcacaaccgttcatgacagcttggccatcttcggacccgtactggacaaagccaccagagaatctgccttcgtacacgctatcgcttccgccggcgtggcattcgcggtgactaggagttgcgcagaggggacggccgccatttgtggctgtagctcacggcaccaaggcagtcctggtaaaggatggaaatggggtggttgctcggaggatatcgaatttgggggcatggttagtagagagttcgcagatgcgcgcgagaaccggccggacgctcgctcggctatgaatcggcacaataacgaagcgggccgacaagcgatagcatcccatatgcacctgaaatgtaagtgtcatgggctcagtggatcctgtgaagtgaagacctgctggtggagccaaccggacttcagggccataggagactttctgaaagacaagtatgacagtgcctcggagatggttgtagagaagcaccgtgaatctcgcggctgggtggaaactctccggcctcggtatacctactttaaggtcccaaccgagagggatctagtgtattacgaggcatctcccaacttttgtgagcccaatcccgagacaggaagcttcgggacccgggacaggacctgcaatgtgagcagtcacggcattgatggatgtgatctgttgtgttgcggccggggacacaacgcaagggccgagcggcgaagggaaaagtgtcgctgcgtcttccactggtgctgctacgtatcttgtcaggaatgcactcgcgtctacgacgtgcacacttgtaaatag

SEQ ID NO: 211474 - DNA, 1158 bp, synthetic construct
  misc_feature 1..1158: note = Description of Artificial Sequence: Synthetic coding sequence
  source 1..1158: mol_type = other DNA
atggcccccctgggctacttcctgctgctgtgcagcctgaagcaggcactagggtcctatcccatctggtggagcctcgccgtggggcctcagtattcttccttgggcagccagccgatcctgtgcgcctcgatccctggcctcgtgccgaagcagctcaggttttgcaggaactatgtagaaatcatgccgtcggtagctgagggcatcaaaataggcatccaagagtgtcaacaccagtttcggggaaggcggtggaactgtacaaccgtacacgattctttggcgatcttcggaccggttctggacaaagcaaccagggagtccgcatttgttcacgccattgcctctgctggggtggcttttgcagtgactagatcttgtgcagaaggcacagcggcgatttgcggatgttcgtcaaggcatcaaggctctcccgggaaaggatggaagtggggggggtgcagcgaagatatcgaattcggcggcatggtcagtagagaattcgccgacgcacgtgagaatcgcccggacgcgcggagtgccatgaaccggcataataatgaggcaggcagacaggccattgccagccacatgcacctcaaatgtaagtgccatggtctgagcggatcttgcgaggtgaagacttgttggtggtcacagcccgactttagagctattggggatttcctgaaagataagtacgattctgccagtgagatggtggtcgagaagcacagggaatctcgagggtgggtggaaactctgcggcctcgatatacatatttcaaagtccccacagaacgcgaccttgtctactacgaagccagtcccaacttctgcgaaccaaacccggaaaccggttctttcggaaccagagatagaacttgcaacgtgtcatcccacggtatcgatggatgtgatctgctctgctgtggtaggggtcataacgcaagagcagagcgtagacgggagaagtgccggtgcgtgttccattggtgctgctatgtgtcctgccaggaatgcacgagagtttatgacgtccatacttgcaagaaccctggttctcgcgcaggcaatagtgcgcatcagcctccacacccacagccacccgtcaggttccatcccccactgagaagagctggaaaagtcccatag

SEQ ID NO: 211475 - DNA, 1056 bp, synthetic construct
  misc_feature 1..1056: note = Description of Artificial Sequence: Synthetic coding sequence
  source 1..1056: mol_type = other DNA
atgagcccccggagctgcctgcggagcctgcggctgctggtgttcgccgtgttcagcgcggctgcctccaactggttgtacctggctaaactctcctccgtgggcagtatatctgaggaggaaacatgcgagaaactaaagggtctgatccaaaggcaagtgcagatgtgtaaacgaaatcttgaggtcatggattcagtgagacggggcgcccaactcgccatagaagagtgtcagtaccaatttcgtaatcggaggtggaactgctcgaccttagactcactgcccgtgttcgggaaggtcgtgacccagggtaccagggaggcagcctttgtttacgccatcagctcggcaggagtggcatttgccgtaacccgggcctgcagctccggggaactggaaaagtgtgggtgtgacagaacagtgcacggagtgagcccacaagggttccagtggtcgggttgttctgacaatatcgcttatggggtggccttcagtcagtctttcgtggacgtgagggagaggagcaagggcgcatccagctcacgggccctcatgaatctgcacaacaacgaggccgggagaaaagcgattctgacccacatgagagtagaatgtaaatgtcacggagtgagtggaagctgcgaggtgaaaacatgctggagagcagtgcctcctttcaggcaggttggccatgctcttaaagagaagttcgacggagcaaccgaagttgaacccagacgtgttggatcgagccgtgccctagttcccaggaacgctcaatttaagccacacacagatgaagatcttgtgtatctggaaccatctccagatttttgtgagcaagatatgagaagtggggttctgggcacccggggtcggacctgtaataagacctcaaaggcaatagacggctgcgaactgctttgttgcggtcgagggtttcacactgcacaggtcgagttagctgagcggtgcagctgtaagttccattggtgctgcttcgtgaagtgtagacagtgtcaaagactggttgaactacatacatgcaggtag

SEQ ID NO: 211476 - DNA, 528 bp, synthetic construct
  misc_feature 1..528: note = Description of Artificial Sequence: Synthetic coding sequence
  source 1..528: mol_type = other DNA
atgagcccccggagctgcctgcggagcctgcggctgctggtgttcgctgtgttttcggcggccgcaagcaattggctgtatctggccaagctgagtagtgtgggttcgatctccgaagaagaaacatgcgagaagctcaaggggctgattcagagacaggttcagatgtgcaaaagaaacctggaagttatggattccgttagacgtggcgcacagctcgctattgaagagtgccagtaccagttccgcaatcggaggtggaactgctcaacactggactctctcccagtcttcggtaaagtagtgacacagggaggaaaggcttggcatgggggagactctggatgccatcttcttaccgaatcccggtctggtgaaaggacccagaggaggaaggagggcggctccctgggtcagtgttggcccgaggctatagtggggacccaggaccccatgaggagccccccctatttgtggggtcggaaccagggaggcacccacaccggaagtgcatccgaggggcactag

SEQ ID NO: 211477 - DNA, 453 bp, synthetic construct
  misc_feature 1..453: note = Description of Artificial Sequence: Synthetic coding sequence
  source 1..453: mol_type = other DNA
tgatacctggccaagctgagcagcgtgggcagcatcagcgaggaggagacgtgtgagaagctgaaaggcctgattcagcggcaggtacagatgtgcaaaagaaacttggaagtgatggatagcgtgagacgcggcgcccagctggccatcgaagagtgtcaataccagtttcgcaatcggagatggaactgcagcacccttgacagtctacccgtgttcggaaaagttgtgacacaggggggaaaagcctggcacgggggcgactccggatgccatctgctgacagagtcacgcagcggagagagaacccagcgaaggaaagaagggggaagtctgggccaatgctggccagaggcaattgtgggcacccaggaccccatgaggtctccaccctacttgtggggacggaatcagggaggcactcacacagggtccgctagtgagggccactag

SEQ ID NO: 211478 - DNA, 159 bp, synthetic construct
  misc_feature 1..159: note = Description of Artificial Sequence: Synthetic coding sequence
  source 1..159: mol_type = other DNA
atgtgcaagcggaacctggaggtgatggacagcgtgcggcggggcgcccagcttgccattgaggagtgccagtaccagtttcgcaacagaaggtggaactgttcaacacttgactctctgccagtcttcggaaaggtggtcacccaaggcggaaagtag

SEQ ID NO: 211479 - DNA, 891 bp, synthetic construct
  misc_feature 1..891: note = Description of Artificial Sequence: Synthetic coding sequence
  source 1..891: mol_type = other DNA
atgtgcaagcggaacctggaggtgatggacagcgtgcggcggggcgcacagttggccattgaagagtgtcagtaccagttcagaaaccgtagatggaactgttccacattggattccctgccggtcttcgggaaagttgtgacccagggcacaagagaagccgccttcgtgtatgctatctcctcagcaggagtcgcctttgctgtgactcgcgcttgctccagtggtgagctggagaagtgtgggtgtgacagaaccgtccatggcgtgtcaccccaaggcttccagtggtctggatgttcagataatattgcttatggtgtggccttctcccagagcttcgttgacgtcagggagcgctcaaagggggcctcctcctcccgcgcgttaatgaacttgcacaataatgaggctggccggaaggctattctaacccatatgagagtagagtgtaagtgtcatggggtgtctggtagctgcgaggtgaagacctgctggcgggcggttccacccttccggcaggtcggacatgccttgaaagagaaatttgatggagccaccgaagtagagcctcggcgggtgggaagctctcgagcactggtcccacggaatgcccaatttaagccacacacggacgaagacctggtgtacctggaaccaagtccggacttttgtgaacaagacatgagatctggggtgttggggacccgcggtcgaacatgcaacaagacatccaaagccatcgatggctgtgaactcttgtgctgtggaagaggattccacactgcccaggtcgagttagccgagcgatgctcatgtaagttccattggtgctgcttcgtgaagtgccggcaatgccaacgactcgttgagctgcacacttgtaggtag

SEQ ID NO: 211480 - DNA, 1710 bp, synthetic construct
  misc_feature 1..1710: note = Description of Artificial Sequence: Synthetic coding sequence
  source 1..1710: mol_type = other DNA
atgaaggtgctgctgcggctgatctgcttcatcgccctgctgatcagttcgctagaagccgacaaatgcaaggagagagaagaaaagatcatcctagtgagcagtgccaacgaaattgacgtccgtccttgccctttgaatcctaacgaacataagggaacaatcacatggtataaggacgattctaagactccggtatcaacggagcaggcatcccgaatccaccaacacaaggagaaactgtggttcgtgcccgctaaggtggaggactctggccactactactgtgttgtgcggaacagctcatattgcctgaggatcaaaatctcagctaaattcgtggagaatgagcccaacctgtgttataacgcgcaggccatcttcaaacaaaagctgccggtcgcaggggatggtggcttagtgtgtccttatatggaatttttcaaaaatgaaaataatgaacttcctaaacttcaatggtacaaagattgcaaacctcttcttctcgacaatattcacttctcgggtgttaaggacagattaattgtcatgaacgttgcggaaaaacacaggggcaattatacttgtcacgcttcttacacctacttgggtaaacagtaccccataacccgtgtcatcgagttcataacactagaagaaaataagccaacacgtccagtgatcgtttctcctgcgaacgaaacaatggaggtggacttaggttcccaaatccaactgatatgcaatgtcacaggccagttgagcgatatcgcttactggaagtggaatggtagcgtcatagatgaggatgacccagttctgggagaggattactactctgtggagaaccctgcaaacaagagacgctctaccttgatcacagtgctgaacattagcgaaattgaatctagattctacaagcatcctttcacttgctttgctaagaacacccacggcatcgatgcggcgtacatccagctgatctatccggtcaccaattttcagaagcacatgatcgggatttgcgtgaccctgaccgttatcattgtttgtagcgtgttcatctataagattttcaagatcgacatcgttctgtggtacagggatagctgttatgattttctcccaattaaagccagcgatggcaagacatacgacgcgtacattttatacccaaaaaccgtcggcgagggaagcacatccgactgtgacatcttcgttttcaaagttcttcccgaggttctagagaagcagtgcggctacaaactgttcatctatggccgagatgactacgttggcgaggacatagtggaagtgatcaacgaaaatgtcaaaaagtcccggcggctgataattattctcgtcagggaaaccagtggcttcagttggttggggggcagcagcgaggaacaaattgctatgtacaatgccctggttcaggatggcatcaaggtcgttctcctggaactcgagaaaatacaggattacgagaagatgccagaaagtatcaaattcataaaacagaaacacggtgctattcgatggagcggcgattttactcaggggccgcagagcgcaaagacgcgcttctggaagaatgtgagataccacatgcctgtccagcggcgctcacctagttctaaacaccagttgttgtcccctgcgaccaaagaaaagttacagcgggaagcacacgtacccctcggctag

SEQ ID NO: 211481 - DNA, 1050 bp, synthetic construct
  misc_feature 1..1050: note = Description of Artificial Sequence: Synthetic coding sequence
  source 1..1050: mol_type = other DNA
atgaaccggaaggcccggcggtgcctgggccacctgttcctgagcctcggcatggtatacttgcgcatcggtgggttctcttccgtggtggctcttggggcaagcattatttgtaataagatcccagggctggcaccccgccagcgggccatctgccagtcaaggccagatgccattattgtgatcggagagggctcacagatggggctggacgagtgtcagtttcaatttaggaacggccgatggaactgctctgcactgggagaacgcacagtgtttggcaaggagctgaaggtggggtccagggaagccgctttcacttacgctatcattgcggccggtgtggcccatgcaatcactgctgcgtgcactcaggggaatcttagtgactgtggttgtgacaaggaaaagcagggacagtaccacagggatgagggatggaagtggggcggatgcagtgccgatataagatacggcatcggattcgcgaaggttttcgtggacgctcgcgagatcaagcagaacgcacgcacactgatgaacctgcacaacaatgaagctggcagaaaaatactggaagagaatatgaagctggagtgtaaatgccatggcgtttctggttcatgcactacaaagacatgttggacgacactgccacagttccgggagctcggctatgtcctcaaagacaagtacaatgaggccgtgcatgtcgaaccggtgagagccagtcgtaacaaaagacccacatttctgaagatcaaaaagcctcttagttacaggaagcctatggacacagatctcgtttatatcgagaagtctccaaattactgcgaagaggaccccgtcactgggtccgttggcactcagggcagggcttgtaataagacagccccacaggcttctgggtgcgacctcatgtgttgtggccgcgggtacaacacccatcagtacgcccgggtctggcagtgcaattgtaaatttcattggtgctgctatgtgaaatgcaacacctgctccgaacgcactgagatgtacacatgtaagtag

SEQ ID NO: 211482 - DNA, 1050 bp, synthetic construct
  misc_feature 1..1050: note = Description of Artificial Sequence: Synthetic coding sequence
  source 1..1050: mol_type = other DNA
atgcaccggaacttccggaagtggatcttctacgtgttcctgtgctttggcgtgctttatgtgaaacttggggccctgagcagcgtggtggcactgggagcaaatattatttgcaacaagattccaggcctggcaccccgccaacgggcaatctgccagagccgaccagacgcaattatagttataggggagggcgcccagatgggaatcaatgagtgccagtaccaatttcgcttcgggcggtggaactgttccgccctcggcgaaaaaactgtgttcggccaagaactgcgcgtcggctcgcgggaagctgccttcacgtatgccattacagctgccggtgtggcacacgctgtgacggcggcttgctcacagggcaatctgtccaattgcggctgcgacagagagaaacagggatactacaaccaggctgaaggctggaagtgggggggatgttcagccgacgtgcggtatggcatcgattttagccgccggttcgtagatgcaagggaaatcaagaagaacgcacggcgattgatgaacctgcacaacaacgaggcgggcaggaaagttctagaagacaggatgcagctcgaatgtaaatgccatggggtgtctggttcatgtacaacaaagacatgttggactacccttcccaaatttcgggaagtgggccacctgcttaaggagaaatataacgctgcggtacaggtcgaagtcgtacgagcttctagattacgacaacctacattcttgagaatcaagcaactgaggagctatcagaaacccatggagacagatctcgtgtacatagaaaaatccccaaattattgtgaagaggatgctgctacaggttccgtcgggacacagggacggttgtgcaatcggacctcacccggtgctgatggctgcgatacaatgtgttgtggaagagggtataatacacatcagtacacaaaagtctggcagtgcaactgtaaatttcactggtgctgtttcgtaaaatgcaatacttgcagcgaaagaaccgaagtcttcacatgcaaatag

SEQ ID NO: 211483 - DNA, 1062 bp, synthetic construct
  misc_feature 1..1062: note = Description of Artificial Sequence: Synthetic coding sequence
  source 1..1062: mol_type = other DNA
atgctgctgctgagcccccggagcgccctggtgagcgtgtactgccctcagatttttctgttactgtcttccggtagctaccttgccctgtctagtgtggtcgctttaggcgccaatattatttgcaataagattcctggcctcgcccccagacagcgggccatctgtcaaagcagacccgacgcaattattgtgattggcgagggggctcaaatgggtattaatgagtgccagtaccaatttcgctttggcaggtggaattgtagtgcccttggggaaaagaccgtgtttggtcaggagttgcgcgtgggatctcgcgaagcggcatttacttatgctatcacagcagccggcgtagcgcacgctgtcacagcagcctgctcccaagggaacctgtcaaactgcggttgtgaccgggaaaagcaggggtattataatcaggccgaaggctggaagtgggggggatgctcagctgatgtgagatacggcattgattttagcagaagatttgtggacgccagggaaatcaaaaaaaacgcacgccggttgatgaatctgcacaacaatgaggctggacgtaaggtgctggaagatcggatgcaattggaatgtaagtgtcacggtgtgagcggctcctgcaccaccaagacatgttggacaacactgccaaaatttcgcgaggtcggccacctactgaaagagaagtataacgcagccgtgcaggtggaagtggtgcgcgcttcaaggctccgccagcctaccttcctcaggattaagcagctgcgaagctaccagaaaccaatggagaccgacctggtctacattgagaaatcacctaactattgtgaggaggacgctgctaccggctccgttggcacccagggccgactctgtaaccgaaccagcccaggcgccgacggatgcgatacaatgtgctgcggcagaggatataacactcaccagtacaccaaggtgtggcaatgcaactgcaagttccattggtgctgctttgttaagtgtaatacatgctcagaacgtactgaggtcttcacatgcaaatag

SEQ ID NO: 211484 - DNA, 618 bp, synthetic construct
  misc_feature 1..618: note = Description of Artificial Sequence: Synthetic coding sequence
  source 1..618: mol_type = other DNA
atgcaccggaacttccggaagtggatcttctacgtgttcctgtgcttcggcgttctgtatgttaaactcggcgcactttcctccgtggtagcccttggagctaatattatctgcaataaaatccccggcctcgcacctaggcagagggctatctgtcagtcgagacccgacgctatcattgtgataggagagggcgctcagatggggattaatgaatgccaataccagttcagatttggacggtggaactgcagcgctctgggcgagaagaccgtcttcggtcaggagctgagggtcggaagcagagaggccgcgtttacgtacgccatcacagccgccggagtcgcccatgccgtgacggctgcttgctcacaagggaacttaagcaactgcggttgcgaccgggaaaaacagggctattacaaccaggcagaggggtggaagtggggcggatgttcagccgacgttcgctatggcattgattttagtagacgattcgttgacgcacgagagatcaagaaaaacgcaaggagattgatgaacttgcacaacaatgaagcagggcggaaagggctcctcggacagccccgagttaccagcagccccctgtttccgtag

SEQ ID NO: 211485 - DNA, 1002 bp, synthetic construct
  misc_feature 1..1002: note = Description of Artificial Sequence: Synthetic coding sequence
  source 1..1002: mol_type = other DNA
atgagcgccccccccttctaccgggccctgagcagcgtggtggccctcggggcaaacattatctgcaacaaaattcctgggctggcaccccgtcaaagagccatttgccagtcccggcccgacgcgataatcgtcataggcgaaggtgcccaaatgggcataaacgaatgccagtaccaatttagattcggccgctggaattgtagcgccttaggggaaaagactgttttcgggcaggagcttcgggtgggaagccgggaggctgcattcacttacgcaattactgctgcgggggtcgcccacgctgtgacagccgcgtgctcacaaggcaatctcagtaactgcgggtgcgatagagaaaagcaaggatattacaaccaggctgagggctggaagtggggcggctgttctgcagatgtgaggtatggcatcgatttcagtcggaggtttgtggacgctcgtgagatcaaaaagaatgctaggaggttgatgaatctgcacaacaacgaggcaggccggaaagtactggaagaccgcatgcagttagagtgcaaatgccacggggtgagcggcagttgcaccactaagacctgctggacaaccttgcctaagttccgcgaagttgggcatctgttgaaagagaagtacaatgctgcagtgcaagttgaagtagtacgagcaagtagactacgccagccaacctttctgcgaatcaagcagctgcggagctatcaaaaacctatggagaccgacttagtctatatagagaagtctcccaattattgcgaggaagatgcggctactggcagtgttggcacccagggacgactgtgcaacaggacctcacctggcgctgacggatgtgataccatgtgctgtggcagaggctataatacacaccagtatactaaagtttggcagtgcaattgcaagttccattggtgctgtttcgtgaaatgtaatacatgctccgagcgaacggaggtgtttacctgcaagtag

SEQ ID NO: 211486 - DNA, 174 bp, synthetic construct
  misc_feature 1..174: note = Description of Artificial Sequence: Synthetic coding sequence
  source 1..174: mol_type = other DNA
atgggcatcaacgagtgccagtaccagttccggttcggccggtggaactgctcagccctgggggaaaaaaccgtctttggacaagagcttcgggtggggtcgagggaagccgcctttacatacgctattactgcagcgggcgtcgcccacgctgtgactgcagcctgtagttag

SEQ ID NO: 211487 - DNA, 1056 bp, synthetic construct
  misc_feature 1..1056: note = Description of Artificial Sequence: Synthetic coding sequence
  source 1..1056: mol_type = other DNA
atgttcctgagcaagcccagcgtgtacatctgcctgttcacctgcgtgttacagctgtcgcactcgtggtccgttaataatttcctgatgaccggtccgaaggcctaccttatctacagctccagcgttgcggccggagctcagtctggaatcgaggagtgcaaataccaattcgcttgggacaggtggaactgccctgagagggctctgcagctctcaagccatggtggacttagatcagcaaaccgcgagaccgccttcgtacacgcaatcagctccgcaggagttatgtatactctgactcggaactgttctctgggtgattttgataactgcggatgcgatgactcacgcaacggtcagctgggtggacagggctggctgtggggcgggtgttctgacaacgtgggatttggagaagctattagcaagcagtttgtggatgcactcgaaacgggtcaggacgcccgagcggctatgaacctgcacaacaacgaggccgggcgcaaggccgtgaaaggcacaatgaagcggacctgcaagtgccacggcgtatccggcagctgcactacgcagacctgttggctacagctgcctgagttccgggaggtgggggcccacctcaaggaaaagtatcatgctgccctgaaggtggacttgctacagggcgccggaaatagcgcggcaggaaggggagctatcgccgacactttccgctccatcagcacgagagagctcgtgcacttggaggattcccccgattattgtctcgagaataaaactctggggctgctcggtaccgaagggcgagagtgcttgcgacgtgggcgtgccctgggtagatgggaaaggaggtcctgtaggagattatgcggtgattgcggccttgctgtcgaggagaggcgagctgaaacagtgagttcttgtaattgcaagttccactggtgttgtgcggtgcggtgtgaacagtgtcgccgacgcgtgacaaaatatttttgcagcagagccgagaggcctagagggggtgcagctcataaaccggggcgcaagccatag

SEQ ID NO: 211488 - DNA, 1209 bp, synthetic construct
  misc_feature 1..1209: note = Description of Artificial Sequence: Synthetic coding sequence
  source 1..1209: mol_type = other DNA
atggacctggaccgggccagcctggacctgatgatccggctgctggaactggaacaggacgcctcatcagcaaagctcctgaacgagaaggacatgaacaagataaaggaaaaaattcgacggctgtgcgaaactgtccacaacaagcatctggacctggaaaatattaccaccggtcacctggcgatggagactctgttgtctttgaccagcaagagagctggggattggttcaaagaagagttgcgcctgctgggggggttagaccacattgtggataaggtgaaagaatgcgtggaccacctctcaagggacgaagatgaggagaaactagtggccagtctttggggagctgagcgctgtctgcgcgttctggagtcagtgactgtgcacaaccccgagaaccaatcgtatctcatagcctacaaggactcccagctcattgtaagctcggctaaggccctgcagcattgtgaggagcttatccaacagtacaatagggctgaggacagtatttgtctggcggattctaagccactgccgcatcagaacgtcacgaaccatgtcggaaaagccgtggaagattgcatgagggccattatcggagtcctgctgaaccttacgaatgacaatgaatggggttctacgaagactggggagcaagacggtctgattggtaccgcgttgaattgtgtgttgcaggtacctaaatacctgccccaggaacagcgctttgatataagggtgctgctgtttttggagcgggaaagggccgcgcaactagccgagagtaaaaccgacgagttgataaaagatgcccctaccacacagcacgacaaaagtggtgagtggcaagagacatcaggcgaaatacagtgggtctccacagaaaaaactgatggtaccgaggaaaaacacaagaaggaagaggaggatgaggagttggatttgaataaggccctccagcacgctggtaagcatatggaagattgcatcgttgctagctacactgctcttttgctagggtgtttatgtcaggagtcccctattaacgtgacgacggtacgcgagtacctgcccgaaggcgacttttcaatcatgactgaaatgctaaagaaattcctcagttttatgaacctgacatgcgccgtaggcactacgggccagaagagcatctctagggtgatcgagtacttggagcattgctag

SEQ ID NO: 211489 - DNA, 3573 bp, synthetic construct
  misc_feature 1..3573: note = Description of Artificial Sequence: Synthetic coding sequence
  source 1..3573: mol_type = other DNA
atgaccagccggttcggcaagacctacagccggaagggcggcaacggatcctctaagttcgacgaggtgttcagcaataaacgaaccacattatcaaccaaatggggtgagactacgtttatggccaaactgggacagaagcgacctaattttaagcccgacatccaggagatccccaaaaaaccaaaagttgaggaggaatccactggtgacccatttggctttgattcagatgacgagtccttgccagtctccagtaaaaatctagcccaggtcaagtgttcctcttactccgagagttccgaggccgcccagctggaagaggtgacttccgtgcttgaggctaacagcaaaatttctcatgtcgtggtcgaagacacagtggtctccgataaatgtttccctcttgaagataccctactcgggaaggagaaatctacgaaccgtatcgtggaggatgatgccagtatcagttcttgcaacaaattgatcaccagtgacaaggtcgagaactttcatgaagaacatgagaaaaacagtcaccacatccacaagaacgccgacgacagcacaaaaaagcccaatgccgagaccacagttgcttctgagatcaaggagacaaacgacacctggaattcccaattcggaaaaagacctgaaagcccttcagagatcagcccgatcaaaggttccgtgcgaaccggccttttcgaatgggataacgacttcgaggatataagatcagaggactgtattttatccctagacagcgaccctctgctagagatgaaagatgacgattttaagaaccggctggaaaacctgaatgaagcaatcgaggaggacatcgtgcaatcagtgctgaggcctacgaattgccggacctattgtcgggctaataagaccaagtccagccagggagcctcaaacttcgacaaactcatggacgggactagtcaggcgctagccaaagccaacagcgaaagtagtaaggatggattgaaccaggccaaaaaaggcggagtgtcatgcggcacctccttcagaggcaccgttgggcgaactcgggactacacggtcttacacccatcttgtctgtctgtgtgcaacgtaaccatccaggatacaatggagcggtccatggatgagtttaccgcaagcactccagcagacttgggggaagcaggccgactccggaagaaggccgacatcgccacatccaagacaacaacccggttccgccctagcaatactaaatctaagaaagacgttaagctcgaatttttcgggttcgaggaccacgagactggcggtgacgagggggggtcagggagcagtaactacaaaattaagtatttcggttttgacgacttgagcgagtccgaggacgatgaagacgatgactgtcaggtggagcgtaagacctcaaagaagcggacgaagaccgcaccgtccccttccctacaacctcctcctgagagcaacgataatagtcaggatagtcagagcggcaccaataatgcggaaaacttggatttcaccgaagacctgccaggagtgcctgaatccgtaaaaaagcctataaacaaacagggggacaagtcaaaagaaaatacaaggaaaattttctccgggccaaagcgatcacccaccaaggcggtgtacaatgcccgacattggaaccaccccgattctgaagagttaccaggacctccagtggttaaaccacagagcgtcaccgtgcggttaagtagtaaagagccaaaccagaaggatgacggggtcttcaaagcacctgccccccctagcaaggtaataaagaccgtgaccatccctacacagccgtaccaagatatcgtgacagctctcaagtgtcgaagagaggacaaagagctgtataccgtggtccagcatgtgaagcatttcaacgacgtcgtagaattcggagaaaaccaggagttcactgacgacattgagtatctactttcaggtctcaaaagcactcagcctctaaacacacgctgcctaagtgtgatttctctcgccacaaagtgtgccatgccttcttttaggatgcacctgagggctcatggcatggtggcaatggtatttaagaccctagacgattcccagcatcaccaaaatctgagcctgtgtaccgctgcgttgatgtatatccttagtagggatcggttgaatatggatctggaccgagcgtctctcgatttgatgattaggctgttagaactagagcaagatgccagttcggctaaacttcttaacgaaaaggacatgaacaaaatcaaggaaaagatccgccgcttatgtgaaactgtgcacaacaagcatcttgatcttgagaatattaccacgggacacctagctatggaaaccctgctatcattaacaagcaagcgtgctggggattggttcaaggaagaactgcgcttactggggggcttggatcacatcgtggacaaggtcaaagaatgcgtggatcacctatctagggatgaggatgaagagaaactggtggctagtttgtggggagccgagaggtgcctcagggtgctggagtctgttactgtgcataaccccgagaatcagtcttacctgattgcatacaaggatagtcaactcatcgtgtcgagcgccaaggcactgcagcattgcgaagagctgattcaacaatataatcgagcagaggattctatctgcctggccgactccaagcctctccctcaccagaacgtgacgaatcatgtgggaaaagcagtcgaagactgtatgagggcaataatcggtgtcctgctgaatttgaccaatgataacgagtgggggtctacaaagaccggcgagcaggatgggttaattgggacggcccttaattgcgttctgcaagttcccaagtacctgcctcaagaacagcgctttgatatcagggtgctgggactgggactactgattaatctggtggagtattccgcaagaaatcgccactgccttgttaatatggagacctcttgtagttttgatagttccatttgttccggcgagggtgatgactcacttcggatcggaggacaagttcacgctgtgcaagcccttgtacagctcttcctggaacgggagagagcggcccagcttgcagaatctaaaacagatgaactgataaaagacgcaccaactacacagcacgataagtccggagagtggcaggaaacatctggtgagatccagtgggtaagcacagagaagaccgacggtacagaagaaaagcacaaaaaagaggaggaggacgaagagttggatttgaataaagcgctgcagcatgccggcaagcacatggaagattgcatcgtggcgagttatactgccctgctgctcggctgcctgtgccaggagtccccaatcaatgtgaccactgtgcgcgaatatctgcctgaaggtgacttttctattatgaccgaaatgctgaagaagttcctttctttcatgaacctgacatgcgccgtcggaactactggacagaaatcaatttcccgcgtgattgagtatctcgaacactgctag

SEQ ID NO: 211490 - DNA, 3828 bp, synthetic construct
  misc_feature 1..3828: note = Description of Artificial Sequence: Synthetic coding sequence
  source 1..3828: mol_type = other DNA
atggtgcagggccccgtgcagacccccgccctgaccatccaccggaggaagagacggagaagttgcccgcctaaccgggcaagctacctcccaaaggcagagtccctggcttctttgggttctcacctccccgctctgttatcaagagcaagagtgccccgtccaccggccgggcggagagaaagggagcgccgcagaagacccgttgctaaagcaccagcccgccttagaggagaatacgagacaggggtcaagatgaccagcagatttggaaagacgtactccagaaagggcggaaatggtagctccaaatttgatgaggtcttctccaataagagaacaacactcagcaccaagtggggagagactacttttatggccaagctaggacagaaaaggccgaactttaaacctgatatccaggagattcccaagaagcctaaggttgaagaagagtctacgggggatccatttggctttgacagtgatgacgagtcgttgccggtctcctccaaaaatctggcacaggttaaatgctcatcatactcagaaagctcagaggctgcacagctcgaggaagtgacgagcgttctcgaggcaaacagcaagatctcacacgtggtggttgaagacaccgtggtgagtgacaaatgcttcccactggaagacacactgttaggcaaggagaaatcaacgaatagaatcgtcgaggatgacgcctctattagcagttgtaataagctaatcacttccgacaaagtggagaatttccatgaagagcacgaaaagaattcccaccatatccacaagaacgccgacgatagcacaaagaagccaaacgctgagactaccgtggccagcgagatcaaggagacgaatgacacctggaatagccagttcggcaaaaggcccgagtcgccaagtgaaatctcccccataaagggcagcgtgcgcactggcctgtttgaatgggataatgactttgaggacatccgcagtgaggactgcatcctctcgctcgactccgacccactcctggagatgaaagacgatgactttaaaaatcgcctggagaatcttaacgaggctattgaagaagacatcgtacagagcgtcctgcgcccgactaactgccgaacatactgccgggcaaacaagactaagtcctcacaaggcgctagcaatttcgataagctcatggacggcacaagtcaggcgttagcgaaggccaattctgaatcatccaaggacggactgaaccaagcaaagaaaggtggggttagctgcggaacaagcttccggggcacggtgggcagaacacgcgactacaccgtactgcacccctcttgccttagcgtgtgcaatgtgactattcaagacaccatggagcgctcaatggacgagtttacagcctctactcctgcagacttgggcgaagccgggagactgcgtaaaaaggccgacatcgctacttccaagaccactacgcgcttccgcccctccaacacgaagtcaaaaaaggacgtgaagctagagtttttcgggtttgaggatcacgagaccgggggggacgagggcggctctggaagttcaaattacaaaatcaagtatttcggattcgacgatttgagtgaaagcgaggacgacgaagacgacgactgccaggtggaacgaaaaacttctaagaagcgtaccaagactgccccctcaccatcactgcagccacccccggaaagtaatgataactcccaggactcacagtcagggaccaacaatgccgagaatttagactttacggaggacttgcccggggtccccgaatctgtgaagaaaccaataaataagcagggagacaaatctaaggagaatacccgtaagattttcagcggccctaaacgctcgcctactaaggctgtatacaatgcacgccattggaaccaccccgactccgaagagcttcctggtccccccgtcgttaagccacagtccgtgacagtgcggttgtcctcaaaagaacctaaccagaaggacgatggggtttttaaggcaccagcaccgccatctaaagtcataaagactgtgacaataccgacccagccatatcaggacatagtcacagcactgaagtgccgacgggaggacaaggaactatacacagttgtgcaacatgtcaaacacttcaacgacgtagtggaattcggcgagaatcaggagttcacagacgacatcgagtacctgctgtcaggtctgaaatcaacccagccgctgaatacccgatgcctatcagtgataagtctggccacaaagtgtgcaatgccaagctttagaatgcatttgcgagcacatggcatggttgctatggtcttcaaaactctcgacgactcccagcatcatcagaatctgagcctgtgtaccgcggctcttatgtacatcttatcccgggatcgcctgaatatggacttagaccgcgccagtctggacttgatgatcagacttctggagctggaacaggacgcatcatctgccaagctgctgaatgagaaagacatgaacaagattaaggaaaagatccggcgcctgtgcgagaccgtgcataataaacatctggacctggaaaacattacaacaggtcacctggcaatggagaccctcctgagtcttacctccaagagggccggagattggttcaaggaggagttgcgcttgctgggcgggctcgatcatatagtggataaggtgaaggagtgcgtggatcacctgagcagggatgaagacgaagaaaagcttgtggccagcctgtggggcgcagagagatgtctccgagtcttggaatcggtgacagtgcataaccctgagaaccagtcctatctcatagcatacaaagactcacagctgatcgtgagcagcgctaaggcactacagcattgcgaggagttgatccagcagtataatcgtgcagaggattccatctgcctggctgattcaaagcccctgccacatcagaatgtgacgaatcatgtcggcaaagccgtggaagactgcatgagggctatcataggtgtgttacttaatcttaccaacgacaatgaatggggttctaccaaaaccggtgagcaggatggactgatcggtacagcactgaactgcgtcctgcaggtgccgaaatatctgccgcaggaacagcgatttgatattcgggtcctgggtctgggcttactaattaacctcgtggaatactccgctaggaataggcattgtctcgtcaacatggagacctcttgctcatttgatagcagcatttgctctggggagggggacgactctctgcgaatcggcggccaggttcatgctgttcaggccctggtgcaactgtttttggaacgagagcgcgccgcccagctggcggaatctaaaactgacgaattgatcaaggatgcgcccaccacacagcatgacaagtccggagagtggcaagaaacctccggcgagattcagtgggtgtctaccgagaaaaccgacggaaccgaagagaaacataagaaggaggaggaggacgaggagctcgacctgaataaagccttacagcacgctggtaaacacatggaagattgcatagttgcctcgtacaccgccctgttactgggatgcctgtgccaggagtcccccatcaatgttacaacagtaagagagtacctgcctgaaggcgatttctccataatgactgaaatgcttaagaagtttctctccttcatgaaccttacctgtgctgtcggtacgacgggacagaaatcaatcagcagggtgatagaatacctggaacattgctag

SEQ ID NO: 211491 - DNA, 1209 bp, synthetic construct
  misc_feature 1..1209: note = Description of Artificial Sequence: Synthetic coding sequence
  source 1..1209: mol_type = other DNA
atggacctggaccgggccagcctggacctgatgatccggctgctggaactggagcaggatgcctcatcggctaaactgctaaatgaaaaggacatgaataaaatcaaggagaagattcgcagattatgtgaaaccgtacataacaagcacctcgacctcgagaacattaccaccggtcacctcgccatggagaccctgctgtcacttaccagcaagagggctggcgattggttcaaagaagagttaagattgctgggcggtcttgatcacatcgttgataaagtgaaggaatgtgtggatcatctctccagagatgaggacgaagagaagttggtggccagcctgtggggggccgagaggtgcctcagagtgttggagtccgtgacggtccataatcccgagaaccagagctacctgatagcgtataaagactcccaactcatagttagctcagctaaagcgctccagcattgtgaagagctcatccagcagtataacagagcagaggactcaatctgcctggcagactctaagccccttccccaccagaatgtgacaaatcatgttggtaaggctgtggaggactgcatgagagcgatcataggcgtgctcttgaatcttacaaacgacaacgagtggggatctaccaagacaggcgaacaggatggcttgatcgggaccgcacttaattgcgttctgcaggttcccaagtacctgccgcaggagcagaggttcgacatccgagtgctgctatttctggaacgagagagggccgctcaactcgcagagagcaaaactgatgaactcatcaaggatgcaccaacgacacagcacgataagtctggagagtggcaggaaacaagtggggagattcagtgggtgagcacagagaaaacagatggcacagaggagaagcacaaaaaggaggaggaggacgaggaattggatctaaataaagctctccaacacgctggcaagcatatggaagattgcattgtggcgtcttacactgccctgctgttggggtgcctatgtcaggaatcacccattaacgtaacaacggtgagggagtatctgcctgaaggggacttcagtattatgactgagatgctgaaaaagtttctgtcgttcatgaacctcacctgcgccgtcggcacaaccggacagaagtccatttccagagtcatcgaatatctcgagcactgctag

SEQ ID NO: 211492 - DNA, 3828 bp, synthetic construct
  misc_feature 1..3828: note = Description of Artificial Sequence: Synthetic coding sequence
  source 1..3828: mol_type = other DNA
atggtgcagggccccgtgcagacccccgccctgaccatccaccggcgcaagagacgtagatcttgccctccaaatagagcaagttatctgccaaaggcggaatctttagcatcattgggaagtcatttacctgctctgcttagtagggccagggtgcctcgcccccccgccggacgcagagaacgcgaacgccggcgtcgccccgtggcaaaagcccccgcgcgccttcgcggtgagtacgagaccggagtcaagatgacttccaggttcggtaaaacctatagtcggaagggcgggaatggatcaagcaaattcgatgaggtcttctctaacaaaagaacaaccctaagcactaaatggggcgaaactaccttcatggccaaactgggccagaagcggcccaacttcaaaccagatatacaggagatccctaagaagccaaaagtcgaggaagagtctaccggtgacccctttggatttgattcagacgatgaaagtctgccagtatccagtaagaatctggcacaggtaaagtgctctagctactccgaatcctccgaggctgcacagttggaggaggtaacctcagtcctcgaagccaactctaaaatttctcacgtggtggtcgaggacaccgtggtgagcgacaagtgttttcccttggaagacactttgctgggcaaggagaagtccactaaccgtatcgtggaggacgacgcctccatcagctcttgtaacaagctcatcacatccgacaaagttgaaaattttcacgaggagcacgaaaagaactcacaccacatacacaagaacgccgatgattcaacaaagaaaccgaatgccgagactactgttgcctccgagatcaaagaaaccaacgatacttggaacagtcagttcggaaagcgacctgagagcccctcagaaattagccctatcaaaggatctgtccgtactggcctgtttgagtgggataacgatttcgaagacatacggagcgaggactgcatcctgagcttggactccgatccccttctggaaatgaaagacgacgattttaagaaccggctggagaatctgaacgaggcgatagaggaagacatcgtccaaagtgttctgagaccaacaaactgcagaacatattgtcgcgccaataaaactaagagttcccagggtgcatccaatttcgacaaattgatggatggtacatcccaggccttggccaaagccaactctgaaagcagtaaagacggcctgaatcaagcgaaaaagggaggagtgtcatgcggaaccagcttccgtggaactgtgggcagaacgcgggattacacggtgttacatccttcttgtttgtcagtctgcaatgtcaccatccaagatactatggagagatcaatggacgaattcacagccagtactcctgccgatttaggggaagccggccgcctgaggaagaaagccgatatcgcaactagcaaaaccacgaccagattcaggccatccaacactaagagtaaaaaggacgtcaagctcgaattcttcgggtttgaggaccacgagaccggcggagatgagggcgggtccggctcctcaaattataaaattaaatacttcggatttgacgatctgagtgagagcgaggatgatgaagacgatgactgtcaggtcgaaaggaaaacaagtaaaaagcgcacaaagacagccccaagtccttccttacagcccccaccagagtcaaatgataactcccaggattcacagtccgggaccaacaacgcagaaaatcttgattttacagaggacctgccgggcgtcccagagtctgtcaaaaaaccaatcaacaagcagggagacaaatcaaaggagaacaccaggaagatattcagtggaccaaagcgcagtccaacgaaggccgtgtacaatgctcgccattggaatcatccagattccgaggagcttcccggtccccccgtggtgaagccccagtctgtgaccgtaaggttatccagcaaagaaccgaatcaaaaagacgatggagtcttcaaggcccccgcacccccttccaaagtgattaaaaccgtaacaattccgactcagccctaccaagatatcgtgactgcactgaaatgtcgtcgagaagacaaagagttgtatactgtggtacagcacgttaaacatttcaacgacgtggtggaatttggcgaaaaccaagaattcacagacgacatcgagtacctcctgtcgggcctgaaatctactcagccactgaacactcggtgtctcagcgtgatttctttagccactaagtgtgccatgccttcctttagaatgcacctgcgcgcccacggcatggtggcaatggtgttcaaaaccttggatgacagtcagcaccatcaaaatcttagcctctgcacagcggccttgatgtacattctgagccgcgataggctgaacatggacttggatagggcttctcttgaccttatgatacgcttgctggagctcgagcaggatgcaagtagcgccaagctgttgaatgaaaaggacatgaacaaaatcaaggagaagattcgcaggctgtgcgaaacggttcataacaaacacctggatctcgaaaatatcaccactggccacctggcaatggaaactctgctcagtcttacaagcaagagagccggcgactggtttaaagaggaactgcggttactgggggggttggatcacatcgttgacaaggtcaaagaatgcgtagatcatctcagtagggacgaggacgaggagaaactggtagccagcctttggggagccgagcgatgtttgagagtgctcgaatctgtcaccgtgcataaccccgaaaatcagtcgtacctcattgcttacaaagatagccagctgatcgtctcttctgccaaggcacttcagcattgtgaagagcttatccagcagtacaatcgtgcggaagacagtatttgcctcgcggactcgaagccgttgccgcaccagaatgtgaccaatcatgttgggaaagcagtggaagactgtatgcgagcgatcattggcgtcctgcttaatctgacaaacgataacgagtgggggtccaccaaaaccggggagcaggacggactgattggtaccgcactcaattgtgttctgcaggtgccaaaatacctgccccaggagcagcggttcgatataagagtgctgggactgggacttctgattaacttggtggagtatagtgctagaaacagacactgtttggtaaacatggaaacctcctgcagctttgactcctccatttgctcaggcgagggggatgattctctccgcattggcggacaggtgcacgccgttcaggcccttgtgcagctattcttggagcgggaaagggccgcccaactggcggaatcgaaaacagatgaactcatcaaagatgcgcccacaactcaacatgataagtccggggaatggcaggaaacctcaggggagattcagtgggtcagtactgaaaaaactgacggaaccgaggagaagcataaaaaggaagaggaggacgaagagctggatcttaataaagctctccagcatgcgggaaaacatatggaggactgcatcgtggcttcttacactgctctgctgctaggatgtttatgccaggagtctccgattaacgttacaacagtgcgagaatatttgcctgagggtgattttagcataatgacagagatgttaaaaaagtttctctcttttatgaacttaacttgtgctgtcgggaccaccgggcagaagtcaatctctcgggtgatcgagtatctggagcactgctag

SEQ ID NO: 211493 - DNA, 1509 bp, synthetic construct
  misc_feature 1..1509: note = Description of Artificial Sequence: Synthetic coding sequence
  source 1..1509: mol_type = other DNA
atgagcggcggccccatgggcggccggcccggcggccggggcgcccccgctgtgcagcagaacattcctagtactctcctgcaggaccacgagaaccaacgcttgtttgagatgctgggccggaaatgccttacattagccacagctgtggttcagctctatctggcgctgcctcccggagccgagcattggaccaaagagcactgtggcgcagtgtgctttgtgaaagacaacccacagaaaagctactttatcagactgtacggcctgcaggccgggaggctgctttgggaacaggagttatactctcagctggtgtactccacccccaccccattcttccatacatttgccggagatgactgtcaagccggtctgaacttcgctgatgaggacgaagcccaggctttcagagccttagtgcaagagaagatccagaaaagaaatcagaggcagtcgggtgaccgccgacaactgcctcctccaccaacaccagccaatgaggagcgaagaggcggcctccctccgctgccattgcatcctggtggcgatcagggcggccctcccgtaggccctctgtccttgggactggcaacggtggatatacagaatccagatattacaagttctcggtatcggggactgccggcacctggcccttccccagccgacaaaaaaagatcagggaagaaaaagatctctaaagctgatatcggagccccttctggcttcaaacacgtcagccacgtgggatgggatcctcagaatggctttgatgtgaataaccttgacccagacctgagatcattattttcaagagctggaatatctgaggcccagctgactgacgccgaaacctccaagctgatctacgactttatcgaagaccaggggggattagaagcggtgaggcaggagatgcggcgccaagaacctttgcccccgcctccacccccctcccgaggggggaaccagcttcctaggccaccaatcgtgggcgggaacaaggggcgaagcggaccattgccgcccgtgccactcggcatcgctcctccccccccaacccctcggggccctcctccgccagggcggggtggtccccctccaccccctccccccgccactggccggtctggtccactgccgccaccaccaccgggggccgggggccccccgatgccacccccccctcctccacctccccctcccccgagttccggcaatggtccagctccccccccactcccgcccgctctagtccctgcggggggcttggcacccggaggcggacgaggagcgctgctggatcaaatccggcaaggaatccaactgaacaagacacctggagctccagagtcatctgcactgcaaccaccaccacagtcgagtgagggtctagtgggcgccctgatgcatgtcatgcaaaaaaggagccgcgcgattcattcctctgacgaaggggaggaccaggctggtgacgaggacgaagacgatgagtgggacgactag

SEQ ID NO: 211494 - DNA, 654 bp, synthetic construct
  misc_feature 1..654: note = Description of Artificial Sequence: Synthetic coding sequence
  source 1..654: mol_type = other DNA
atgagcggcggccccatgggcggccggcccggcggccggggcgcccccgctgtccaacagaacatcccctccacccttttgcaggatcacgagaatcagcgcctgttcgagatgttagggaggaagtgtctgacactcgcaaccgccgtggtccagctgtacttggcactgccacccggagcagaacattggactaaggaacactgtggagcagtgtgcttcgttaaagataaccctcagaagtcttattttatcaggctgtacggcctgcaagcagggaggctattgtgggagcaggagctgtactctcagctggtatactccacgcccacacctttttttcacacgtttgcaggtgatgattgtcaggccggcctcaactttgcggatgaggatgaggcacaggcatttcgtgcccttgtacaggaaaagatacagaagcggaaccagcgccaatccggagatcgccgccagttgccaccgccaccaacacctgccaatgaggagcggcggggggggctgccaccactgccccttcaccccggaggggaccagggggggcctccagtcggtccattaagccttggcctggccactgtcgatatccagaacccagacatcacgagttctcgctacagggggcttcccgcctag

SEQ ID NO: 211495 - DNA, 4668 bp, synthetic construct
  misc_feature 1..4668: note = Description of Artificial Sequence: Synthetic coding sequence
  source 1..4668: mol_type = other DNA
atggccaaggccatcaaggaccgggtgagcctgatcaagcggaagcgcgagcagcgccagctggtgagggaggagcaggaaaaaaagaaacaggaagagtcttcgctgaaacagcaagtagaacaaagctccgcctctcagacaggcattaaacagctgccctcagcctctacaggaattcctacggcatctactacttccgcatctgtctcgacacaggtggaacccgaggaaccagaagcggatcagcatcaacagctccaatatcagcaaccaagtatttcagtactgtcagatggtactgtggacagcggacaaggatcaagcgtgttcactgaatcaagagtgagtagccagcaaacagtttcctatggcagccagcacgaacaagctcactctaccgggacagtccccggacacatcccgtcaacagtgcaggctcagtctcagcctcatggtgtgtatcctcctagtagcgtccagcagggaatccagcaaactgcacctccgcaacaaaccgttcagtatagcctctcacagacctcaactagcagcgaggcgacaactgcacagccagtttctcagccccaggctccccaggtactgccacaagtgtccgctggcaaacagtcgactcagggggtgtcccaggtggcacccgccgagcccgtggccgtcgctcagacccaggccacacaacccactacccttgctagtagcgtggattctgcccattcagatgttgcttccggaatgtcagacggaaatgagaacgtgccatcatcatccggacggcatgaaggcagaactactaaaaggcactatcgtaagagtgtgcggtcccggagccgccacgagaagactagcagacccaaactgagaatattgaacgtgtcaaacaaaggagacagggtggttgagtgtcagcttgaaacgcataacaggaagatggttaccttcaagtttgatctggacggagacaatcctgaagaaatcgcaaccatcatggtgaacaatgattttatcctggccatagaacgtgaatctttcgttgaccaggtcagggaaattattgaaaaggccgatgagatgttgagcgaagatgtcagtgtggagcccgagggggatcaggggctggagtcacttcagggaaaggatgactacggattctcagggagccagaaactggagggagagtttaagcagccaattcctgctagctcaatgcctcagcagattggcatccctacttccagtctgacgcaagttgtacacagcgccggtcggcggttcattgtgtctcctgtccccgaaagtagattacgcgagtcaaaggtctttccatctgagataacagataccgtggcagctagcacagcccaaagccctggaatgaatcttagccactctgcaagttcgctcagtctccaacaagctttctcagagttacgtcgggctcagatgaccgaaggacctaacactgcccctccaaatttctcgcatacaggacctaccttcccagtagtgcctccatttttgagttccatagccggcgtaccaacgaccgccgcagcgaccgcgccggtgccggccacaagctcacctcctaacgatataagtactagtgtgatacaatccgaagtcaccgtccctacggaggaaggcatcgcgggggtggccacttccacgggcgtggtcacctccggggggttacctataccacccgtctccgaaagccctgtgctgagctccgtagtctcctctattacgatccccgccgttgtgtcaataagcacaacctcccccagtctgcaggtgcctacgagtacttccgagattgtggtgtcaagcacagccctgtatccatcagtgacggtctccgcaactagcgcgagcgccggggggagcaccgccacccctggaccaaaaccccctgccgtcgtttcgcagcaggcggctggctcaacgactgttggcgccacccttacttcagtatctaccactactagtttcccttccacggcatcccagctgtgcatccagctgtctagcagcacctctacccctaccttagcagagaccgtcgtagtctccgctcattcactcgataaaacctcacacagctccacaaccggcttggcattctctctgagtgcaccctctagcagcagttccccaggggcgggcgtatcctcatatatctcacagcccgggggactccatccactggtgattcctagtgtcatcgctagtacaccgatccttccccaggctgcaggacccacaagcactcctctgcttccacaggtgcctagtatcccaccattggtacagcccgtggccaacgtgcctgcagtacagcaaactctcatacactcacagccacagcctgccctgttgccaaaccagccccacacacattgtccagaagtagatagcgacacacagcccaaggctccaggcatcgatgacattaaaactctggaagaaaaacttcgtagcctattttcggaacatagttcaagcggggcgcagcacgccagcgtaagtctggaaacctctttggttatcgagtccacagttacccccggaatccccaccacggctgtggctccctccaagctgctcacctctactacttcaacctgcttacccccaactaaccttcctctgggcactgtggccttgcctgtgacccccgtcgtcacccccggacaggtgtccactcctgtgtccacaacaacatctggtgtgaagccaggtacggccccctccaagcctcctttgacaaaggcgcccgtgcttcccgtgggcactgagctccccgccggaacactcccctctgagcagctgcctccctttccgggacctagccttacccagtctcaacagcccttggaggacctggatgcccagctacgaaggacgctctctccagagatgattacggtgacttccgcagtgggcccagtgtcgatggctgcacccactgcaattactgaagcagggactcagccccagaaaggcgtgtctcaggtgaaagaaggtcccgtgctggctacttcaagcggggcaggcgtgtttaaaatggggcggttccaggtgagcgttgctgccgatggagcacaaaaagaggggaaaaacaagtccgaagacgccaagtctgtgcattttgagtcatcaacttccgagtcttcagtcctttcctcatcttcccccgagagcaccttggtcaaacctgaacctaatggcattacaattcccggaataagtagtgatgttcccgagagtgcccacaaaacgaccgcgtcagaggctaaaagtgacacaggtcagcctaccaaggtgggaagatttcaggttacaaccaccgccaacaaagtgggcaggtttagcgtgtccaagaccgaagacaagatcactgataccaagaaggaaggccctgtggctagcccaccttttatggatctggagcaagccgtccttcccgcagtgatccccaagaaggagaaacctgagttgagtgagccctctcatctgaacggcccttcatcagaccctgaggctgctttcctctcccgggacgttgacgacggaagtggctcacctcatagccctcaccagctgtcgtctaagagcctgccctcccagaacctttcccagtccctgtccaattcattcaactccagctacatgagctcggataatgaaagcgatatcgaagatgaggatctcaagcttgaactgcgacgtctgagagacaagcacctgaaagagatacaagacctccagagccgtcagaaacatgaaatcgagagtctgtataccaagttgggaaaagtccctccagccgttatcatccccccggctgcccccctaagtggacgtcggagacgccccactaagtcaaaggggtccaagagttccagaagcagcagtcttgggaataagtcccctcaactgtctggtaacctcagtggacaatctgctgcatcagtcctacacccacagcagaccctccaccctcccggcaacattccagagagcggccagaaccagctgttgcagcctctgaagccaagtccttcaagcgataatctctactcagcattcaccagtgacggagccatttctgtgcccagtctgtctgcccccgggcaaggcacgagcagcactaataccgtgggtgccacagtcaattctcaggcagcccaggcgcagccgcctgcaatgacttcctctcgcaagggaacgtttacagacgatctccataaactcgtggacaattgggctagggacgcgatgaatctgtccggcagacggggcagcaagggacacatgaattatgaaggccccggaatggcaagaaaattctcagccccaggccaactgtgtatatccatgactagtaacctcggcgggagtgctcccatctcagctgcaagcgctacatcgcttgggcatttcaccaagagcatgtgtcctccgcaacagtacgggttccccgccacaccattcggggcccagtggtccggaacgggcgggccggccccccagcccctgggacagtttcagccagtgggcacagccagtctgcaaaactttaatatctccaatctccagaagtccataagcaacccgcctgggagcaacctgcgcaccacctag

SEQ ID NO: 211496 - DNA, 7149 bp, synthetic construct
  misc_feature 1..7149: note = Description of Artificial Sequence: Synthetic coding sequence
  source 1..7149: mol_type = other DNA
atgagcggcggcgccgccgagaagcagagcagcacccccggcagcttgtttctcagcccacctgctcctgctccaaaaaatggctcctcatctgattctagcgttggagagaaactgggcgcagccgccgccgacgcagtaacaggacgcacagaggagtacagacgaagacgccataccatggataaagactcgcgcggggcagccgcgactaccactacaacagagcacaggttttttcggaggtctgtgatatgcgatagtaatgctacagccctcgagcttccggggctgccattgagcctcccccagccgagcatcccagcggccgttcctcaatcagcccctcccgaaccacacagagaagaaactgtgactgctaccgcaacgtcccaagtagctcagcagccacccgctgctgctgccccaggagagcaagcagtggccggccctgccccctcaaccgtgccgtcgtccacctcaaaagaccgcccagtgagtcagccctcccttgtcggcagcaaagaggaaccgccccccgccaggtcgggctctggaggtggaagcgctaaagagccccaagaggaaagatctcagcagcaggacgatatagaagagttggaaaccaaggcagtgggcatgtccaatgacggacgtttcttgaaattcgatattgagatcggacggggaagctttaagaccgtgtacaagggactggacacagagactactgtggaagtggcctggtgcgaactgcaggacagaaagctcactaaatctgagagacagcggtttaaagaggaggcagagatgctgaagggtctgcagcacccaaatatcgttcggttttacgacagttgggagagcaccgtgaagggtaaaaaatgtatcgtgctggtgactgagcttatgacaagtggcacactgaaaacctacctgaagcgatttaaggtcatgaaaataaaggtgttaaggtcatggtgccggcagatccttaaaggcctccagtttctccacacacgcaccccaccaatcatccatcgggatctcaagtgcgataacatcttcatcacaggccctaccggctccgtgaagatcggcgacttgggtctggctaccctgaagcgggcttcattcgcaaaatccgttattggtacacccgagttcatggccccagagatgtacgaggaaaaatatgacgagtcagtggacgtctacgcctttggaatgtgtatgctcgagatggcaacgtccgagtacccatactccgagtgtcaaaatgccgcgcagatatacagacgagtgacatccggcgtgaagccggccagtttcgataaggtcgcgattccggaggttaaggaaatcatcgaaggatgcatccgccaaaataaagacgagcgttattctatcaaagatcttctcaatcacgcctttttccaggaggagacgggagtgcgcgtggaactcgctgaggaggatgatggggagaagatagccatcaagctctggctgcgcatcgaagacatcaaaaagctgaagggcaagtacaaggataatgaagccattgaattttccttcgacctggaaagagacgtgcctgaggatgtagcccaggagatggtggagtcagggtacgtgtgcgaaggtgatcacaaaacgatggctaaggctattaaggaccgagtgtccctcatcaagaggaagcgagagcagcgccaactcgtccgcgaagaacaggaaaagaagaaacaagaggaaagctccctcaagcaacaggtcgagcagtcatccgccagccagaccggcattaaacaactgccctctgcgtctacaggaattcctacagcttcaacgacttcagcgtctgtgtctacccaggtggagcctgaagaacccgaagccgaccagcaccagcaactccagtaccagcagccaagtatcagtgtactgagtgatggcacagtggatagtgggcaaggatctagcgtgttcaccgagtctagagttagtagccagcagactgtcagctacggatcacagcatgaacaggcacactcaacaggaaccgtgcccggccacatcccttctaccgtacaagctcagagtcagccccacggggtgtaccctccgagctccgtcgcacaagggcagtcacagggccaaccctcctcttctagccttacgggcgtgtcgtcgtctcagccgattcagcatcctcagcagcagcaggggatacagcagacagctcctccacaacagacagtgcagtactcgctgagccagacatcgacgtcttctgaagcgaccacagctcagccggtttcccagccacaagctccacaagtattgccgcaggtgagtgcaggcaagcagttacccgtttcccagccagtaccaacaatccagggagaacctcagatccctgtcgcaacacagccctccgtcgttccagtgcattctggagctcattttctcccagtggggcagcctctccccaccccactactcccacaatatccagtgagtcaaatacctatctcaactccgcacgtttccacagcccagacaggattcagcagcctgcccattacaatggcggctggaatcacacagcccctgctcacactggcttcgtccgcaacaaccgctgctataccaggggtgtctaccgtggtgccatcccagctgcccaccctgttgcagcctgtaacacagctgccttcacaggttcaccctcagcttctgcagcctgcagtacagtctatgggcattcctgctaacctgggtcaggctgcagaagtgcccctcagctccggcgacgtcctctaccaggggtttccccctagactccccccgcagtatcctggcgactccaatatagcccccagtagcaacgtagcttctgtctgcattcatagtacagtactgagtccaccgatgccgacagaagtactagcaactcccggatattttcctacagtagttcagccctatgtcgaatccaatttgttggtcccaatgggcggtgtgggcggccaggtgcaagttagccaaccaggtgggtcactggcacaggcacccacaactagttctcaacaagcagtcctggagtccacccagggagttagtcaggtggcccccgccgagcctgtggccgttgcacagacccaggctacgcagccgaccactctggctagctccgttgatagcgcgcactccgatgtggcttccggcatgtcggatggaaatgagaacgtgccatctagctcaggacgtcacgagggccgcactactaaacggcattatcgtaagtctgtcaggtctaggtcaaggcacgaaaagactagccggcccaagttgaggatactgaacgtctctaacaaaggcgaccgagtagttgaatgccaattagagactcacaaccggaaaatggtaacctttaagttcgacctggatggagacaatccagaggagatagccacaatcatggttaacaatgatttcattctcgccatcgagcgagaatcctttgtcgaccaagtgcgggaaattattgagaaggcagatgagatgctgagcgaggatgtgagtgttgagcccgaaggggaccagggattggagtcgttacagggcaaagatgattacggcttctccggaagtcagaaattagaaggcgaattcaagcaacctatccctgccagcagtatgccccagcaaataggcatcccgacatcctccttaacccaagtcgttcatagcgcagggcgcaggttcatcgtctcacccgtgcctgagagtaggctcagagaatctaaggtgtttccttccgagataacagacacagtcgccgcttccaccgctcaaagtcccggaatgaacctctcccacagcgccagctcgctcagcctccaacaggcgttttctgaactcaggagggcacagatgactgagggcccaaacactgcccccccaaacttttctcatactgggccgacttttcccgtggtgcctccctttctgagctccatagccggcgtgcctactaccgccgcagccaccgccccggtgcccgcaaccagtagtccccctaacgatatcagtacgagcgttatacagtcagaagtgacggtgccaaccgaggagggtatcgctggcgtcgcaacttctacgggggtggtcacctccggaggtctcccgattccacccgtgagcgagagcccagttctctcgtcagtcgtctctagcattaccatcccagcggtagtgtcgatcagcacgacgtccccctctctgcaggtgcccacatctacaagcgaaattgttgtcagttccactgccctgtatccctctgtgactgttagcgctacgtcggccagcgctggaggatccaccgcaacccccggccctaagccaccagcagtggtctcccagcaggcggcgggcagcaccaccgtgggggctaccctcacaagcgtttcaacaaccaccagctttccatctactgcgtctcagttatgtattcagctctcatcctcgacttccaccccgactctggcagaaacagtcgtggtgtcagcccactcactcgacaaaaccagtcactcttcaactacaggtctggctttcagcctgtcggcccctagcagctcatcttcccccggcgctggagtgtccagttacatctctcagcctggaggtctccatcctctggtcataccttctgtgattgctagtaccccaatcttaccacaggccgctggtccaaccagtacacctcttctgccacaggttccctctatacctcccctggtccagcctgtggccaatgtgcctgctgtgcagcagactctgatacattcacagcctcagcctgcgctcctaccaaatcaaccccacacacattgccccgaagttgatagcgacactcagcctaaagcccccgggattgacgatattaagactctcgaggaaaaactgagaagtctcttcagtgaacacagctccagtggggctcagcacgcaagcgtgagcctggagacttctctggttattgaatcaacggtaactcctggaatccctacaactgccgttgcaccgtcaaagctcctgacttctacaaccagtacttgtctgccgccaaccaacctgcccctggggacagtcgccctgcctgttaccccagtcgtcacacccggccaggtttcaacaccagtgtcaactaccaccagcggagtgaaacctggcacggctcctagtaagccccctttgaccaaagcaccagtgctccctgtcggaactgagctaccagccggcactctcccaagtgagcaactcccgccgttcccgggtccgtccctaacccaatcccagcagccgttggaggacctggacgcacaattgagacggaccttatcaccagagatgatcaccgtgaccagtgccgtgggtccagtcagcatggccgctccaaccgctataactgaggcggggactcagcctcaaaaaggtgtgtcccaagtcaaagaaggtccagttctggctacttcctcaggcgccggcgtgtttaaaatgggacgcttccaggtgtccgtggctgccgatggggctcagaaggaggggaaaaacaagagcgaggacgccaagagcgtgcactttgaatcatctaccagcgagtcatctgtattgtctagcagcagtccagaaagtacattggttaagcctgaacctaatggtatcactatacccgggattagctccgatgtgcctgagtccgcccacaaaaccactgcgtccgaggctaaaagtgacacaggacaacccaccaaagtaggccggtttcaagtgactaccactgcaaacaaggtcggacggtttagcgtcagcaagacggaggacaagattacagacaccaaaaaagagggacctgttgcttctcccccctttatggacctcgaacaagccgtactgcctgcggtgattcccaagaaggagaagccagagttaagtgaaccaagccatctcaacggaccttccagcgaccctgaagcagcctttttgtctcgggatgtagacgacggttccggaagcccacatagcccccatcagttgtcatcaaaatcacttccgtcgcaaaacttatcccagagcctgtctaactctttcaactcaagttacatgagttccgacaatgagtcggatatcgaagatgaggatctgaagctggagttgcgacgcctaagagataaacatctgaaagaaattcaggacctgcagagcagacagaaacacgaaatagagagtttgtataccaaacttgggaaggtccctcccgccgtcatcatccccccagctgctccacttagcggcaggcggcgacgccccacaaagagcaagggctctaagagttcacgcagcagctcattgggaaataaatccccgcagttatcaggtaacctctccggtcagtccgctgcttctgtgttgcatccccaacaaacactgcacccgccggggaacatcccagaatcagggcagaatcaattgttgcagcccttaaagccgtcaccaagctcagacaacctgtatagtgcctttacatccgacggcgcgatttccgtcccttcgctgagcgcacccggccaggggaccagctcaacaaatactgtgggcgctacagttaactctcaggccgcccaggcccagcccccagccatgacgagttccaggaagggcactttcaccgacgacctccacaaactcgtggacaactgggctagggatgccatgaatctgtccggaagaaggggtagcaaaggacacatgaattatgaaggtccgggcatggcgagaaagttctccgcaccaggacagctgtgcataagcatgactagcaatttggggggaagcgctcccattagtgccgcctcggcgacatccctgggccactttaccaagagcatgtgccccccacagcagtatggctttccagccacccccttcggggcccagtggtcaggtaccgggggccccgctccgcagcctttgggtcagttccagccagtcggcacagcaagcctgcagaattttaatatctctaaccttcagaagtcaataagtaatcccccgggctctaacttgaggacaacatag

SEQ ID NO: 211497 - DNA, 5928 bp, synthetic construct
  misc_feature 1..5928: note = Description of Artificial Sequence: Synthetic coding sequence
  source 1..5928: mol_type = other DNA
atggacatcaagaagaaggacttctgcagcgtgttcgtgatcatcaacagtcactgctgctgttgcccacagaaggactgcatcaatgagggagtaaagcccgcctctttcgacaaggtggcaatcccggaagtgaaagaaataatagagggttgcatcagacaaaataaggacgagagatactctatcaaggatctgcttaatcatgccttcttccaggaagagaccggtgttcgcgtggagctggcggaagaagatgacggagaaaagatcgccatcaaactgtggctgcgcatcgaagatataaagaaactgaagggcaagtacaaagataatgaggccattgagttttccttcgatttggaacgggacgtgccagaagacgtggcccaggagatggttgaatctggatacgtttgtgagggagaccacaaaacaatggctaaagctatcaaagatcgtgtgagcctgattaagcggaagagggaacagaggcagctggttcgggaggagcaggagaagaaaaaacaggaagaaagttcactcaaacagcaggtggaacagtccagtgcatcgcagaccggtatcaaacagcttccttctgcttccacaggaatccccactgcctcaaccacttccgctagtgttagcacccaggtggagcccgaagagccggaagctgaccagcatcaacaactgcaataccagcaaccttcgatctctgtgctgtcggacggcaccgtagactctggtcagggttcttcagttttcactgagtctagggtgtcctcccagcaaaccgtgagctacgggtcccaacacgaacaggctcattctacgggaaccgtcccagggcatatcccatctaccgtgcaagcccagagccagcctcatggggtgtaccccccatcctcggtcgcccaggggcagagtcaggggcagccttcttccagcagcctgaccggggtgtccagctctcaacctattcaacacccacagcagcaacaggggattcagcagactgctccaccacaacagacagtccagtactccctgtcgcagactagcacctcaagtgaggctaccaccgcacaacctgtgagccagccccaggcaccccaagtgctgcctcaggtgagcgccggaaagcagctgcccgtgagtcagccggtccccactatccagggagaaccgcaaattccggtagctacccaaccctcagttgtgcctgtacactccggggcacatttccttccagtgggtcagccactgcctacaccgttgctgcctcagtaccccgtctcccagatacctatctctactcctcacgtctcaaccgcccaaacaggcttctcaagcctgccaattaccatggccgccggaatcactcagcccctcctgacacttgcctccagtgccacaaccgcagctatacccggcgtctcgaccgttgtgcccagccagctacctacccttctacagccggtcacccagcttccctcgcaggtgcacccacaacttctgcagcccgccgttcagtctatgggtattcccgctaatttgggccaggccgcagaggtcccactgagttcaggggatgtgctctatcagggcttccctccacgcctacccccccagtatcctggggattcaaacattgctccttcgtctaatgtggccagcgtatgcattcattctacagtcttaagccctcccatgccaactgaggtgctcgccactccaggttactttccaacagtcgtgcagccttatgtcgagagtaatctactggtacccatgggaggcgtgggcggccaggtccaggtgtcacagcccggaggaagtctggcccaggcgccaaccactagtagccagcaggcagtgctggagagcacgcaaggcgtttcccaagttgctcccgccgagcctgtggctgttgcacagactcaggccacccaacctaccaccctcgcgtcctccgttgatagcgcccactctgacgtcgcaagcggcatgtcagatggcaacgaaaatgtaccatcttcctccggacgacatgagggaaggactacaaagagacactatagaaagtcagttaggagtagatcccgccacgaaaaaactagtcgtccaaaacttcgaattctcaatgtctccaacaaaggcgaccgggtggtggaatgtcaactcgaaacccacaaccgaaaaatggtgacctttaagtttgaccttgacggcgataaccctgaagaaatagctacgatcatggtgaataacgactttatcctcgcgattgagcgggagagctttgtggatcaggtccgggagataatagagaaagccgacgagatgctatctgaggacgtgtccgtcgagccagagggcgatcaggggttagagtccctgcagggcaaagacgattacggttttagcggaagccagaagctggaaggcgagtttaagcagccaattcccgcttcctcgatgccacaacagattgggatacctacatcatcgctcacgcaggtcgttcacagtgcgggcagacgattcatcgtgtcccccgtgcccgagtcgagattacgagaatccaaagtcttccctagtgagatcaccgacactgtcgccgcttctacagcacaaagtccagggatgaacctctcccatagcgcatccagccttagcctccagcaagctttttccgaattaagacgcgcacaaatgaccgaaggccccaataccgcacctcctaatttctcccacacaggccctacgttccccgttgtcccacctttcctgtcctcaatcgccggggtacccaccactgccgcagcaaccgcgccagtgccagctacatcctcaccaccaaatgatatttccacaagcgtgatccagtctgaggttaccgtgcccaccgaagaaggaatcgccggcgttgcaacttccaccggcgtagtgacttctgggggactgccaattccacccgtgtctgagagccccgtcttgtcctcagtggtatcttctatcacaatccctgcagtggtgtccatatctacgacctccccttctttgcaggtccctacatccacatcagagattgtggtgtcttctactgcactgtacccctcggttactgtgtcggctacttctgcttctgcagggggtagcacggccacccccggcccgaagccacctgctgtggtttcgcaacaggccgccggatctactacggtaggggccaccctcacttccgtctcaaccaccaccagtttccctagcactgcctcccagctctgtatccagctctcctcctccacttcaacccctacactggccgagacagtagttgtttctgctcattctctggataaaacttcgcactcctcaacgaccggactggctttttcgttgtcagcccctagctccagcagctcacccggagctggcgtcagcagttacatctcccagccgggaggtttgcaccctctggttattcctagtgtaatcgccagtacgccaattctgccgcaggctgcaggccccaccagcaccccactgctgccccaggttccaagtataccccctttggtacagcctgtggccaatgttccagccgttcagcagacactcatccatagccagcctcagcctgcactgctgcctaaccagccccacacacactgcccggaagttgattctgatacacagccaaaggcacctggaattgacgacattaagacattggaggaaaagctgcgcagcctgttttctgaacacagttcgtccggggcacagcacgcctctgtgtccctggagaccagtttagtgatcgaatcaacagtgacccccggaatccctaccactgccgtggcaccgtccaaactcttaacctctaccacctccacgtgtctgccacctacaaatctgccacttggcaccgttgccctgccagtgactccggttgttaccccaggacaggtgagcacacccgtcagcacgactacatctggcgtgaagcctgggacggctccctcaaaaccgccgctgacaaaagcccctgtactgcccgtaggtaccgagctccccgcaggaaccttgccttcagagcagcttcctcctttccccggcccatcgctcacccaatcccagcaacccctggaagacctcgacgcacagctccggcgaaccctgtctcccgaaatgataacagtcaccagtgctgtgggccctgtttccatggcagcgccaactgcaattacggaagccggcacccaaccacagaagggcgtgagtcaggtcaaagaggggcctgtgctggcaacatcatccggcgcgggagtttttaagatgggtagatttcaggtttctgtcgcagccgacggagctcagaaagaaggtaagaacaagtcagaggatgcgaagtcggtccattttgaatctagtacgagtgaatcatcagtcctgtcatcgagttccccagagagcactctggtgaagcccgagccaaatggaattactattcctggtatttccagtgacgtgcccgaatccgcacacaagaccaccgcttcagaggcgaagtcggataccggccagccaacaaaggtcggacggttccaagtaactacgacagctaataaggttgggaggttcagcgtgtcgaagacggaagacaaaataactgacacgaaaaaggaagggcctgtggcctccccacctttcatggatcttgagcaggccgtcctgcctgcggttatacccaaaaaagagaagcctgagctttctgaaccatcacatctgaatggacctagttccgatcctgaagctgcatttctttcacgagacgtcgacgacggctcagggagcccccatagcccgcaccagttgtcttcgaagagcctgccttctcaaaacctgtctcaatcactctcaaactcatttaacagttcatacatgagctctgataatgaaagtgatatagaagacgaggatctaaaactcgagctgcgccgtctgcgagataagcatctcaaagagattcaagatctgcaaagcagacagaagcacgagatcgagtccctgtacactaaacttggcaaagttccccctgccgtaatcatcccccctgcggcccctctaagtgggagacggcgtcgccccacaaagtccaaggggtccaaatcgtctagatctagcagtctgggcaataagagccctcagctgagtggaaatctgagtgggcagtccgctgccagtgtgctccatccacaacagacccttcaccctccaggaaacattccagaaagtgggcagaatcagctgctgcagccactcaaaccaagtcctagctcggacaatctttactcagcgtttacatctgatggtgctatttccgtgccttcgttgagtgcgcctggacagggaactagttcaaccaacacagtgggagcaaccgtgaatagccaggcggctcaggctcagccgccagctatgacctcttcaaggaaagggaccttcactgatgaccttcataagctggtggataattgggcccgcgacgctatgaacctcagcgggaggcgtggctctaagggtcatatgaattatgaagggccaggaatggcgagaaagtttagcgctcctgggcagctatgtatttcaatgacatccaatctgggcggcagcgcgcccatctctgccgcatcagctacgtccctaggccacttcaccaaatcgatgtgtcctcctcagcagtatggcttccccgccacacctttcggcgcccaatggagtgggacagggggccctgccccccagcccctcgggcagttccagcctgtggggactgccagcctgcagaactttaatatctccaatctccagaagtctattagtaatcccccaggttccaaccttcgcaccacctag

SEQ ID NO: 211498 - DNA, 1182 bp, synthetic construct
  misc_feature 1..1182: note = Description of Artificial Sequence: Synthetic coding sequence
  source 1..1182: mol_type = other DNA
atgagcggcggcgccgccgagaagcagagcagcacccccggcagcctgttcctctctcctcctgcgccggcacccaagaacggctctagtagcgattcatctgtgggcgaaaagctaggagcggccgcagccgatgcagtaactggccgcactgaggagtacaggagacggaggcatacgatggataaggattcacgcggggcagctgctacaactacaactacggagcacaggttcttccggaggagtgtgatttgtgacagcaatgcaaccgccctcgaactcccgggcctgcccctgtctctgcctcagccaagcataccagccgctgttcctcaatcagctccccctgagccccatagagaggaaaccgtaacagcaactgccaccagtcaagttgctcagcagccgccagccgctgccgcccctggggagcaggcggtggccggcccagccccatctactgtgccgtcttccacgagcaaggatcgtcccgtgagccagccctctctggtgggatcaaaggaggaaccacctccagccagatcaggttcaggcgggggatcagctaaagaacctcaggaggagagatctcagcaacaagacgacattgaggaacttgagactaaggctgtgggaatgtctaacgacggacgctttctgaaattcgacattgagattggccgcggctcgttcaaaacagtgtacaaagggttggacacagaaactacggttgaagtggcgtggtgtgagctgcaggatagaaagctgaccaagagtgagcgccagcgattcaaggaagaggccgagatgctcaaggggcttcagcacccaaacattgttagattttacgattcatgggaaagtaccgtgaaaggcaaaaaatgtattgtgcttgtgaccgaactcatgacgtctgggacactcaagacgtatctcaagcggttcaaggtgatgaaaatcaaggtgcttagatcttggtgtaggcagatacttaaaggcttgcagtttctccacacgcgtactcccccaattatccaccgggatctgaagtgtgataacatttttatcaccggcccaacaggatccgtcaaaatcggggacttggggctggctaccctcaagcgcgcatcattcgccaaatctgtcattgggatgttccaggtgtacctgggtgcttag

SEQ ID NO: 211499 - DNA, 8643 bp, synthetic construct
  misc_feature 1..8643: note = Description of Artificial Sequence: Synthetic coding sequence
  source 1..8643: mol_type = other DNA
atgagcggcggcgccgccgagaagcagagcagcacccccggcagcctgtttttatcaccacccgcacctgcacccaagaacgggtcctcgtccgactcttccgtcggagagaagctgggtgccgccgctgccgacgccgtcactggaagaaccgaggaataccgtaggagaaggcataccatggacaaagattccaggggggcagcagctactaccacaaccactgagcacagattttttcgacgaagcgtcatatgcgatagcaacgcgactgcgttggagctgccaggcctccccctgagcctgcctcaacctagcatccctgcagccgttccgcagagcgccccccccgagcctcatagagaagaaacggtgaccgcgaccgcaacctcacaggttgcacagcagccacccgcagccgcggctcccggggagcaggccgtggctggccccgccccgtcaacggtgccatcaagtaccagtaaagatagacccgtctcccagccctcactggttggatctaaggaggagcccccgcctgcccggtctggaagcgggggaggctccgccaaagagccgcaggaggaacgttcacagcaacaggatgacatcgaggaacttgagacgaaggcagtgggtatgagcaatgacgggcggttcctcaagtttgacattgaaattggcagaggcagcttcaagactgtttacaagggattggatacggaaaccactgtggaggtggcttggtgcgagctccaggaccgcaaacttactaaatccgagcgacaaaggttcaaggaggaagccgaaatgctgaaagggctccagcaccctaatatcgttcggttctacgacagctgggagtccacggttaaaggtaagaagtgcatcgtgcttgttacagaactgatgacatcaggaaccctcaaaacttacctgaagagattcaaggtgatgaagattaaggtactgcgctcatggtgtagacagatcctcaaggggctgcaattccttcacacaagaactccaccaatcatacaccgcgacctgaaatgtgacaatatttttatcacggggccaaccggcagcgtaaagataggcgatctcggccttgccacgttaaagagagccagtttcgctaagtcagttatcgggactcccgaattcatggcgccggaaatgtacgaggaaaagtatgacgaatcagtggacgtgtacgctttcgggatgtgtatgctcgagatggccacgagcgagtatccctactcagagtgccagaatgcagcccagatttatcgccgcgtcacatccggagttaagccggccagcttcgacaaagtggcaatacccgaagtcaaggaaatcatagagggctgcatccgccaaaataaggatgagaggtatagtatcaaggatctcctgaatcatgccttcttccaggaggagactggggtgcgagttgagctcgcagaggaagatgatggagagaagatcgcaatcaagctctggttgaggatcgaggatataaagaaactgaaagggaagtacaaagacaatgaggccattgaattcagctttgacttggaacgggacgttccggaagacgtggcacaagagatggtcgaatccggatatgtgtgtgaaggcgaccacaaaaccatggccaaagctatcaaagacagagtttctctcatcaaacggaagcgggagcagaggcagctggtgcgggaagagcaagagaaaaagaagcaagaagaatcttccctcaagcaacaagtagaacaatcctcggcgtcgcagaccggcattaaacagctaccgagtgccagcactggcatacccaccgcgtccacgacatctgctagcgtgtccacacaggtggagccagaggaacccgaggcagaccagcatcagcagctccagtatcaacagccaagcatcagcgttctcagcgatggtaccgtcgatagtggccagggtagtagcgtattcactgaatctagagtaagctctcaacagacagtgtcatacggcagtcaacacgagcaggcccattccacggggacggtgccaggccacatccctagtaccgtgcaggcccagagccagcctcatggcgtgtacccccccagttctgtgccacgacgcggaaggtctatgagcgtttgcgtgcccatctttctcttactgcccttatgccctgcatcactccctgtgttgtttcacccaaccgcctccaccgtttgcaccagcttcagttttcccccaccagactgccccgaagaaacttttgcggaaaagttatccaaagctctggaatctgtgctgcctatgcactccgccagtcagcgcaagcaccgccgaagcagtttgccgagcctgtttgtgtcgactccgcagagtatggcccatccctgtggcggtacccccacatacccagagagtcagatattttttccaactatacacgagagaccggttagctttagtccaccacccacgtgcccccccaaggtggctatttctcagagacgtaaaagcacatcatttctagaggctcaaacacaccattttcagcctctgctgcgtaccgttgggcagagtcttcttcccccgggcggatctccaacaaattggacccccgaagccgtggtcatgctgggtacaaccgcatcaagagtgaccggcgaatcctgcgagatccaggtccatccgatgttcgagccctcacaggtctactctgattaccgacccggtctcgtgctgcccgaggaggctcattatttcatacctcaagaagcagtctatgttgccggggtgcattatcaggcccgggtggcagagcagtatgagggaatcccctacaatagttccgtgctatcttctcctatgaagcagattccagagcagaaaccagtgcagggcggtcctacgtcctctagcgttttcgaatttccatcgggtcaggcgtttctcgtcggacacctgcagaacctgcgcttagattccgggctcggccctgggtcacctctgtcatcaatatctgcccccatatccactgacgcaacgcgattgaagttccatccagtatttgtaccccattcagcaccggctgtcctgacccacaataatgagagtcggagtaattgcgtgttcgagtttcacgttcacaccccatcgtccagttccggggagggtgggggaatactcccccagagggtgtatagaaaccgacaggtcgcagtcgacctgaaccaggaggagctgccaccccaaagtgtcggactccacggctacctgcagcctgttaccgaagaaaagcataactatcatgctccagaactgactgtctcggtggtggagccaatcggccagaattggccaattggtagtcctgaatactccagtgattcctcgcagataaccagctctgacccctctgattttcagagtccccctcccaccggcggagccgctgcccccttcggctctgacgtatccatgcctttcattcacttaccgcagacagtcttacaagaatctcctctatttttctgcttccctcaggggaccaccagccagcaggtgttgaccgcatccttctcgtctggtggctctgccttgcaccctcaggcccagggtcagagtcaagggcagccctcaagttcaagcctcaccggagtctcctcaagtcagcctatccagcatcctcagcagcagcaaggcattcagcaaaccgcccccccacaacagacggttcagtacagcctgagtcagacctctacctcttcggaagcgaccacagcccagcctgtgtcccagcctcaggcccctcaggtgctccctcaggtgagtgctgggaagcaattaccggtcagtcagcctgtgccaaccatccagggggagcctcagattccggttgcaactcagccttcggtggtgccagtgcactccggcgcgcactttttacctgttggtcagcctctcccaacgcctctccttccacagtatcctgtaagtcaaatcccaataagcacgcctcatgtgagcaccgcccagacaggattcagctccctgcctattacgatggcggccgggatcacccagcctcttctcactttggccagctcagcgacgaccgctgctataccaggtgtgtccaccgtggtccccagtcaactgccaacactgttacagcctgtgacccaattgccaagtcaggtccacccccaactgctccagcctgccgtacagtccatgggcatccccgctaatttgggccaggccgctgaggtcccactgagtagcggagacgttctgtaccagggattcccacctagattaccaccgcagtaccccggcgacagtaatattgcgcccagctctaacgtggccagcgtgtgcatccatagcaccgtgttgtcaccacccatgcctacagaagtgctggctacaccaggttattttccaacagtggtgcagccctatgtcgaaagcaatctgctggtgcccatggggggtgtgggagggcaggtgcaggttagccagccggggggctccctggctcaagcacccacgacaagtagtcagcaggcagtgctggagtcgacccagggggtgtctcaggtggctcccgctgaacccgtcgcagtggcccaaacccaggccacccaacccaccacgctcgcctctagcgttgactctgcccacagcgacgtcgccagtgggatgagtgacgggaacgaaaacgtgccaagcagcagtggcaggcacgaaggaagaacaacaaaacgacattatagaaaaagcgtgagatctcggtcaaggcatgagaaaacttcacggcctaaacttcggatcttaaacgtgtccaataaaggcgatagagtggttgaatgccaactggagacccacaacaggaaaatggtaactttcaagtttgatttggacggtgataacccggaggaaattgccacaatcatggttaacaacgacttcattctggccatcgaaagagaatccttcgttgaccaggtccgtgagattatcgagaaggcagacgagatgctgagtgaagacgtgtccgtggagcctgaaggtgaccagggacttgagagcctgcagggtaaggatgactacgggttcagtgggtcgcagaagctggagggtgagttcaagcaacctattcccgcctcctctatgcctcagcaaatcggaatcccaacttcgtcccttacccaggtagtccactccgctgggagaaggttcattgtgtcaccagtgcccgagtcccgcttgcgggaaagcaaagtctttccttcagaaattacggacactgtggctgctagcacggcacaaagtccaggcatgaacttaagtcatagtgcttcttctctgtccttgcaacaggccttttccgagctacggcgtgcacaaatgaccgaaggcccaaacacagcaccaccaaatttcagccatactggaccaacgtttcccgtggtacccccttttctatccagcatcgccggggtgccaactaccgctgccgccaccgcacccgtgccagcaacatcttctcctcctaacgatatttctactagcgttatccagtcagaggtcactgttccgactgaagaggggatcgctggcgtggcgacgtctactggggtggtaacttcagggggactcccaattccacctgtgagcgaaagcccagtgcttagctcagtggtgtcctccataactatccctgccgttgtgtccatttctactaccagtcccagcctccaggttccaacatctactagcgagatcgtggtcagtagtactgccttatacccatcagtgaccgtgagcgctactagcgcctctgccggtgggtccaccgctacacctggtcctaaaccacccgccgtagtaagtcagcaggccgccggctccacaacagtcggagcaacactcacttccgtctcaacaactacttcattcccttcaactgcctcacaactctgtatacagctgtcgagctcaacaagcaccccgacactggccgaaactgtagtagtatctgctcattctttggataaaactagtcacagctctactacagggttggcgttctctctctcagctccgagttcaagctccagtcctggcgcaggggtctcgtcatacatatcgcagcctggaggactgcacccactggtaatcccctctgtcatcgcaagtacccctatcctccctcaagcggcagggcccacatctacgccactactgcctcaggtgccttcaatcccacccctggtccagccagtagccaacgtccctgccgtccaacagaccctgatccacagtcagccccagcctgccttattacctaaccagccccacacccactgtccagaagttgattccgacacccagcccaaggcccccggcatcgatgacattaaaacactcgaggagaagcttcgtagcctttttagtgaacactctagttccggtgcgcagcacgccagcgtgagcctggagaccagtctcgtgatcgagtctacagttaccccgggaattcctactactgctgtagccccatcgaaactactgactagcacaactagcacatgtctaccacctactaacctgccactcggaacagtggcactgcccgtgactccggtggtgactcctggccaggtgtccactccagtaagcactacgaccagcggcgtaaagcccggtactgccccatctaagcctcctctgactaaggcccctgtgcttccggtcggaaccgaactgcccgccgggaccttgcccagcgagcagcttcctccgtttccaggcccgtccctgacccagtctcagcagcctctggaagaccttgacgcgcagctcagacgcacgttatcccccgaaatgataactgttaccagcgctgtggggcctgttagtatggctgcaccaacagccatcaccgaagccgggactcaaccccagaagggtgtatcccaggtcaaagagggacccgtgttggctacatctagcggagctggcgtgtttaagatggggagattccaagtgagtgtcgcagcagatggcgctcagaaggaggggaaaaataaaagcgaggacgccaagagcgtacactttgaatcatccacaagtgaatcaagcgtgttgagctctagctcaccggagagcacactggtgaagccagagccaaacggcatcacaatcccaggcatatcttcagatgtgcccgagtctgctcacaagacaaccgcatctgaggccaagagcgacaccgggcaacctaccaaggtggggagatttcaggtgacaaccacagcaaacaaagtcggcagattttctgttagcaagacagaggacaaaatcaccgatacgaaaaaggagggtcctgtggccagtccccccttcatggacctggaacaggcagtcctacccgccgtcatccccaagaaagagaagccagaactatccgagccatcgcatctgaatggcccatctagtgaccctgaagccgcttttttgtcccgggacgtcgacgatggctctgggagtcctcacagtcctcatcagctttcctctaagagcctccctagccaaaacctttcccagtctctgagcaatagttttaactcttcatatatgtcttcagacaacgaatcagatattgaagacgaagatctaaagcttgaacttcgtaggttacgggataaacacctcaaggagatccaggatctgcagtcccgtcaaaaacacgagatcgagtctttgtatacgaagctcgggaaagtgcctccagctgtcatcatccctcccgcagcacccctgagcgggagaagaagacggccgactaagagcaagggttcaaaaagcagtcgctcatcatctctggggaacaaatccccacaattgtcaggtaatctatctggccaatctgcagctagcgtgctgcacccgcagcagacactgcaccccccgggaaatatccccgaaagcggacagaatcaactattgcagcccctgaaaccgtccccctccagcgacaatttgtatagtgctttcaccagtgacggagcaatcagcgttccttctctatctgcccctggacaggggacgagcagtactaataccgttggtgccactgttaacagtcaggctgctcaggctcaaccccctgccatgactagcagtagaaaaggaacttttacagatgacctgcataaactcgtggataattgggcccgcgatgctatgaacctgtccgggcgccgcggctccaagggccacatgaactatgaaggaccagggatggcgaggaagtttagtgcaccaggacagctctgcatttccatgacctctaatttggggggcagcgcccccatatctgccgcctccgccactagcctggggcatttcacaaagagtatgtgtccacctcagcagtatggatttccggccactccattcggcgcacaatggtcaggcacaggtggtccagccccacagcctctcggacagtttcaaccggtcggaaccgcttccctacagaacttcaacatatcaaacttgcagaaatctatatcgaaccctccaggatctaatctgagaactacatag

SEQ ID NO: 211500 - DNA, 6405 bp, synthetic construct
  misc_feature 1..6405: note = Description of Artificial Sequence: Synthetic coding sequence
  source 1..6405: mol_type = other DNA
atgagcggcggcgccgccgagaagcagagcagcacccccggcagccttttcttgtcacccccagcaccagcccccaagaatgggagctcctccgatagttctgttggagagaaattaggcgctgcggcggctgatgccgttactggacgcacggaggagtaccgtagacggcggcatactatggataaggactctagaggggccgcagccacaactaccaccactgaacatcgttttttcaggaggtcagtaatctgtgacagcaatgcaacagctctcgagttgcccggtcttcccctctcactgccacagccctccatacccgcggctgtcccacagagcgccccccccgaaccacaccgcgaggaaaccgtcaccgccactgcgaccagccaggttgcacagcaacctcccgctgccgccgcacccggggaacaagctgtcgctgggcccgctccaagtaccgtccccagtagtacatccaaggataggcccgtgtcgcagccatcattagttggatcaaaagaagagccacctcctgcgcgcagcggctcaggggggggatctgctaaggagccgcaggaggagcgctcccaacagcaggacgatatagaagaactcgaaacaaaagcggtgggcatgagcaatgacggcaggtttctgaaattcgatatcgaaatcggacgcggatccttcaagacagtttacaaaggactagacacagagactacagtcgaagttgcttggtgcgaactgcaggaccgcaagttgaccaaaagcgaacgacaacgttttaaggaggaggccgagatgctcaagggcctccagcaccccaatatcgtgcgtttttatgattcctgggagtcgaccgtgaagggcaagaagtgcatcgtgttggttactgagttgatgacatctgggacccttaagacctaccttaagcgcttcaaagtgatgaaaattaaggtcctccgatcttggtgcaggcagatcttgaagggactgcagttccttcatactagaacacctcctattatccaccgggacctaaagtgcgataacatctttatcaccggtcctaccggaagcgtgaagatcggggatctcggtttggctacactgaaacgagcttcattcgcgaaaagcgtgatagggacaccagaattcatggccccagaaatgtacgaagaaaagtatgacgaatccgtcgacgtgtatgcattcggcatgtgcatgcttgaaatggctacttccgaatatccctattcggaatgccaaaatgccgcccagatatatagacgcgtaacaagtggggtgaagccagccagcttcgacaaagttgcaataccagaagtgaaagaaatcatagagggctgcattcgccagaacaaggacgagcgttattcaattaaagacctcctgaatcacgccttttttcaggaagagacaggggtgagggtcgagctggccgaggaagacgatggggaaaaaattgcgattaaactttggctccgcattgaggacatcaagaagctgaaaggcaagtacaaggacaacgaggcgattgagttctcgtttgatttggaacgggacgtgcccgaggacgtcgcacaagagatggtggagtcgggatacgtctgcgagggcgaccataaaacgatggctaaagccattaaagacagggtgagcttgattaaaagaaaacgggagcagagacagttggtgagagaggaacaggaaaagaagaaacaggaggagtctagtctcaagcaacaagtggaacaaagctccgcttcccagactggcatcaaacagctccctagcgccagcacggggattcccacagcttcaactaccagcgcttctgtatctacacaggtggaacccgaggagccggaggcggaccagcaccagcagctgcagtaccagcaaccatcaatcagcgtcctgagtgatggcaccgtggatagtgggcaaggctcaagcgtgttcaccgagtcccgcgtgagtagccagcagacagtctcttatggatctcagcatgagcaggcccactctactggcacagtgcctgggcacattccctctacagtgcaagcacagagccagcctcatggcgtataccctccgtcttccgtggcccaggggcaatctcagggccagccatctagctctagcctcacgggtgtcagttcctcccaaccgatccaacatcctcaacagcaaggaattcaacagacagcgcctccccaacaaaccgtccagtattctctttctcaaacatccacgagctccgaggccacgactgctcaacccgtgagccagccccaggctcctcaggtcttgccccaagtgtcagccggcaagcagtctactcagggggtgtcccaggttgcgcctgccgaacctgttgccgttgcccagacacaggccacccaaccgacaaccttagcatcaagtgttgattccgctcatagtgacgtcgcatccggcatgtcggacgggaacgagaatgtcccatccagttcagggagacacgagggaaggacaacaaagaggcactaccgcaagagcgttaggagcagatctcgccacgagaagaccagcagacccaagttgaggattcttaatgtgagcaataagggagaccgcgtcgttgagtgccagctggaaactcataaccgcaagatggttacttttaagttcgacctggatggcgacaatcccgaagaaatcgctacaatcatggtgaacaatgactttatcctggccattgagcgcgagtcctttgtggaccaggttcgggagattatcgaaaaggcagacgagatgcttagtgaggacgtgtccgtggagccagaaggtgaccagggactcgagagtctacaggggaaggatgattatggcttctcaggtagccagaagctggagggggagttcaagcagcctatcccggcctctagcatgccccagcagataggtattccaacctcttccctgacgcaggtggttcattctgctgggaggaggttcattgtctccccggtccctgagtcccggttaagagagtctaaggtcttcccttctgagattactgacactgtggctgcctcgacagcacagagcccagggatgaatctatcgcactccgcctcctccttgtctttacagcaggctttttccgaattgcgcagagcacaaatgacagaaggccccaacactgccccgccaaacttcagccacacaggcccaacatttcctgtggtgccccccttcttgagctctatcgctggggttcccaccactgccgccgccacggcacccgtgccggcaacatcaagcccgcccaacgacatcagtacttccgtaatacaatcagaggttacggtgccgacggaggaggggatcgcaggcgtcgctactagcaccggcgttgtaacctctggggggctccccatccctccggtctcagagagtcccgtcctctcttcagtagtcagtagtatcactatccctgcagtggtgagcatttccaccacgagccctagtttgcaggtaccaacaagtacaagtgaaattgtggtgtctagcaccgctctgtacccgagcgtaacggtcagcgccacctccgcgagtgcggggggaagcaccgcaactcccgggcccaagcctcctgccgttgtgtcacagcaggcagctggatccaccaccgtgggagccactttgacatctgtgagcaccacaacaagcttcccatctaccgcttcacaactttgcatacagttatcatcttcaacctcgactcccacacttgccgagacagtagtggtctctgctcattccttggacaagacatcccatagttctactactgggttggcttttagcctttcagcccctagcagcagttcttccccgggcgcgggcgtttccagctacatctctcaacccggaggactgcatccccttgtgattccttccgttattgcctctaccccaatcctgccacaggcagctgggcccacttcaaccccattgttgccacaagtgcccagcataccacctttagtgcagcctgtcgcaaatgtgccagcagtgcaacagaccctgatacatagtcaaccacaacctgcactgcttcccaatcagccgcatactcattgtccagaggtcgacagcgatacacaacccaaggctcccgggattgatgatatcaaaactctcgaggagaagctgagatctctcttttccgaacacagctctagcggggcacagcatgcatccgtgtctctggagactagtctggtgatagagtccaccgtcactccaggcatcccaaccaccgcagtggctcctagcaagctgctgacttctacaacctctacctgtcttccgccaaccaacctgcctctgggtaccgtcgcactgcctgtgacccccgtggtcacccccggccaggtctctacgcctgtctctaccacaacctcaggggtgaagcccggcaccgcgccttccaagccccctcttactaaagcccctgtgctgcccgttggcacagaacttcccgctggaactctgccatccgagcagcttcctccttttcctggcccctccctaacacagtcccaacaacctctggaggatctcgatgcccagctgcggcggacactttcccctgaaatgataacggttacctctgcagtgggcccggtgtctatggctgctcccaccgctatcaccgaggctggcacacagcctcagaaagtgagccaggtgaaggaggggccggtcttggctacatcttccggggccggtgtgttcaagatggggaggttccaggtctccgtagccgccgacggggcacagaaggaaggtaaaaacaagagcgaagacgccaaaagcgtgcatttcgaaagcagcacatctgaaagttccgtactttcttcatcgagtccagagtccacactggtcaaacctgagcccaacggcatcacaattcccgggatctcctccgacgtgcctgagagtgcccacaaaactacagcgtctgaggcgaagtcagacactggccagcctacaaaggtcggcaggtttcaggtaacgacaacagctaataaggtgggtaggttttccgtttcgaagacagaggacaagattaccgacacgaagaaagagggacctgtggcatcgcctccctttatggatctggagcaggccgttttgccagcagtcattccaaaaaaggagaaaccggaactgagcgaaccctcccatctgaacgggccctcatcagaccctgaggcggcatttttatcaagagatgtggacgatggctccggcagtccgcacagccctcaccaactctcttcaaagtctcttccctcacagaatctgtcacagtctctctcaaattcgtttaattccagttacatgtcctccgataatgaatccgatattgaagatgaggacctgaaacttgagctccggcggctgcgcgataaacacctaaaggagattcaggacctccagtcgcgccagaagcatgagatcgaatccctgtatacaaaactgggtaaagtccccccggctgtcatcatcccccctgccgcacctcttagcgggcgtcggcggcgccccaccaagtcaaaagggagcaagtccagccgtagctctagtttgggaaacaaaagcccacagctcagcgggaacctgtcaggtcagagtgccgcatccgttttacaccctcaacagactcttcacccacctggaaatatacctgaatccggtcagaatcagctcctgcagccacttaaaccttccccatcaagcgataacctgtactccgctttcacctcggatggcgcgatctccgttccttcactttcagctcctgggcagggcactagtagcaccaatactgtcggggccacagtgaatagtcaggctgcccaggcgcaaccacctgccatgacttccagtaggaagggaacgttcacagacgacctccacaaattggtggataactgggccagagacgccatgaacttgtctggccggcgtggaagcaagggacacatgaactacgagggacctggaatggcccgtaagtttagcgcccccgggcagctgtgtatctcgatgaccagcaacctgggggggtctgcaccaattagtgcagcctccgcaacgtctctggggcacttcaccaagtctatgtgccctccacagcagtatggattcccagctacgcccttcggcgctcagtggtccggcacaggtgggcccgcaccacaaccactgggccagtttcagcctgtggggacggcatccctgcaaaacttcaatatatctaacttgcaaaaatcaatttcgaacccccctggctctaacttacgcaccacctag

SEQ ID NO: 211501 - DNA, 975 bp, synthetic construct
  misc_feature 1..975: note = Description of Artificial Sequence: Synthetic coding sequence
  source 1..975: mol_type = other DNA
atgagcagcgacaacgagagcgacatcgaggacgaggacctgaagctggaactgagaaggctgcgcgataagcatctgaaagaaattcaagatctccagtccaggcagaagcatgagatcgaatctctgtacaccaagctcggcaaagtgcctccagcggtgattattcccccagccgcccccctgtctggaaggagaagacgtcctaccaaatctaagggctccaaatcttctcggagctcctctctggggaacaagtctccacagctgagtggcaacctatcaggtcagagtgctgcctccgttctgcacccacagcaaacactccaccccccggggaacattcccgagagcggccagaatcaactccttcaaccactgaaaccaagcccatctagcgataatttgtacagcgctttcacgagtgacggagccatctcagttccttctttgtcagctcctgggcaaggaacatctagcacaaataccgtgggcgccaccgtaaacagccaagccgcccaggcccagcccccggctatgacaagctccagaaagggcacctttaccgatgatcttcataaactggtggataactgggccagagatgcgatgaatctatctggtcgccggggctctaaggggcatatgaattacgagggtcctggtatggcacggaagttttccgctcctggacagctgtgcatctccatgacaagcaacctcggaggcagcgcgccaatatctgcagcctcagcaacctctttgggccactttacaaagtccatgtgccctcctcaacagtatggattccccgctaccccattcggggcccagtggagtggtacaggaggccccgctccacagcccctgggacagtttcaacccgtcggtaccgcttcccttcagaactttaatataagcaacctccaaaaaagcatcagcaaccctccgggcagtaatttgagaactacatag

SEQ ID NO: 211502 - DNA, 7929 bp, synthetic construct
  misc_feature 1..7929: note = Description of Artificial Sequence: Synthetic coding sequence
  source 1..7929: mol_type = other DNA
atgagcggcggcgccgccgagaagcagagcagcacccccggcagcttgtttctgtctcctccagcccccgctccaaagaatggatcctcgagtgatagctctgtgggcgaaaagctgggagccgccgcagccgacgcggtgactggtagaacagaagagtatcggcgtcggaggcacacaatggacaaggattcgagaggtgcggccgccaccacgacaaccacagagcatcgctttttcagacggtccgtgatatgcgattctaacgccaccgccctggagcttccgggtctgccactgtctttgccccaaccaagcattcctgcagcagtacctcagtctgccccccctgaaccccatcgggaggagaccgtgacggccaccgcaacatcgcaagtggcccagcagcccccagccgccgctgctccgggcgagcaggcagtggccggccctgctccctccaccgtccccagcagtacaagtaaggatcggccagtctcccaaccctcgttggtcggttcaaaggaagaaccaccgcccgccaggtcaggctccggcgggggttctgccaaggagcctcaagaggagaggtcgcagcagcaagacgatatcgaagaactcgaaacaaaagctgtaggcatgtcgaacgatgggcgatttctcaagttcgatatcgaaatcggtcggggctcctttaagacggtgtacaagggcttagacacagagaccaccgtcgaggtggcatggtgcgagcttcaagacagaaagctaactaagagcgaaagacagcggtttaaagaagaggctgagatgcttaaagggctgcagcaccccaacattgtgcgcttttacgatagctgggagtcaaccgtgaaaggaaaaaagtgcatcgtccttgtaaccgagcttatgacgtcagggactctgaagacatacctgaaacggtttaaagtgatgaagatcaaggtgctgcgttcttggtgtaggcaaatattgaagggcttgcaattcctgcacaccaggacaccgccaattattcacagagatcttaaatgtgacaatatcttcatcacaggaccaactggctctgtgaagatcggtgacctgggcctagctactctgaaacgcgccagcttcgctaaatcggtaatcggtactcctgagttcatggcccctgagatgtatgaggagaaatatgacgagtctgtggatgtctacgcctttggaatgtgcatgctggagatggctaccagcgagtacccttattcagaatgccaaaacgctgcgcaaatttatcgtcgtgtcacctccggtgtgaagccagcttcatttgataaagtggccatcccggaagtaaaagagatcatcgagggctgtatccggcagaataaagatgaaaggtatagcatcaaggatctcttgaaccacgcttttttccaagaagaaaccggagtgagagtggaactggcggaggaggatgacggcgaaaaaatagctatcaagctgtggctgagaatagaagatataaagaaactgaaaggaaaatacaaggacaatgaggctatcgagtttagcttcgacctggagcgggacgtgcccgaggatgttgcgcaagaaatggtggagtccgggtacgtgtgtgaaggggatcataaaactatggctaaagctataaaagatagggtttccctcatcaagcggaaacgggaacagcgtcagctcgtacgtgaagaacaagagaaaaagaagcaagaggaatcaagtcttaagcagcaggtggaacagtcctctgcctctcagaccggcatcaaacagttgcctagtgcatctactgggatccccactgcttcaaccacgtccgcctccgtgtccacgcaggtggaacctgaagagcctgaggctgaccagcaccagcagcttcaataccagcagccatccatcagcgtactgagtgacggaacagttgacagtggtcaggggtcatcagtgttcaccgaaagccgcgttagcagtcagcaaacggtttcctacggtagtcaacatgaacaagcccacagcaccggcacagtgccaggacatatccctagcactgtgcaagctcagagccagccgcatggtgtctatcccccctcgagtgtacctcaaagcatggcacacccctgtggcggcacacctacatatcctgagagccagattttcttccctaccatacacgagaggcccgtgagcttctctccccctcccacgtgtccccccaaagtggcaatttcccagagacgcaaatccacatcatttctcgaagcccagactcatcactttcagccactactgcgaacggtgggacagtcactgttaccccccgggggcagtcctaccaactggaccccggaggcggtcgttatgcttgggaccaccgcttcaagggttactggagaaagttgtgagatccaggtccatcccatgtttgagcccagccaggtgtattctgactatcgccccggactggtgctacctgaagaggctcactattttattccacaggaggcggtttatgttgcaggcgtccactaccaggctagagtggctgagcagtacgagggaatcccctacaattcttcagtcttgagctccccaatgaaacagattcccgaacagaagccagttcagggtggtccaaccagctcctccgtgtttgagttcccctcagggcaggccttcctggttgggcatctgcagaacttacggctggattccggattgggcccgggatcgcccttgagctcaatcagcgcaccaatttccacggacgccacaaggcttaaatttcacccagtgtttgtgccccacagtgctcccgctgtgctgacccataataacgagagcagatcgaattgcgtcttcgagtttcacgttcataccccctctagcagctcgggcgaggggggaggaattctaccgcagagggtttaccgcaaccgccaagtggcagtcgatctcaatcaggaggagctaccgcctcagtcagtgggacttcatggatacctgcagcccgtgactgaagaaaagcataactaccacgctcctgagttgactgtgagcgtcgtcgagcctattggccagaactggccaattgggtcacccgaatactcgagcgacagttcccaaattacgtctagcgaccccagtgactttcagagccctccgcccacaggtggtgctgcagcaccgtttgggagcgatgtgagtatgcctttcattcatttgcctcagaccgtcctccaggaatcacctctcttcttctgtttcccacagggaacaacttcccagcaggtcctgaccgcgagcttcagtagcggcggatctgccctccatccccaagctcagggacagagccagggacagccaagtagtagctccctcaccggggtgagttcgagccagcctatccagcacccacaacaacagcaaggcatccagcagacggctcccccccagcagacagtgcagtacagcctgtcacagacttccacaagttccgaggctaccacggcgcagcctgtgagccaaccccaggccccacaggtactgccccaggtctctgcaggcaaacagggttttcccccaagattgcctccccaatacccaggggacagtaatattgcacctagttccaatgtagccagcgtctgcatacattccaccgtgctgtcacctccgatgcccacagaagtactggccacgccgggatatttcccaactgtggtccagccctacgtggaaagcaatctcctggtgcccatgggtggggttggtggacaggtgcaggtttctcagcccggcggaagcctggcccaagcccctacaacttcatcacaacaggccgtactagagtctactcagggagtgtcccaggtggcccctgcagaacccgttgcagtggcccagacacaggctacccagcccacaacactcgcctcttcagtggattccgcgcactctgatgtggcttccggtatgagcgacggtaatgagaatgtccctagttcttctggccgccacgagggacgcaccacgaaacgccattaccgtaagtccgtccgctccagatcccgtcacgagaaaacaagtcgcccaaaactaaggattctgaacgtgagtaacaagggtgacagggtggtggaatgccagcttgagacccataatagaaaaatggtgaccttcaaatttgatctggacggggataaccctgaagaaatcgccacgattatggtcaataatgactttattctcgctatcgaaagagagtctttcgtcgaccaggtcagagagatcatcgagaaggctgacgagatgctcagcgaggacgtgtcagttgaaccggagggcgatcaggggttagaaagcctgcagggcaaagatgactatggcttttccggatctcagaaattagaaggggagtttaagcagcccatcccggcatctagcatgcctcagcagattggcattccaacctcctccctcacacaggtggtgcacagcgctggtcgcagattcattgtcagtcctgtcccagagtcacgcctccgtgagagcaaagtcttcccatcagagatcaccgatacagtggcagctagcacagctcagtcacctggcatgaatctgtcccacagcgcaagctccctgtcgctgcagcaggcctttagcgagctcaggcgggctcaaatgaccgaaggaccaaacaccgccccgcctaattttagccatacaggacctacattccccgttgtgcccccattcctgtcctccattgcaggggtccctaccaccgccgcagccacagcgcctgtgccagctacatcatctccacctaatgacatctccacatcagttattcagagcgaagttactgtcccaactgaggaaggtattgctggagtggctacctccaccggcgtagttacctctgggggcctgcccattcccccagtatctgagagccctgtactcagttccgttgtttcatccatcactatacccgccgtggtttccatcagtactaccagtccttctctgcaggtgccaacttcgactagcgaaattgtggtctcttccactgctctttatcccagcgtgacagtctccgcgacttcagcgtccgcgggtggaagcactgctacccctggccctaagccaccagctgtcgtgagtcagcaggcggcaggatccactaccgttggcgccaccctcacatctgttagcaccactacatccttccctagcacagccagccagctgtgcatacaactgagcagcagcacctcaacacccacactcgcagagaccgttgtcgtatccgcccacagcctcgacaaaaccagccactcgtcaactacaggactcgccttttcactgtccgctccctcctcgtcttcttcccccggagctggggtgtcaagttacatctcgcagccagggggtctgcatccgctggtcatccctagtgtcatcgcatccacgcctatactcccgcaggccgccggcccaacctccacgcctctgttacctcaggtgcctagcattccgccactcgtgcagcccgtggctaatgttccagctgtccagcagacactgatccacagtcagcctcaacctgctctgctgcccaaccagccccacacccattgtccagaagtggacagtgacacacaaccgaaggccccaggcatcgacgatattaaaacgctggaagaaaagttgcgcagtctctttagtgaacactccagctccggcgcgcaacacgcatcggtgagtctggagaccagtctcgtgatcgaatcgactgttacaccaggcattcctacgacagcagtagcgcctagtaaactgcttacttcgacaaccagtacatgtctgcctcctacaaatctcccgcttggcacagtggcgctcccagtaacccccgttgtaacccctgggcaggtgagcacacctgtgagcaccacgactagtggggtgaaacccggcacagcccccagtaaaccccccttaacaaaagcccccgtgctgccagtgggcacggagctacccgccggtaccctgccatcagaacaactccctccattcccaggcccatcgctgactcagtctcaacagcctctcgaggatcttgacgcccagctgaggcggaccttatcccccgaaatgattactgtgactagtgcagttggacctgttagcatggcggcccctacagcaattacagaggctggaactcagccacagaagggagtgagtcaggtcaaagaaggaccagtgttagcaacctcgagcggggctggtgtatttaaaatgggtcggttccaggtgagcgtcgccgcagacggggctcagaaggaaggcaagaacaagagcgaagacgcaaaatcagtacacttcgaaagctctacatcggaaagcagtgtactgagctcttcttctccagaaagcactctagttaaacctgaacccaatgggattaccattcccggaatcagtagcgacgtgcccgagtcagcacacaaaacaactgccagcgaagcgaaatccgatactgggcagcccaccaaagttggtcgtttccaggtgaccacaactgcaaacaaagtgggtagatttagcgtttccaagacagaggacaagattacagacactaagaaggaaggtccggtggcctcaccccccttcatggacctggaacaggccgtgctgcctgccgtcatacctaagaaagagaaacctgagctgagcgagcccagtcaccttaatgggccatccagcgaccccgaggcagcatttttatcgagggacgtggatgatggcagcggttctccacattccccgcaccaactgagcagcaaatcactgccctctcagaacttgtcccagtccctgagtaatagtttcaatagttcctacatgtcatcagataacgaatccgacattgaagacgaggacctgaagctggagctccgacggctccgggataagcatcttaaggagatccaggacctccagtccagacagaaacacgagatagaatctctgtacaccaagctaggcaaggttccccccgccgtgatcatccccccagccgcccccttgtcgggaagacggcgcagacccaccaaatccaagggctccaagtctagcagatcctcttccctaggtaacaagagtccccaactaagcggcaatctgagtggtcagtccgccgctagcgtgctgcatccacagcagactctccacccccctggaaatataccggagtcaggccagaaccaattgctccagcccttgaagccttccccttcatcggacaacctgtatagtgcattcacatccgacggcgccatctctgtcccgtcccttagcgccccgggacagggaacgtctagcacaaacaccgtcggagctaccgtgaacagccaagctgctcaagcccagccgcctgctatgacctcctctcgaaaaggcactttcacagacgacctgcacaagctcgtcgataattgggctcgggacgccatgaacctcagcggccgccggggttcaaaaggccacatgaattacgaagggcctggcatggcgaggaagttcagcgcccccggccaactctgtatttccatgaccagtaacctcgggggtagcgctcctatctctgcagccagcgccacgtcactgggacattttactaagtcaatgtgtccccctcagcagtatggcttcccagccacccctttcggcgctcagtggtcaggtaccggaggaccagcgcctcagcccctcgggcagttccagccggttggcacggcttcactgcagaacttcaatataagcaaccttcagaagtccatcagtaatccccctgggagtaacctacgcaccacctag

SEQ ID NO: 211503 - DNA, 6894 bp, synthetic construct
  misc_feature 1..6894: note = Description of Artificial Sequence: Synthetic coding sequence
  source 1..6894: mol_type = other DNA
atggacggcgacggcggccggcgggacgtgcccggcaccctgatggagcctggccgtggcgcaggacccgccggcatggcagagccacgggctaaggcagccagacctggtccccagcgttttttacgcagaagcgtcgtcgaatccgaccaggaagaaccccccggcctcgaagcagccgaggcccctgggccccagcctccacagcctttacaacgcagagtgctgctgctgtgtaagacccgccggctcatcgccgaacgtgctcgtggccgtccagcggcacccgctccagctgcattggtggcacagcccggagcccccggagctcctgctgatgccggtcccgaacctgtcggcacccaagagcccggcccagaccctattgctgccgccgtcgaaactgcccccgcacctgacggggggcccagagaggaggccgctgcaacggtgagaaaggaggacgaaggcgccgccgaagccaaaccagagccaggccggactagacgagacgagcctgaggaagaggaagatgatgaagatgatctgaaggcagtggcaacctccctcgacggtcggttcctgaagtttgatattgagctcggacgcgggtcctttaaaacagtctataagggactggacacagagacctgggtggaggtggcttggtgtgagctgcaggatagaaaactgactaaacttgaaagacagcgcttcaaggaggaggccgaaatgcttaaaggattgcagcacccaaacatcgttcgcttctatgatttctgggaaagctctgccaagggcaaaagatgcatcgtcctcgtgactgagctgatgacttccgggacgttaaagacctacttaaaaaggtttaaagtgatgaagcctaaagtcctgagaagctggtgtaggcagattctgaagggtctactgtttttgcatacacgcactcctccaatcatacaccgagacctgaaatgcgacaatatatttatcacgggcccgacaggctcggtgaagattggcgacctcggtcttgcaactctaaagcgggcgagcttcgccaaatctgtcatcgggactccagagtttatggccccagaaatgtacgaagaacattacgacgaatctgtggatgtctacgcctttggaatgtgcatgctcgaaatggcaacctcagaatatccttactcagaatgtcagaatgcggcccagatttaccggaaagtaacctgcgggataaagccggcttctttcgagaaggtgcatgaccccgagatcaaagagattatcggggagtgcatctgcaaaaataaagaagagcgctatgagataaaggatcttctctcgcacgcattctttgcagaagacacaggggtccgggtcgagctcgctgaagaggatcatgggagaaaaagcacgatcgccctccggctctgggtggaggatcccaaaaagctgaagggtaagcctaaggacaacggagcaatcgagttcacattcgatctagagaaggagactcctgatgaagttgcacaggaaatgattgaaagtggattttttcacgagtccgacgtcaagatagtcgcaaaatcgattcgggatagagtggccctgatacagtggcgccgggaacggatttggcccgccttgcagccaaaggagcagcaagacgtgggctcgcccgacaaagccagagggccacccgtgccacttcaggtgcaggtaacctatcacgcccaggcaggacaaccagggccaccagagccagaggaacccgaggctgaccaacatctgttaccacctacgctccctacttccgcaacctcactggcctccgattcgacatttgactcagggcaaggttcaactgtctactcagatagtcaatcaagccaacagtccgtcatgctcgggtccttggcagacgcagctccgtcacctgcccaatgcgtgtgttctccacctgtctccgagggcccagttcttccacagtctctccccagtctcggcgcatatcagcaaccgaccgctgccccaggcctccctgttggctcagttccagcgccggcctgtccgcctagtctacaacagcattttcctgatcctgcaatgtcatttgcacctgttttgccccctccttccacaccaatgccaaccggaccaggacagcctgctccaccaggacagcagccccctcccctggcacagcccaccccattgccacaggtgttggccccccaacctgtcgtacccctgcagcctgtcccaccccatctccccccctatctggcccccgcctctcaggtgggagctcccgcgcagctgaaacctttacagatgccacaggcacccctccagcctttggcacaggtccccccacaaatgcctccaattcctgtcgttccccctataactccactcgccgggatcgacggtctgccgcctgctttgccagacctacctaccgcaacggttcctccggtcccaccgccccaatatttctcccccgcagtgatcctccccagcctggccgcacccctgcccccggcctcccccgcacttcctctgcaggctgtgaagctgccgcatccaccaggcgcaccactagctatgccctgtagaaccatcgtgcccaacgctccggctacaatcccactgctggctgttgccccacctggcgtggccgccctgtccatacatagtgccgtggcacagttaccgggccagccggtctatcctgccgcattcccacaaatggcaccaacggatgtaccaccaagccctcatcataccgtgcaaaatatgagagccacgccgccccagcccgccttgcctccgcagccaaccctacccccccagccggtgctgccaccccaaccaactttaccgccccagccagtcctgcctccccagccaactcggccaccacagccagtgttgccaccacaaccgatgctgcctcctcagccagtgctgccaccccagccagcccttcctgtaaggccagagcccctgcaaccccacctgcctgaacaggctgcaccagccgccactcctggatcccagatcctgttgggtcatcccgctccatatgccgtagacgttgctgcacaggtgcctactgtgccggttcccccggctgctgtgctctccccacctctgccggaagtgctgctgccagcggccccagaactgctgccccagttccctagctcactcgctaccgtcagcgcttctgtacagtccgtgcctacacagacagcgacgctcctgcccccggccaacccgcccctccctggaggtccagggatagcgagcccttgtcctactgtacagctcacggttgagcctgtccaggaggagcaggcctcacaggacaaaccaccgggactgccccaatcgtgcgagtcgtatggcggcagtgacgttacctccggtaaggaactaagcgatagttgcgagggcgcatttggaggggggcgactcgaggggcgggcagcaaggaaacatcaccggcgttccaccagagcacgctctcggcaggagagggccagcaggccacgcctgaccattctcaacgtttgcaacactggggataaaatggtggagtgtcagttggagactcacaatcataagatggtgacttttaagttcgacttggacggtgacgccccagacgaaattgcaacctacatggtcgagcacgattttattctccaggccgaaagagagaccttcatcgagcaaatgaaggatgtgatggacaaggcagaggatatgctcagtgaggatactgacgcagaccggggttccgatcctggtactagcccccctcatttatcgacttgcggcttaggcacaggggaggagtctagacagtcccaggccaatgccccggtttaccagcagaacgtactccatactggcaagcgatggttcataatttgtcctgtggctgagcatcctgcccctgaagcccctgagagctccccccctttacctctctcttccctgcctcccgaggccagtcagggcccttgtcgcggcctcaccttgccctgcctgccttggcgccgtgcagcatgtggcgcggtattcctgagtcttttctcggctgagtctgctcagtccaagcagcctccggactcagccccctacaaagatcagttgtcaagcaaggaacagccttcatttctggcgtcccagcagctgctgtcccaggccggtcctagcaatcccccaggcgcacctcccgctcccctagcccccagcagtccacctgtcactgccctaccccaggacggagccgctcccgccacctcaacgatgccagagccagcttcgggcaccgccagccaggccggagggccaggcactccacaaggcctgacttccgagctggagacctctcagcctttagcagagactcacgaggctcctcttgccgttcagcctctggtggtcggtctggcaccctgcacacccgctcccgaggctgcatcaacgcgcgacgcctccgcccctagggagcccctaccgccgcccgcaccagaaccatcgccacacagtggaacaccacagccagccctcggccagcccgctccgcttctacccgcagccgtgggtgcggtgtccctggctacgtcacagctacctagtcctccactcggtcctactgtgcccccacagccaccctctgctctggagtcagatggagagggacctccaccccgggttgggttcgtggactccaccattaaatcactcgacgaaaaactgcggaccctgttatatcaagagcacgtgccgacatcgtctgcttcggcgggaacccctgtagaggtgggcgatagagacttcaccctggagccgctgaggggtgaccagccccggtctgaagtgtgcggtggcgatttagcgctccctccagtgcctaaagaggcagtgtcgggtagagtgcagctccctcagccacttgtcgaaaagtctgagctggctcccacccgcggggccgttatggaacaggggacatcttcatctatgaccgcggagtcttcccccagaagtatgcttggatacgatagggacggccggcaggtggccagtgatagtcacgtagttccatccgtgcctcaggacgttccggcctttgtgagacccgctcgcgtggagcctacagaccgcgacggaggagaagctggggagtcttcagcagagccacctccttctgatatgggaacagtgggaggtcaggccagccacccacaaacattgggggctagggctctaggaagtcctagaaagcgacccgagcagcaggacgtgagctcgccagcaaaaactgtaggcaggttttcagtagtgtctacccaggatgagtggaccctggcctccccgcatagtttgagatactctgcacctcctgacgtgtacctggatgaagctccatcttcgcccgacgtgaagctagcagtgaggagggcccaaaccgccagcagcatcgaggtgggggtaggtgagccagtgagctctgactccggagatgaagggccccgggcacggccgcccgtgcagaagcaggcaagtctccctgtgtctggatcggttgctggtgacttcgtgaaaaaggcaaccgcatttctgcagcgccccagcagagccgggtctctcggccccgaaacccccagtcgggtggggatgaaagtgccgaccatttcggtgacgtcctttcacagccaaagctcatacatttcatcagacaacgatagtgaactggaagacgccgacatcaagaaagaattacagagtcttagggagaagcacttaaaggaaatttcagagcttcaaagccagcaaaaacaggaaattgaggccctttaccgcaggctgggcaaaccactcccaccaaacgtgggatttttccacaccgctccacctacgggtcggagacgcaagacctctaagagcaagctcaaggccgggaaactgttgaaccctctcgttcggcagctaaaggtggtggcgtcctccactggccacctggcggatagcagcaggggtccacctgcaaaagatccagcacaggcttcggtcggcctcaccgctgacagcacaggcctatcgggcaaagcagtacagacgcagcagccatgttccgtgcgcgcatcactgagtagtgacatctgctcagggcttgctagcgacggagggggcgcccgtggccagggctggactgtatatcacccaacctctgagagagttacctataaatccagcagtaagccgcgagctagatttctgtctggtcccgtctcagtctccatctggagcgcgctaaagcggctctgcctcgggaaggaacacagttctcgcagctctacaagcagcctggctcccggtcctgaaccgggtcctcaacccgcacttcacgtgcaggcgcaggttaacaactctaataataaaaaaggtacctttaccgacgacttgcacaaattggtggacgagtggaccagtaagaccgttggagcggcccagctgaaacctaccttaaatcagctgaaacagacacagaaactgcaggacatggaggcacaggccggatgggcagcgcccggagaggcacgcgcaatgacagcgccacgcgcaggagtaggtatgccccggctccctcccgcccccgggccacttagtaccacggtcattcccggagctgctcccactctgagcgttcctaccccagatggtgcgctcggcaccgccaggagaaaccaggtgtggttcgggctgcgggttcccccaactgcttgttgcgggcactccacccagccacgtggcgggcagcgagtgggtagcaaaaccgcttcgtttgctgccagcgaccccgttcggtcctag

SEQ ID NO: 211504 - DNA, 5601 bp, synthetic construct
  misc_feature 1..5601: note = Description of Artificial Sequence: Synthetic coding sequence
  source 1..5601: mol_type = other DNA
atggccaccagcgagtacccctacagcgagtgccagaacgccgcccagatctacaggaaggttacttgcggaatcaagcctgccagctttgaaaaggttcacgatcccgaaatcaaggaaatcattggggaatgcatttgcaagaataaagaagagcgctacgaaatcaaagatttgctctctcacgcattctttgccgaggacactggagtccgggtggagctagcagaggaggatcacgggcgcaagagtacgattgccctgagactttgggtggaggatcccaagaagttgaagggcaagcccaaagataacggcgctatcgaattcaccttcgaccttgaaaaagaaacccccgatgaagtcgcgcaggaaatgattgaatcaggcttctttcacgaatccgacgtaaagatcgtagcaaaatccattcgcgacagagtggctcttattcagtggcggcgggaacgcatctggccagcccttcagcctaaagagcagcaagacgttggctctccggacaaagctcgcggtcccccagtcccattgcaggtgcaagttacttaccacgcccaggcaggacagcctgggccccccgagccagaggagcctgaagccgaccagcatctgctgccccccacactgcccacaagtgctactagcctggcctcagattcgaccttcgattccggtcagggctccaccgtgtatagtgacagccagagttcgcaacagagcgtgatgttgggaagccttgccgatgccgccccatcccccgctcagtgtgtctgttcccctcccgtctctgagggccccgtcctgccccagtcactgcctagcctgggggcttatcaacagccaactgccgcacccggcctgcctgtcgggtccgttccagccccggcatgccctcccagcctccagcagcactttccagacccggccatgtcatttgccccggtgctgcctcccccatccacgcccatgcctactggacctgggcagccggcaccacccggtcaacaaccccccccactggcccagccaaccccactgccgcaagtcttggccccccagcccgttgtcccgctacagccggtccccccacacttgccaccttatctggcccccgcgtcgcaggtgggtgcgcctgcacagctgaagcctttacagatgcctcaggcacccctgcagcccctggcacaggtaccccctcagatgcctcccattccagtcgtgccccccatcacacccctggctggcattgatgggcttcctccggctctgcccgacctccccactgctacagttccccctgtcccaccaccccaatatttttctcccgccgtcatactgccatcactcgcagctcctctgccaccagccagccctgccctgcccctgcaggctgtgaaactgccacacccgccaggtgccccactggccatgccctgcaggacaatcgtgccaaatgccccagccacgattccattactggcagtagctccacccggagtggccgctctgtcaattcactccgcagtagctcagcttccggggcagcctgtgtaccctgcagcctttccacagatggctcccacggacgtccccccttcacctcatcacactgtgcagaatatgcgggccacaccgcctcaacctgcgttgccgcctcagcctactctgccgccccagccagtgctgcccccacaaccgactctgcctccccagcccgtactgcctccacagccaacacggcctcctcagccagttctcccaccccagcccatgttacccccccaaccggtgctgccaccacagccagccctgccagtccgccctgagcctctgcagccacatctgcctgaacaagcagcacctgctgcaaccccgggaagccaaatattgttgggccaccccgctccctacgctgtcgatgtcgccgctcaggttccaactgttcccgtaccacccgctgcagtgctttccccccctctcccagaggtcctgcttcctgcggcaccagagctgcttcctcagttcccgagtagtctggccacagtgtccgctagtgtgcagagtgttcccacacagacagcaacactactaccacccgccaaccccccacttcctggcggcccaggcattgcgagcccttgtcctactgtacaactcaccgtcgagcccgtccaggaggagcaggctagtcaggacaagccccccgggcttcctcagtcctgcgaaagctatggtggcagcgacgtgacaagcggaaaggagctgagcgattcatgtgagggtgcgtttgggggcggaagacttgagggcagagctgctcggaaacatcaccggcgcagtactcgtgcgcgcagccgacaggagcgcgcctcaagaccccggttaacaatccttaatgtctgtaacaccggtgacaagatggtggagtgccagctggagacccataatcacaaaatggtcactttcaagttcgatctggacggggacgcaccagatgagatagctacatatatggttgagcacgacttcattcttcaagcagagcgcgaaactttcatagagcagatgaaggacgtcatggacaaggcagaagacatgctgagcgaggacaccgacgctgacaggggatctgatcccggaacgtctccgccgcacttatctacctgtgggctcgggactggagaggaatctcgacagagccaagccaacgcaccggtgtatcagcagaatgtgcttcataccggcaagagatggttcattatctgtccagtggccgaacacccggctccggaagcccccgaatcctcccctcctctccccttgagctcattgcccccggaagcaagccaaggcccgtgtcggggattaaccctgccttgtctgccctggagacgggccgcttgcggggcggtctttctgtccttattctcagccgagagcgctcagtcaaagcaacccccagattcggcgccctacaaggaccaactgagctctaaggagcaaccttcctttctggcatctcagcagctgctctcacaggctggcccatccaaccccccaggcgcaccgccggcgcctctggccccatcatctccacctgtcactgccctgccacaggacggagcagcccctgcaacaagcaccatgccggagcctgctagcgggacagccagccaggccggggggccaggaaccccacagggactgacttccgaactcgaaacttctcagcccctagcagagacacacgaggctccactagccgtgcaaccactggtcgtgggattagccccatgcacaccggcccccgaggctgcctccacgcgagacgccagtgccccacgggagccccttccgccacctgcccctgagccttcacctcattctgggaccccgcagccggctctggggcagccggcgcctttgctcccagccgccgttggggctgtgagcttggctacttcacaacttccctctccgccactgggtccgacagtcccaccacagcctccttcagcactggaatctgacggagaagggccacccccacgcgtgggttttgtggatagcactatcaagagcttggacgagaagctccggaccctgctataccaggagcacgtgccgacttcttctgccagtgctggcacccccgtcgaggtaggtgaccgagattttaccctggagcccctccgcggggatcagcctcgcagtgaggtctgtggcggcgacctcgctcttccacccgtcccaaaggaggctgtctcagggagggtccagttgccacaaccactagttgaaaagtcagaactcgcacctaccagaggagcggtgatggaacaggggacaagttcctctatgactgctgagtcatctccaaggagtatgcttgggtacgaccgagacggcagacaggtcgccagtgactctcatgtggtaccatctgtgccccaggatgtgccagcctttgtgagaccagcacgggtggagcctaccgatagggacggaggtgaggccggcgagtcttccgcagagccccccccttccgatatgggcaccgtaggggggcaggcctcgcacccacagacacttggtgcaagagcgctcggttcccctcgaaaacggccggagcagcaggacgtcagctcgccggcaaaaactgtggggagattctcggtagtctcaacacaggatgagtggaccctcgcttccccccatagtctacgctattctgccccgcctgatgtgtatttggacgaggctccttctagcccagacgtcaagctggccgtgagacgcgcccagacggctagctctattgaggtaggcgttggggaacctgtgtctagcgattcgggagacgaaggaccgagagcccgccctcctgtgcagaagcaggcctcgctgcccgtcagcggctctgtcgctggcgactttgtgaaaaaggctaccgcctttttgcagcgcccaagccgtgcagggtcgctaggccctgagaccccttctagagttggcatgaaagtccccaccatcagcgtgacaagttttcattctcagtcctcgtacattagctctgataatgatagtgagctggaagatgccgacatcaaaaaagagctacagtctcttcgggaaaagcacttaaaggaaatttctgaactgcagtcccaacagaaacaggagattgaggcgctgtaccggagactcggcaagcccctgcccccgaacgtgggatttttccatacggcaccgcctactggccggcgacgcaagacatccaaatccaagttaaaagctggcaagctgttgaaccctctagtgcgacaactaaaggtggtcgcctccagtaccggacaccttgcagattcttccagaggccctcccgctaaagatcccgcacaggctagcgtgggcctgacggccgactcaacaggccttagcggaaaagccgtgcagacacagcagccttgtagtgtccgtgcctccctatcctccgatatctgtagcggcttggcgtcggatggaggaggcgccagaggccagggctggactgtgtaccaccccaccagcgagagggtcacgtacaagtctagcagcaaaccaagagcccgtttcctgtcggggccggtgtccgtgtctatttggtcagcccttaagaggttatgtcttgggaaagagcattcgtctaggagcagtacgagttctcttgctcctggccctgaacccggtcctcagcccgccttacatgttcaggcgcaggtcaataattcgaataataaaaaggggacttttaccgatgatctgcacaaattggtcgatgagtggaccagcaagaccgtgggcgcagcccagttgaagcctacactgaaccaactgaagcagacgcagaagcttcaagatatggaggcacaggccggctgggccgcccccggggaggctagggcaatgacagcccccagagccggagttggaatgccccgactcccacctgctcctggtcctctgagcacaacggtaattcctggagccgctcctaccctatcagtcccgacccccgaccctgagtctgagaagccagattag

SEQ ID NO: 211505 - DNA, 1092 bp, synthetic construct
  misc_feature 1..1092: note = Description of Artificial Sequence: Synthetic coding sequence
  source 1..1092: mol_type = other DNA
atggagcagggcaccagcagcagcatgaccgagagcagcccccggagcatgcttggctatgacagggacgggcgccaggtcgcatccgattctcacgttgtgccaagcgttccacaagatgtgcctgccttcgtgaggcctgcccgagtagagccaacggaccgagacggcggggaggctggcgagtcatccgcagagccaccgccctccgatatggggaccgtgggagggcaggctagtcacccccaaaccctgggagccagggcactcggctccccaaggaagcggcctgaacagcaggacgtttcctcacctgccaagacagttgggaggttttcggtggtatctacacaggacgaatggacactggcttccccgcatagtctgaggtacagcgcgccaccagacgtgtacctcgatgaggcaccatcctcacctgacgtgaaacttgcggttagaagagcgcaaactgcttccagtatcgaagttggcgtcggagagccggtgtccagtgatagtggtgatgagggaccgcgagcaagacccccagtccagaagcaggcttccctccctgtgagcgggtctgtggccggtgacttcgtgaagaaagctacatcgtgccgcggccttttagggccaagtctcggcccagagaccccctccagagtcggcatgaaagtgcccaccattagcgttaccagtttccacagtcagtcaagctacattagctccgataatgatagtgaattagaggatgccgatattaaaaaagagctgcagtctctgcgtgagaagcacctgaaggaaattagcgagctccagtctcagcagaaacaagagattgaggctctgtacagacgactgggtaagccactgcctccgaatgtgggattctttcacacagcccctcctacagggcgacggcgcaaaacatccaaatccaaactgaaagcaggcaagctactgaatcctcttgtgaggcagcttaaagtcgtggcctcatctacaggtcatctggcagatagctcaaggggtccacctgcaaaggatcccaaacccgtgtggggtagtctgcagactgcccgcgcatag

SEQ ID NO: 211506 - DNA, 2340 bp, synthetic construct
  misc_feature 1..2340: note = Description of Artificial Sequence: Synthetic coding sequence
  source 1..2340: mol_type = other DNA
atggagcccggccggggcgccggccccgccggcatggccgagccccgcgctaaggccgcaaggccaggcccccagagattcctgcgtagatctgtagtcgaaagtgatcaggaagaacccccggggctggaggctgctgaagcccctgggcctcagcctccccagccacttcagaggcgagtcctgcttctatgcaaaacccggaggctgatcgccgagagagccaggggacgtcccgcggcgccggcacctgccgccctggtcgcgcagcctggggcaccaggcgccccagcagacgccggccccgagccagtcggaacgcaggaacctggacctgacccgatcgcagcagctgttgagaccgcaccagccccagatgggggaccccgtgaggaggctgcggctacagtgagaaaggaagatgagggcgcggccgaagcaaagcccgagccagggaggacaaggagggatgaaccagaggaagaggaagatgatgaggacgatttaaaggcagtcgcaactagtctggatggtcggtttctgaaatttgacatcgagctaggaagagggagtttcaagaccgtgtataagggcctcgatactgagacatgggtcgaggtcgcatggtgcgaactgcaggaccggaagctgactaagctcgaacgccagagattcaaagaggaggctgaaatgctgaaggggctccaacacccaaatatcgtgcggttctacgatttttgggaatccagcgcaaagggaaagagatgtattgtgttagttaccgaactcatgaccagtggcaccctgaaaacatatctgaaacgcttcaaagtgatgaagccaaaggtgctgcggtcctggtgccgccagatcttgaagggactcttgttcctgcacaccagaacaccacccataattcaccgcgatctcaaatgtgataatatcttcatcaccggtccgacaggatcagttaagatcggtgatttagggctggcaaccctaaagcgcgccagctttgcaaagtctgtaattgggactccagagttcatggctccagagatgtacgaggagcattacgatgaatctgtggacgtgtacgccttcgggatgtgcatgctggaaatggcaacgtctgaatacccctactctgaatgtcagaacgccgcgcagatttatcggaaagtcacctgcggcatcaaacctgcaagttttgaaaaggtgcacgatcccgaaattaaagaaattataggcgaatgcatttgtaagaacaaggaggaacggtacgagataaaagatttactctctcatgccttctttgctgaggacactggggtgagagttgagctggcggaggaagatcacggtagaaagagcaccattgccctgcgactgtgggtggaggatcctaagaagctgaagggaaaacccaaagataatggtgccatcgaatttacgtttgatctggagaaggaaacccccgatgaggtggcacaggagatgatagaatcaggattcttccacgagagcgacgttaaaatcgtagccaaatccatacgcgacagagtagcgctgatccagtggcgtagagagcgtatatggccagcacttcagccaaaggagcagcaagatgtcggtagtccagacaaggcacggggacccccagtgcccctgcaggtgcaggtcacttatcatgcccaggctggccagcccggtccaccagagcctgaggagcctgaagctgaccagcacctactgcctcctacgcttcccacgtcagccacgagtctggcctccgattcaaccttcgacagcggccaaggatcgacagtgtactctgattcacagtcaagccagcagtcggtaatgctcgggtccctcgctgatgcggcaccatcccccgcacagtgcgtgtgcagcccgcctgtgagtgaagggcctgtccttccacagtctctacctagccttggagcatatcagcagccaacagccgcccctcctccactagcccaaccaacgccattgccacaagttctggcccctcagcccgtggtacctctgcaaccagttccgccacacttgcccccctacctagctcctgcctcccaggtcggcgcacctgctcagctgaaacccctccaaatgccccaggcacctctgcaacccctggcccaagtccctccacagatgccgcctatccctgtagttcctcctattacccccctcgcggggattgatgggctgccgcctgccctacccgacctgcccacagctacagtgcctcctgttccgcccccacagtacttttcaccagcagtgattctcccatctctggccgcctag

SEQ ID NO: 211507 - DNA, 6654 bp, synthetic construct
  misc_feature 1..6654: note = Description of Artificial Sequence: Synthetic coding sequence
  source 1..6654: mol_type = other DNA
atggacggcgacggcggccggcgggacgtgcccggcaccctgatggagccgggacgaggtgccggacctgctggcatggccgaaccgcgcgctaaggctgcacggcccgggcctcagcgcttcctcaggcgcagtgttgtcgaaagtgaccaggaggaaccacccggacttgaggcggcggaagcccccgggccccagccaccgcagcctctccagcgtcgagtgctcctgctttgtaaaacgcggcgcctgattgctgagcgggcacggggcaggccagccgctccagcaccagcagctttagtggctcagcctggagctccaggcgcacctgcagacgcggggcctgaacctgtcggaacacaggaacctggcccagatcccatagcggctgcggtggagacggctcctgctcctgatggcggtcccagagaagaggccgctgcaactgtgagaaaggaggacgagggcgcagccgaagcaaagcccgaaccaggtcgtaccaggagagatgagcccgaggaggaggaggacgatgaggacgatctcaaggcagtggcaacatcactggacggaagatttttaaaatttgacatcgaactcgggagggggtctttcaaaacagtctacaagggcctggacaccgagacctgggtggaagtcgcctggtgtgaactgcaagaccggaagctcaccaaactcgaaaggcagaggtttaaagaggaagccgagatgctgaaaggcctgcagcatccaaacatcgtccggttctatgacttctgggagtccagcgctaaagggaagcggtgtattgtgctggtcaccgagctgatgacatctggcacgctcaaaacctaccttaagcggtttaaggtcatgaaaccaaaagtgttgagaagttggtgcaggcagatactcaaaggattgctgtttctccacacccgaacgcccccgatcatccaccgagacttaaaatgtgataatatctttatcactggacctacaggaagtgtcaagatcggcgacctgggactggctaccctgaagcgcgcgtcattcgccaagagtgttatcggaactcccgaatttatggctccagagatgtacgaggagcactacgatgaatcagtggatgtgtatgctttcggaatgtgcatgttagagatggccaccagcgagtacccttattccgaatgccagaacgcagcccaaatttatagaaaggtgacctgtggcatcaagccggctagcttcgagaaggtgcacgaccctgaaatcaaagagatcatcggggagtgcatatgcaagaataaggaagagcgctatgaaataaaggatctgttgtcgcatgcctttttcgccgaggataccggagtgcgcgtggagctggcggaggaagaccacggccgcaaatcaacgattgctcttagactgtgggtcgaggacccaaagaagctcaagggcaagcctaaggataacggggccatagaatttactttcgacctagaaaaagagactccggatgaggtagcccaggaaatgatcgaatctggattcttccatgagagcgacgtcaagattgtagctaagagtattcgcgatagagtcgcgctgatccagtggcgccgcgagcgcatttggccagccctccaaccgaaagaacaacaggacgtagggagccccgataaggccagaggacctccagtgcctctccaggtgcaggtgacgtatcacgcacaagctgggcagcccggaccgcctgagcctgaagagcccgaagcagaccagcatctacttccaccaactctgcctacgagcgcaacctccctggccagcgactccacctttgactctggacagggttccaccgtatattctgatagccagtctagccagcaatctgtgatgctgggctcactcgctgacgctgctccctccccagcccagtgtgtatgctctccccctgtatccgagggtcccgtcctgccacagagtctcccatccctcggcgcttaccaacagcccactgctgcaccagggctgcccgtcgggagcgtccctgcgccggcctgccctccttctctgcagcaacatttccccgaccctgccatgagtttcgcaccagttctcccaccaccttcaacacctatgcccacagggcccgggcagcctgcacccccaggacagcagcccccacctcttgcccagcccacgccattgccccaggtgctggccccccagccggttgtgcccctgcagcccgtgcctcctcacctgcccccttacctcgcccccgcttcccaggtcggggcccctgctcaactaaagccacttcaaatgcctcaagcgccactgcagcccctggcacaggtgcctccacagatgccccccatccctgtggttccccctatcacccctctcgccggaatcgatggcctaccgcctgcactgcctgatctgcccaccgccacggtgccgccagttccgccacctcaatatttttcaccagccgtgatactccctagcttggcggcccctcttccacccgccagccccgccctgcccctccaggccgtgaagctgcctcacccacccggagccccacttgctatgccgtgccgaaccattgtgccaaacgcccctgctactatcccactgctggcagtggcaccacccggagtcgctgctctgtccatccactcagccgttgctcagttaccaggccagccagtctatcctgcagctttcccccagatggcccccactgatgtcccaccctcgcctcaccacacagtacaaaacatgcgagctacgccgccccagcctgctctgccacctcagccaactcttcccccccagcctgtgttgcccccacaacccaccctacctccacagcccgtgctccctccgcaacctaccagaccaccacagcctgtactgcctccccaacctatgttaccacctcagcctgtcctccccccacagcccgccctgcctgtcagaccagaacccctgcagccgcatctgccggagcaggcagctcccgcagccactcccggaagccagattctgcttggccatcccgcaccatatgctgttgatgtcgccgcccaggtccctacagtgcccgtaccacctgcggcagttttaagtccaccgcttcccgaggtgctgctacccgccgcacctgaacttctgccgcagtttccatcatcactggctacagtgtcagcaagcgtccagagcgtgccaacccagactgcgactttgttgccacctgccaacccccctctccctggaggaccagggatcgccagtccttgtccgacagtgcaactgacggtggagccagtacaggaggagcaagcttctcaggataagcctcccggactgcctcagtcttgcgagagttatggtggcagcgacgttacctcaggaaaggaactttccgatagctgtgaaggggccttcgggggcggtagacttgagggtcgcgccgcccggaaacatcatcgcagatctacgagggctaggtcccgtcaggagcgggccagccggccaaggctaactattctcaatgtatgcaatacgggtgacaaaatggtagaatgccagcttgagactcacaatcacaaaatggtgacattcaagttcgatctggatggcgatgcgccggacgaaatcgctacatacatggttgagcatgactttatcctgcaagcggaaagggaaacgtttattgaacaaatgaaagatgtgatggataaggctgaggacatgctcagcgaagacacagacgcagatagaggaagtgatcccggtaccagtcccccacaccttagtacctgtggtctcggcactggtgaggaatcgaggcagtcacaagccaatgcgccagtgtatcagcagaacgtactgcatacaggtaagcgatggtttatcatctgtcctgtggcagaacatccggcgccggaggccccagagtcgtcaccccctttgcctctcagtagtttaccccccgaagcctcccaggactctgccccttacaaggaccaactgtcatccaaagagcaaccaagcttcctggcctctcagcagctgctgagtcaggcagggcctagtaatccgccaggcgctccacccgccccattagcacccagctcccctcccgtcactgccctgccccaggacggcgccgcccctgccacttcaacgatgccggaaccggcctccggaactgccagccaggctggcggtcctgggacccctcaaggactcacttctgaactcgaaactagccagcctctggctgaaactcacgaggcccctctcgctgttcagcccctggtggtgggcctcgccccatgcacccccgctccggaggcagccagcaccagagatgccagcgcgccccgggagccactacctccccccgccccggaaccaagcccccattcgggcacaccacaacctgcattaggccagcccgcgcccttactccccgccgccgtcggggccgtgtcattggccacctcccagctgccctctccacctctcggaccaacagttcccccccagccaccttcagccctggagagcgatggggagggacctcctccaagggttggttttgtcgactcaaccataaagtccctggacgaaaagcttcgcacactgctctatcaggaacatgtgcctacttcaagtgctagtgctggaacccctgttgaggtgggagaccgcgactttactcttgagccccttcggggggatcagccaagatccgaagtttgtgggggggacctggcactccctcccgtccctaaggaggctgtgtccggccgcgtacagctcccacaaccgctggtcgagaagtccgagctcgcacccacccgaggcgcggtgatggagcaagggacgagctctagcatgacagcagagtcaagtcctcggtccatgctggggtacgatcgggatgggcgccaggtggcctcagacagtcacgttgtaccaagtgttccccaggatgtccccgcctttgttcgacccgcccgagtggagccaacggacagagacgggggcgaggcaggcgagtcgtctgccgagccaccaccatcggatatggggacggttggagggcaagccagccacccgcagactctgggagcccgggccctggggtctccccggaagcggccagaacagcaggacgtttccagccccgcaaaaaccgttggcagattctccgtagtctctactcaagacgagtggaccttggcgtcacctcactccttgagatactcggcaccccccgatgtgtacttagacgaggctccatcctcacccgacgtgaaactggccgtgaggcgagcccagacggcgtcttccatcgaggttggggtgggtgagccagtatcaagcgacagcggggatgaaggtccacgggcccggccacccgtccaaaaacaggcttccctcccagtttccggttcagtggctggagattttgttaaaaaggcaacagcttttctacagcggccatcacgcgctgggtctctcggacccgagacacctagtcgggtgggaatgaaggttccaaccatttcggtgactagctttcattcacagtcttcgtacattagctccgacaatgatagcgagctggaagatgccgatatcaagaaagagctgcagagtttgcgggaaaagcacctgaaggagatttcagaacttcagtcacagcaaaagcaagagattgaagctctctatcggcggttagggaaacctctcccccccaacgtcgggttctttcacacagctccgcccactgggagacgtaggaagactagtaaaagcaaactgaaagcgggtaaactcctcaacccactggtgaggcagctgaaagtcgtggcctccagcacgggacatctcgcggactcatcaagaggacctcctgctaaggaccccgcccaggcgagcgtggggctgactgccgactccactggtctgtccgggaaagcagtgcaaacccagcaaccctgttccgtgagggccagtctcagttccgatatctgcagcggcctggccagtgatggcggaggcgcacggggccaaggttggaccgtttaccatcctacatcggagcgcgttacctataaatccagctcaaaacccagggccagatttctgtcagggcctgtgtcagtgtctatttggagtgccctgaaacgcctgtgcctggggaaggagcactcctcacgcagcagcacttcatcgctcgctcctgggcccgagcccggcccgcagcctgcactgcacgtccaagcccaagttaacaatagtaataataaaaaggggacgtttacagatgaccttcacaagcttgtggatgagtggactagcaaaactgttggtgccgctcagctgaagcccaccctgaaccagttgaaacagacccagaagttgcaggacatggaggctcaggctggctgggcagcacctggtgaagcccgggccatgaccgccccaagggccggcgttggaatgcctcgcttgccccccgctcccggcccactatccacaaccgtgataccaggtgccgcccctaccctttccgtgccaactccggaccctgagtctgagaagccagactag

SEQ ID NO: 211508 - DNA, 5511 bp, synthetic construct
  misc_feature 1..5511: note = Description of Artificial Sequence: Synthetic coding sequence
  source 1..5511: mol_type = other DNA
atggccaccagcgagtacccctacagcgagtgccagaacgccgcccaaatttatcggaaagtgacatgtggcatcaaacccgcgtccttcgaaaaagtccatgaccctgaaataaaagaaatcattggagagtgcatttgcaagaacaaagaagagcgctacgagattaaagacttgctgagccacgcatttttcgcggaggacaccggggttagggtggagctggccgaggaagatcacggacgcaagagcaccatcgccctccgactgtgggtcgaagatcccaagaagttaaaaggcaaacccaaggacaatggtgctatcgagtttactttcgacctcgagaaggaaacccccgatgaggtggctcaagagatgatcgaaagtgggttctttcacgagagtgatgttaagatcgtggccaagtctatccgagacagggtggcccttatccagtggcggagggagcggatctggccggcactccagccgaaggagcagcaggatgtagggagccccgacaaggctagaggacctccagtgcccctccaggtgcaggttacttaccatgctcaggcaggtcaaccagggccaccagaacctgaagagccggaggcagatcagcatctcctcccccccacactgcctacatccgcaaccagcttggcgtcagactccacattcgactctggccaaggtagcactgtctattctgactcccagtcatctcagcagtccgtcatgctcggaagcctagctgatgcagcgcctagccccgctcagtgcgtgtgcagccccccagtcagtgaaggcccagtgctgccacagtcgctgcccagccttggtgcttaccagcagccaacagccgcaccagggctcccggtaggcagcgtcccagcccccgcttgtcctccttcattgcagcagcacttccccgacccagccatgagctttgccccagttctccctccgccttctacccccatgccaacgggacccggccagcccgcgccacctggccagcagcccccgccactggcccagcctactccgctccctcaagtgcttgcgccacagcctgtggtccctctgcagcccgttccaccccacctgccaccatacttggcccctgccagccaggtcggggctccggcacagctgaaaccactgcagatgcctcaggcaccgctgcagcctctggctcaagttcccccacagatgccgcccatcccagtggttccccctatcactcctttggctggaattgatggcttgcccccggctttgccagaccttccaaccgctaccgtcccccctgtgccgccaccccagtacttttcaccagctgtgatactcccctcattggccgccccactgccacctgcctcacctgccctgcctctacaggccgtgaaactaccacacccacccggcgctcctcttgcaatgccctgccgcacaatagtgcccaatgcaccagccactataccgcttctcgctgtggcaccgcccggcgttgcagctcttagtattcacagcgccgtggcccagcttcctgggcagcctgtgtaccctgccgcattcccgcagatggctccaacagacgtcccaccatccccgcaccacacagttcagaacatgcgagcgactccccctcaacccgccctgccccctcagccaacactgccccctcagccagttttgcccccccagcctactctgccgcctcagcctgtgctgccacctcagcctacccggccgcctcagcctgtgctcccacctcagcctatgctgcccccgcagccagtattaccgccccaaccagccctgccggtgagacccgagccacttcagccccacttgcccgaacaggccgctcctgctgcaacaccgggatcacagatccttcttggtcacccggccccgtatgcagtagacgtcgctgcccaagtgccaaccgtgcccgttccacctgcggcagtcttgagccctccattacctgaagtgttgctacctgccgcgccagagctgctgccccagttcccctcctctctggctaccgtcagcgcgtcggttcagtctgtgccaactcagaccgccacactcttgcctccagccaatcctcccctgccaggcggtcctggcatcgcctccccctgccctactgtccagttaacggtcgaaccggttcaagaagagcaggcttcccaagataaaccccccgggctgccacaatcctgcgagtcatacggtggatctgatgtcacaagtgggaaggagctgagcgacagctgtgagggagcgtttggaggtgggcgcctggaaggtagagctgccaggaagcatcataggcgtagtacccgggcccgcagccggcaggagagagcctcacgtcccaggctgactatactcaacgtttgtaacacaggtgataaaatggtggaatgtcagctcgaaactcataatcacaaaatggtgacattcaagttcgacctcgacggagacgcgcctgacgaaattgccacatatatggttgaacacgacttcatactccaagctgaacgcgaaacctttattgagcaaatgaaggatgtgatggacaaagcggaggacatgctgagtgaggatacagatgccgaccggggctccgacccaggtacttcaccaccacatttatcaacgtgtggcttgggaactggtgaggagagtcggcaaagccaagcgaacgctccggtctatcaacaaaacgtgctgcatactgggaaacggtggtttattatttgtccagttgcggaacacccagccccagaggcaccagagtcatcccccccactgccgttgtcctcactgcctcccgaggctagccaagattctgccccctacaaggaccagctctccagcaaagagcagccctccttccttgcctcccagcagctcttgtcacaggccggccctagcaatccgcccggggcccctccagcccctctggctccgagctcccctcctgtgaccgcactccctcaagacggggctgcacccgcaacttccaccatgcccgagccagcttcaggcaccgcctctcaggccgggggcccaggtacccctcagggcctcacaagtgagctcgaaacttcgcaaccactcgctgagacccatgaggcacctctcgccgtgcaacccctcgtggtggggctggccccatgcacccctgcacccgaggccgcaagcactcgggacgcctccgcccctcgggagcctctccccccgcctgctcccgagccatccccacactctggaacgcctcaacctgccctcgggcagcctgctcctcttctcccagccgcggtgggggctgtatcactggctacttcccaactgccttcaccacccctgggccctacggtccctccccagcctccatctgccctggagtctgatggagaaggtcctccccctagggttggctttgttgactctaccattaaatcactggacgaaaagttaaggacactgctctaccaggagcatgtccccacctcttcagcaagcgctggaactcccgtggaagttggagaccgggattttactttggaaccactgagaggggatcaacccaggtctgaagtctgcggcggggacctcgcgctgccgccagtgcccaaggaagcggtgtctgggcgcgtgcagttgcctcagccactggtagaaaaatctgaacttgcgcccacacgtggggcagtcatggaacagggaactagctcttctatgacggccgagtcaagcccacgatccatgctgggctacgacagagacggccgccaggtcgctagcgattctcacgtagtcccctctgtgcctcaggatgtgccggcctttgttcggcctgccagagtggaaccgactgatcgtgatggaggcgaagccggtgaaagtagtgctgagccgccccccagcgatatggggaccgtggggggacaagcctcccacccgcagacactcggtgcacgggcactagggtccccgcggaagcgcccagagcaacaggatgtatcgagccctgccaaaacagtggggagatttagcgtggtatcaacacaggatgaatggacactggcgtctccacattcactcaggtacagtgctccgcctgacgtgtacctggatgaggccccaagctccccagacgtcaaattggccgtgaggagggcccagactgccagctcgattgaggttggggtaggagaaccagtgtcaagcgactctggcgatgagggtcctcgggccagaccccccgtgcagaaacaggcatccctgcccgtgtctgggtcagtggccggtgacttcgtcaaaaaggctacagcattcctgcagagaccatctcgcgccggtagcctgggccctgaaaccccctcgcgagtcggtatgaaggtacctaccatctctgtaaccagctttcattctcagagctcctacatctcttcagataacgattccgagctggaagatgcagacataaagaaggagctgcagagcctccgggaaaagcacctgaaggagatctccgagctgcagtcacagcagaaacaggagatagaagcgctctatagaaggcttggtaagccactaccccccaatgtgggattcttccacactgccccccccactggtcgaaggaggaagacttctaagagcaagctgaaggctggcaagctgctcaacccactggtgagacagttgaaggtcgtggctagttcaaccggacacctggctgattcatcacgaggaccacccgccaaggatcccgcccaggcatctgtgggtttaaccgccgactcaacaggtttatcaggcaaggccgtgcagacccaacagccatgtagcgtgcgtgcctccttatctagtgacatctgcagtgggctggcctcagacggagggggcgcacggggacaggggtggacagtgtatcatcccacgtctgaaagagtcacctataagagtagttcaaagcctcgagcccgctttctgtccggtcctgttagtgttagcatatggtccgccctcaaaagactttgcttagggaaggaacatagcagccgtagcagcacttcctcactcgcccctggccccgagcccggcccccaacccgctctccacgtccaggctcaggttaacaacagcaataacaagaagggcacattcacggacgacctacacaagctggtggacgaatggacatcaaaaaccgtaggtgctgcacagttgaagcctaccttgaaccagctcaagcagacccagaagctccaggatatggaggcccaggcgggttgggctgccccaggggaagcgagagcaatgaccgcccctagggccggtgtgggtatgccccggttgcccccagctcccgggccgctctcaacaaccgtgatcccgggcgcagcccccaccctttcagtgccaacccctgggagctgcgggcccagggcggtgagcactccaacatcgtatacttag

SEQ ID NO: 211509 - DNA, 5403 bp, synthetic construct
  misc_feature 1..5403: note = Description of Artificial Sequence: Synthetic coding sequence
  source 1..5403: mol_type = other DNA
atggccaccgacagcggcgaccccgccagcaccgaggacagcgagaaacccgacggcatcagcttcgaaaatagagtcccacaggttgcagctaccctgaccgtggaagctcgactgaaggagaaaaacagcactttctccgcgagcggcgaaaccgtggagcggaaacggttttttagaaaaagcgttgaaatgacagaggacgacaaggtggcggaatcctcacctaaggacgaacggatcaaggccgctatgaatatacccagggtagataaactgccttcaaacgtgttgcgaggtggacaggaggtgaagtatgaacagtgctctaagtctacgtcagagatttccaaagactgctttaaagagaagaacgagaaagagatggaggaggaagccgagatgaaagctgtagccacctctcctagtggcaggtttctcaagtttgatatcgaactcggcagaggggcattcaagacagtgtacaagggcttagacacagagacctgggtcgaggtggcatggtgtgaactccaagatagaaaattgacaaaggccgagcagcagcggttcaaagaagaagccgaaatgctgaaaggcctccagcatccaaacatcgtacgcttctatgattcttgggaatccatcttaaaagggaagaagtgtatcgtgctagtgacggagctgatgacctctggcactctgaagacgtacctgaaacgattcaaggttatgaagccaaaggtgcttaggtcctggtgcagacagatactcaaaggtctgcaattccttcacacccggacgccaccgattattcatagggacctaaagtgtgacaatatctttatcaccggtcccactggatctgtgaagattggggacctggggttagcgaccctgatgcgcaccagctttgcgaagagcgtgatcggtacgccagagttcatggcccctgagatgtacgaagagcattatgatgaatccgtagacgtctatgcatttggcatgtgcatgctagaaatggcaactagcgagtatccctacagtgagtgccaaaatgccgctcagatttacagaaaagtgacatcgggcattaaaccagcatccttcaataaagtgactgatcctgaagtcaaagagatcattgagggttgcattcggcagaataaatccgagcggctgagcatcagggacctgctaaaccacgcttttttcgcagaagacaccggattgcgggtcgagctggcagaggaggatgattgctccaattcgtctctcgccttgagactgtgggtagaggaccctaagaaattgaagggaaagcacaaggacaatgaggcaattgagttctcattcaatcttgagaccgataccccagaggaagtggcctatgagatggtcaaaagcggcttctttcatgaaagcgactctaaggccgtggccaaatcaataagggatagagtgacgccaataaaaaaaaccagagaaaaaaaacctgccggctgtctcgaggagcgaagagactcccaatgcaagtcgatggggaacgtattccctcaaccccaaaacaccaccctgccccttgcacccgcacaacaaaccggcgcagagtgcgaagaaaccgaagtcgaccagcacgtccgtcaacagctgctgcagcggaagccccagcagcattgctcttcagttacaggcgataatttgtcagaggccggcgcagctagcgtcatccactccgataccagcagtcagccttctgtggcttatagttctaatcaaaccatgggtagtcagatggtaagcaacattccccaggctgaagtaaacgtcccgggccagatctactcaagtcaacagctcgtgggccactatcagcaggtctcgggccttcagaaacacagcaagcttacacagccccagatcctgcccctggtgcaaggccagtctaccgtcctgccagtccacgtactgggcccaaccgtcgttagccagccccaggtgtccccactgaccgtccagaaggtcccccagattaaacccgttagtcagccagttggagcagaacagcaagctgccctcctgaagcccgacttagtccgctctttaaaccaagacgtcgcaacaaccaaggaaaacgtgagttcccctgacaacccaagcggcaacggcaagcaggaccgcatcaagcagcggagagcaagctgtccgcgacctgaaaagggcactaagttccagctgactgttctccaggtaagcacatcaggagacaatatggtcgagtgtcagctggaaacccacaataacaagatggtcacattcaagtttgacgtggatggggacgcacccgaggacattgccgactacatggtcgaggataatttcgtcttggagtcagaaaaggaaaaattcgtagaggaactccgggccatcgtcggacaggcccaggagatccttcacgttcatttcgccaccgagcgggccacgggggttgactccatcaccgtagactcgaactcctctcagaccgggtccagcgaacaggtccagatcaattccacaagcactcagacatccaatgagtctgccccccagagctctccagttggcaggtggcgcttttgtatcaatcagactatccggaaccgagagacccagagtccccccagcttacagcattcgatgagtgcggtacccggtcgccacccattaccttccccaaaaaataccagtaataaggaaatttctagggataccctgcttacaatcgagaataacccttgccatcgagctctgttcacgagcaaaagcgagcacaaagatgtcgtggatggcaagatttcagaatgcgcttctgtggagactaagcaacctgccattctgtaccaggtggaggacaacaggcagatcatggctcccgtcactaacagctcatcctacagcacaacatcagtcagggcggtacctgcagagtgcgagggactgaccaagcaggcttcaatcttcatccctgtatatccgtgccatcagaccgcaagccaggcagatgccctcatgtcccaccctggggagagcacacagacctctggaaattcccttacaacactcgcttttgatcagaagccccaaaccctgtccgttcagcagcccgcaatggatgcggaattcattagccaggagggggagacaacggtgaacacggaggcgtcctcacccaaaacagtgattcccacccaaacacctggcttggagcctacaacactgcaaccgaccaccgtcctcgaatcagacggagaacggccacccaaacttgaattcgcggacaatcggatcaaaactcttgatgaaaaactcagaaacttgctgtaccaggaacacagcatctccagcatctatcccgaatcccagaaggacactcagagcatcgacagcccctttagctcatcagcagaggacaccctcagctgcccggtcactgaggtgatcgccatcagtcactgcggcattaaggacagccccgtgcaatccccaaatttccaacagaccggatctaaactgcttagcaacgtggctgcaagtcagccagctaatatttccgtgttcaaacgggatttgaacgtgatcacatccgtgccaagcgagctctgtcttcatgagatgagcagcgatgctagtctgcccggggatcccgaggcctatcccgctgccgtgagtagtggcggagccattcatcttcagaccggaggcggatattttgggctatcattcacatgtccctctctgaagaaccccatttctaagaagtcttggactcggaaacttaaatcatgggcctatcgtctgagacaatccacaagttttttcaagaggagtaaggtcaggcaggttgaaactgaagaaatgcgctcggcaatcgctccagaccctattcccctcacgcgggagtccacagcagacacccgagctctcaatcgctgcaaggcaatgagcgggtccttccagcggggtaggttccaggtcattacaatccctcaacagcagagcgctaaaatgacgtcatttggcatcgagcacatctccgtgttctctgagactaaccacagctccgaagaagctttcattaagactgccaagtcacagctcgtcgagatcgagcccgcgacccagaacccgaagaccagcttctcttacgaaaaactgcaggccctgcaggagacctgcaaggagaataaaggagtccccaagcagggtgataatttcttgtcctttagtgctgcctgcgaaactgacgtgtcatctgtcacccccgagaaagaatttgaggagacgtcagccacaggatccagcatgcaaagtggctctgaactgctgctcaaagaacgcgaaattctgacggccggtaagcaaccaagttctgactcagagttctctgcatcgctcgcagggtcgggcaagtccgtggctaagaccggacctgagtccaatcagtgtttgccccaccatgaggagcaggcatacgcacagacacagtcatctttgttctatagccccagctcgccaatgagttccgacgatgagtccgagattgaggacgaagacttaaaggtggaactgcaaaggctccgcgagaaacatatccaggaagtcgtcaaccttcagactcagcagaataaggaactgcaggagctgtacgagcgtttaagatctatcaaggatagcaagacccaatctaccgagatacctctgcctccggcaagtcctcgcaggccccggtctttcaaaagtaaactccgatcgagaccacaaagtttgacacatgtagacaatggaattgtcgcgaccggtaaatcatgtttgatcaacgaactcgagaaccccctttgcgttgaatcaaatgccgcttcctgccagcagagtccagcttctaagaagggcatgttcacagatgatctgcataaactcgttgatgattggacaaaagaggccgtaggaaatagcctgattaagccttcactaaatcaattgaagcagtcacagcacaaattagagaccgaaaactggaataaggtgtcggagaacacgccaagcacaatgggctacacatccacctggattagttctctgagccagattagaggcgccgttccgacgagcctgccccaggggctgagcctgcccagctttccaggccccctttcaagctatggaatgccacatgtctgtcagtataacgctgtagcaggtgcaggatatcctgtgcagtgggttggaatctccggcacgacccaacagtctgtggttattcccgctcagtctggaggtccgttccagcccggtatgaatatgcaggcatttcccacctcatccgtacaaaatccggccaccataccgcctgggccaaaatag

SEQ ID NO: 211510 - DNA, 5403 bp, synthetic construct
  misc_feature 1..5403: note = Description of Artificial Sequence: Synthetic coding sequence
  source 1..5403: mol_type = other DNA
atggccaccgacagcggcgaccccgccagcaccgaggacagcgagaaaccagatggcataagctttgagaatcgagtaccgcaggtagccgccacgctaacggtggaagcccggttaaaggagaagaatagtacttttagcgcaagcggagagaccgtggagagaaaacggttctttcggaagtccgtagaaatgaccgaagatgacaaggtggctgaatcatcacccaaggacgaacggattaaagctgcgatgaatattccccgcgtggataaactcccctcaaatgtgctgcgtggcggacaggaagtgaaatatgaacagtgctctaagagcacatccgagatctccaaggactgcttcaaggagaagaatgaaaaagagatggaggaggaagctgaaatgaaggcagttgcgacttctccaagtgggaggttcctgaaatttgacatagagttggggagaggggctttcaagacagtttataaaggcctggacactgaaacctgggtggaagtggcctggtgcgagctgcaggaccgaaaactcacgaaggcagagcagcagcgattcaaagaggaggccgagatgctgaagggcctgcagcatcctaacatagtgcgcttttacgactcctgggaatccattctgaaggggaagaagtgtatagtcctggttacggagttaatgacctctggtaccctcaagacatatctgaaacggtttaaagtgatgaagccgaaagtgctacggtcgtggtgtcggcagatcttaaagggcctacaattccttcacacacgcaccccacccatcattcatcgcgatctcaagtgcgacaatatttttatcaccggtcctacagggtcggtgaagattggggacctcgggctggcaactttgatgagaacctcctttgcaaagtctgttatcggaactcccgagtttatggccccggagatgtatgaagagcattacgatgaaagtgtggacgtctacgcttttggaatgtgcatgctggaaatggcgacatccgagtatccttattcagaatgccaaaatgccgcccagatttaccgcaaggttacaagcggtattaaacccgcctcctttaataaagtcacagatccagaggtgaaggagattatcgaaggatgtataaggcagaataagtcggagagactgtccatacgagacttgctgaaccacgcgttcttcgcagaagacacaggcctccgcgtggagctcgctgaggaggatgattgcagcaattcttccctggcactgcggctgtgggtggaagacccgaaaaagctgaaggggaagcacaaagataatgaggctatcgagtttagttttaacctggagaccgacactcctgaggaggtcgcctacgagatggtgaaatctggtttctttcatgagagcgactccaaggcagtggctaaaagcatacgtgacagagtgacaccgattaagaagacacgcgagaagaaacctgctggatgccttgaagagcgccgagacagccagtgcaagtcaatgggtaacgtgtttcctcaacctcagaacaccaccctcccgttggctcctgcgcagcaaactggtgccgaatgcgaagagactgaggtcgaccagcacgtgaggcagcagttgctgcagcgcaagccacagcaacattgttcatccgttaccggagataatctcagtgaagctggagcggcatctgtgatccacagtgatactagttcccagccatccgtggcttacagtagcaatcagacgatgggcagccagatggtcagcaatatcccgcaggcagaggtgaacgtgcccgggcagatctatagttcccaacagctggtcggccactaccagcaggtttccgggctccagaagcacagcaaattgactcagcctcaaattctccctctggtgcaaggacaatccaccgttctgccagtccacgtgctgggacctaccgtggtatcacagcctcaggtatcaccactgaccgtccaaaaggtgcctcaaatcaagcccgtcagccagccagtgggggctgaacagcaggcagccctgctgaaacctgacctggtgagatctctgaatcaggatgtggcgacaaccaaagagaacgtatcatctcctgataatccaagtggcaacggaaagcaagaccgtattaagcaacggagggcaagctgtcctcgaccagagaagggcaccaagtttcagctgaccgtgttgcaagtatccacttccggcgacaatatggtagagtgccagctcgaaacgcacaataacaaaatggtgacctttaagtttgatgtagatggcgatgcgccggaagatatcgcagattatatggtggaagacaatttcgtgctggaatcagagaaggagaagtttgtagaagagctcagggcaattgtcggccaggcccaggaaatcctgcacgtgcactttgcaactgagcgtgccaccggggtcgattctatcacagtggattccaacagtagccagactggcagttctgagcaggtccagattaacagcaccagcacacagacaagtaatgagagtgccccccagtcctctcccgtggggcgctggagattttgcattaatcaaactatccggaatagggagactcagtcaccccccagtctgcaacactccatgagcgctgtgcccggtagacacccattaccctcccccaaaaacactagcaacaaggaaatttcacgggacacactcctgacgattgagaacaatccttgtcaccgggctctgttcacaagcaagtcagagcataaggacgtcgtagatgggaaaattagtgagtgcgcttccgtggaaactaagcaacctgccatactatatcaagtggaggacaacagacagattatggcccccgtcaccaattcatcaagctattctaccacctctgtcagagccgtccctgcggaatgcgaggggcttactaagcaggccagcatatttattcccgtgtacccgtgtcatcagactgcaagtcaagctgacgcactgatgtcacatcccggggagagtactcagacctcagggaacagtcttacgaccttggcattcgaccagaagccccagacactgagtgtccagcagcctgcgatggacgcagagtttatcagccaggaaggagagacaaccgtcaatacagaagctagttctccaaaaactgtcatcccgacccaaactcccgggcttgaacctactactttgcaaccgactactgttcttgagtccgacggggagaggccaccaaagctggaatttgccgataaccgtataaaaacccttgacgaaaaactgcggaatctgctgtaccaggagcactccatctccagcatctaccctgagagtcagaaggacacccagtctatagacagtcccttctcaagtagtgcggaagatacactgagctgccctgttacagaggtgatagctatttcccactgtgggattaaagactccccggtccagtctccaaatttccagcaaacgggctcgaaactgctgtctaacgtggccgccagccaacctgcaaatatctccgtgttcaagcgtgatttaaatgtgattacctccgtgccgtcggaactgtgcttgcacgagatgagtagcgacgcatctcttcccggcgacccagaagcttacccagctgctgtgtccagcgggggtgccatccacttacagactggtggagggtatttcggcctttctttcacctgtccaagcttgaagaaccccatttccaagaagagctggactaggaagctcaaatcctgggcctaccgtcttcgacagagcacgagtttttttaagagatccaaggttcgacaggtggagactgaagaaatgaggtccgccatcgcaccagatcctattcctctgacacgagagagtaccgccgatacacgcgctcttaatagatgtaaggccatgtctggctcctttcaaagaggcagatttcaagtgattacaatcccacagcagcagtcagccaaaatgaccagcttcggaatcgaacacatcagtgtgttctcagagaccaaccatagcagcgaggaggctttcatcaagactgctaaaagccagttggtggaaatcgaacctgccacgcagaatcctaagacctcgttctcctacgagaagcttcaagccctgcaggaaacttgtaaggaaaataagggcgtcccaaaacagggagataactttctgagcttttcagcggcctgtgaaaccgatgtctcgtccgttactccagagaaggagttcgaggagacatccgcaactggatcttccatgcagagcgggtcagaactgctcctcaaggagcgggagattctcacggctgggaagcagccgtcgtctgactcagaattcagtgcttccctggcaggcagcgggaaatccgtggcgaaaactggccccgagtccaatcagtgcctgcctcatcacgaagagcaggcctacgctcagacacaaagcagcttgttctattctccaagcagccccatgtcatcagacgatgaaagtgagatcgaagacgaggatctgaaggtagaactgcaaagactgcgcgaaaagcacatccaagaggtggtgaatctgcagactcagcaaaataaagagctccaagagctctacgaacgactgcggtcaatcaaagactccaaaacacaatctactgaaattccacttccgccagcttcacctaggcggccgagaagttttaaaagcaaattgaggagtcggcctcagtctctgactcatgtggataacggtattgtagcgaccgggaaatcctgcttgatcaatgagttagagaatccactgtgtgtcgagtctaacgcagcaagctgtcaacagtcacccgcgagtaagaagggtatgtttaccgacgatctgcacaaactcgtagacgattggactaaggaggcagtaggtaacagcctgatcaagcctagcctgaaccagctgaagcaatctcagcacaaactcgagaccgagaactggaataaggtgtctgagaatactccctcgaccatgggatacactagcacctggatttcatctctatcccaaatccgaggagctgttcctaccagtttgccgcaaggcctgtcgcttcccagctttcccggccctctcagcagctacggaatgcctcatgtttgccaatacaatgcagtggcaggcgccgggtaccccgttcagtgggtggggatttctggaaccactcaacagtcggtcgttatccctgctcagtctggaggtccattccagcccggaatgaatatgcaggccttcccaacctccagtgtgcaaaatcccgctacgatacctccaggacccaaatag

SEQ ID NO: 211511 - DNA, 5232 bp, synthetic construct
  misc_feature 1..5232: note = Description of Artificial Sequence: Synthetic coding sequence
  source 1..5232: mol_type = other DNA
atggccaccgacagcggcgaccccgccagcaccgaggacagcgagaaacccgatggcatcagctttgagaaccgagtcccacaggttgctgctaccctgactgtcgaggccaggctaaaggaaaagaactcaactttcagcgcctccggagagacagtggaacggaagcgcttcttccgcaagagcgtggagatgaccgaggacgacaaggtcgcggagagttccccgaaggacgagcgcattaaagcagctatgaacattccccgtgtggataagctgccatccaatgtgctacggggtggccaagaagtgaagtacgagcagtgtagcaaatccacctctgaaattagcaaggactgtttcaaggagaaaaatgagaaggaaatggaagaggaagccgaaatgaaagctgtggcgacttcacccagcggtcgctttctgaagtttgatattgagctgggtcgcggcgcattcaaaaccgtgtataagggcctggataccgagacgtgggtagaggtggcctggtgcgagctccaggacaggaaactgaccaaggcagagcagcaacggtttaaggaagaagcggaaatgttaaaagggctgcaacaccccaatatcgtgcgcttctatgactcatgggaaagtattcttaaggggaaaaaatgcatagtacttgtgacggagctgatgactagcggtactctgaaaacctatcttaagcggtttaaggtcatgaaacccaaagttctccggagttggtgcagacagatcctcaagggtctgcaatttctccacacacgaacgcctccgatcattcatagggacctgaagtgtgacaatattttcataacagggcccaccggaagcgtcaaaatcggtgacctggggctcgcaacccttatgcggacaagctttgcaaagagtgtcattggaactcctgagttcatggctcccgagatgtatgaggaacactacgatgagtctgttgatgtgtacgcttttggtatgtgtatgctggaaatggccacatctgaatatccatattcggagtgccagaacgccgctcagatttatcgcaaagttaccagcggtataaaaccagctagctttaacaaggtgacggaccctgaagtgaaagagataattgagggatgtattcgacaaaataagtcagagcgcctctccattagggatctactgaatcacgcctttttcgctgaggacacgggactgcgcgtggaactggctgaggaagacgactgctctaactcctctctcgccctccgcttgtgggtcgaggatccgaaaaagctcaagggcaagcacaaggataatgaggccatcgaattctctttcaacctggagacagacacaccagaggaggtggcctatgagatggtcaaatcagggtttttccacgaatccgattccaaagccgtggccaaaagtatcagggatagggtgacacctatcaaaaagactcgggagaagaagcctgccggctgcctggaggagagaagagattcgcagtgtaaaagtatgggaaacgttttccctcagccgcaaaatacgacactgccactggcaccggctcagcagaccggcgcagaatgtgaggagaccgaagtggatcagcacgtgcggcagcaacttctccagagaaaaccacagcagcattgttccagcgtgacaggagataatctgtcagaggctggggcagcctccgttattcattcggacacttccagccagccatccgtggcttatagcagcaaccaaactatgggatctcagatggtgtctaatatcccccaagctgaggtgaatgtgcctggccagatctacagctcccagcagttagtgggacactatcagcaggtttccgggctgcagaaacattctaaactaactcagccccagattctgccactggtccagggccagtccacggtgctcccggtgcacgtgctgggacctaccgtcgtgagccagccacaggtttctccgctcacagtgcagaaggttccacagatcaaacccgtttcccagcctgtgggggcggagcagcaagccgccctactcaaacccgatctggttaggtccctgaatcaggatgtggctaccaccaaggagaacgtaagttctccagataaccccagtggtaacggaaaacaggataggatcaagcagcggagagccagctgtcctcgccctgagaaaggcacaaaatttcagctgaccgtgctgcaggtaagcaccagcggcgataacatggtcgagtgtcagctagagacacacaacaacaagatggtaacatttaagtttgacgtggatggcgacgccccggaagacatcgcagactatatggtggaagataacttcgtcctggagtctgagaaggaaaagtttgtcgaagaactgcgcgccattgtcggtcaggcacaggaaatactgcacgttcacttcgccaccgagagagcaaccggagttgacagcatcacggtcgactccaattccagtcagacaggctcatctgagcaggtgcagataaacagcaccagtacccagacaagcaacgagtctgccccccagtcatctcctgttggtaggtggcgcttctgcattaatcagaccatccgcaaccgagaaacacaaagccccccaagcctgcaacatagcatgtctgccgtgccaggacggcaccctctaccaagcccaaagaatacgagtaataaggaaatcagtcgggacacgcttctgactattgagaacaacccctgtcaccgagcgcttttcacatcgaaatctgaacataaagacgttgtggatggcaagatcagcgaatgtgcttccgtggaaactaaacagcctgctatactgtaccaagttgaagacaaccggcagattatggcacctgtgaccaactccagctcatactccactacttctgtgcgggcagtacccgccgagtgcgaaggtttaactaaacaggcctctatcttcattcccgtttatccttgccaccagactgcaagccaggcagatgctctcatgagccacccaggcgaaagtacccaaacctctggcaactctctaacaacattggccttcgatcagaagccccaaactctgagcgtccagcagcctgccatggatgccgagttcatttcccaggagggggagactaccgtgaacaccgaagcaagctctccgaagacagttattcccacgcagacgccaggactggagcctaccactctgcagcccaccaccgtgctggaaagtgacggcgagagaccccccaagctcgaatttgctgataacaggatcaaaactctcgacgaaaagttgcgaaatttgctgtatcaggagcactccatctcgtccatttaccctgaaagccagaaagacacccagtcgatcgacagccctttctccagcagcgccgaagacacactgagttgcccagtcaccgaggtaatcgccatctctcactgtggcataaaggactcaccagtgcaaagccctaattttcagcaaaccggttccaagctcttgtcgaacgtcgcagccagtcagcctgccaacatcagtgtcttcaaacgagatctgaacgtgatcacatcagttccgtctgagctttgtcttcacgagatgtcctcggatgcctccctgcctggggatcccgaagcctaccccgccgccgtgagtagcggcggcgcaattcatttgcaaaccggggtggagacagaggaaatgcgctcagcaatcgctcccgatcccatccctctgaccagagaatcaactgctgatactagggctctgaacagatgcaaagccatgtctgggagtttccaacgagggcgatttcaggttatcacaattccacaacagcagtcggcaaagatgacctccttcggaattgaacacatcagtgttttcagtgagacaaatcatagttcagaagaagcgtttatcaagacagctaaatcccagctggtcgaaatcgagccagcgacccagaacccaaagacctccttctcctatgagaaactgcaggctctccaggagacctgcaaggagaataaaggtgtcccgaagcagggcgacaattttctgtcttttagtgccgcttgtgagactgacgtgtctagcgttacaccagaaaaggagttcgaagagacttcagcaacaggcagttccatgcagagcggatctgagctcctgttgaaggagagggagatccttacggctggtaagcagccctcaagcgacagcgagttttctgcctcactcgccgggtccggcaaatctgtggctaaaaccggaccggagagcaatcaatgtctgcctcaccatgaagagcaggcctatgcccagactcagagctccttattttattccccttcctcccccatgagtagcgacgacgaaagtgagatagaggacgaagatctgaaggtggaactgcagaggctgagggaaaagcatattcaggaggtagtgaatctccagacacagcaaaacaaggaattacaggaactgtatgagcggctgcgcagtatcaaggatagtaaaacccagtctaccgagataccactgccacccgcaagccctagacggcctagaagtttcaaatcgaaacttcggtccagaccacagagtctgacccacgtggataatggcatcgttgccactgatccactgtgtgtcgagtctaatgcagctagctgccagcaatccccagcatctaagaaaggaatgtttaccgacgatttacacaaactcgtggacgattggaccaaggaggccgtggggaacagcttgattaagcccagtctgaatcagctgaagcagtcccagcacaaacttgagaccgagaattggaacaaagtttctgaaaatacaccttcaaccatgggatacacttccacctggatctccagcctcagtcagattcgcggagcggtgccgacgagtctcccgcaagggctctcattaccttcgtttcctggaccactgagttcatacgggatgccccatgtgtgtcaatacaatgccgtggcaggtgcaggctatccagtccaatgggtgggaatcagcgggacaacccagcagtcagtagtgatccctgcccagagcggaggaccctttcagcctgggatgaatatgcaggccttccccacaagttccgtgcaaaatcccgctactattccacccgggcctaagtag

SEQ ID NO: 211512 - DNA, 498 bp, synthetic construct
  misc_feature 1..498: note = Description of Artificial Sequence: Synthetic coding sequence
  source 1..498: mol_type = other DNA
atggccaccgacagcggcgaccccgccagcaccgaggacagcgagaaacctgacggaattagcttcgagaatcgtgtcccacaggttgccgctactctcacagttgaagcgcgtctgaaggagaagaacagtactttctccgcctctggcgaaacagtagagagaaagcggttctttagaaagtctgtggagatgaccgaagatgacaaggtcgctgaatcttcacctaaggacgagcggatcaaggctgcgatgaatattccaagagtggacaagctccctagcaatgttcttcgcggaggccaggaagtgaagtacgagcagtgcagtaagagcacctccgaaatttccaaagactgctttaaagagaagaatgagaaagagatggaagaggaagctgagatgaaggcggttgcaacttctccttccggccgatttcttaaatttgatatcgagctggggcggggcgcatttaagacagtttataaaggattgtag

SEQ ID NO: 211513 - DNA, 3732 bp, synthetic construct
  misc_feature 1..3732: note = Description of Artificial Sequence: Synthetic coding sequence
  source 1..3732: mol_type = other DNA
atgctggccagccccgccaccgagaccaccgtgctgatgagccagactgaagccgatcttgcgcttcgacccccccccccacttggcacggccggacagcctcgtcttgggccgcctcctcggagggcccgccggttctccgggaaggctgagccaagacccaggagctcccgcttgtctcggcgttcctctgtggatctcggcctactttcttcatggagcctgcctgcatcccctgctcccgatccccccgacccaccggattcagctggcccaggccctgcgcgcagcccgccaccatcatccaaggaaccaccggagggtacatggacggagggagccccagtaaaggctgctgaagactccgctcgacctgagctccccgatagcgccgttggccctgggagtagagaaccccttagggtgccagaagccgtcgctctggagaggcgtagggagcaggaggaaaaggaagacatggaaacccaggcagtggccacttccccagacggccggtacctaaaatttgacattgaaatcggaagagggtcttttaaaaccgtttacaggggacttgacacagacactaccgtagaagtggcctggtgtgagctgcagacaagaaaattatcccgtgccgagaggcagcggttctctgaggaagtagagatgctgaagggcctccaacatcctaatatcgtgcgattctatgactcatggaagtctgtgcttcgagggcaagtatgtatcgtcctcgttaccgagctgatgacttccggaaccctgaaaacatatcttaggcggttccgcgagatgaagccacgtgtcctgcaacggtggagcaggcaaattctcaggggtctccactttctccactctcgtgtgccgcccatcctgcacagagacctgaaatgtgacaacgtttttataactggacccacaggctcagtgaaaataggagacctcggtcttgccaccctgaaacgagccagctttgccaagagtgtgataggaactcccgaattcatggcaccagagatgtacgaggagaagtatgacgaagctgtggacgtttacgcctttggaatgtgtatgctagagatggctacctccgaatacccgtactccgagtgtcagaacgcagctcagatttaccggaaggtcacatccggcagaaagcctaatagctttcacaaagttaagatccctgaggttaaggagattatcgagggctgcattaggacagacaaaaacgagaggttcaccatccaggatttgctggcccatgcatttttcagggaagaaaggggagtgcatgtcgagctggccgaggaggatgacggtgagaagcccggcctgaaactctggctgcggatggaggacgcccgtcgagggggtaggcctcgggacaatcaagccattgagtttctcttccaattggggagagacgccgcggaggaggtcgcgcaagaaatggtcgctttaggcttggtatgtgaagctgattaccagcctgtcgcccgggccgttagggagcgagttgccgctatacaacgaaagcgggagaagctgcggaaggcccgcgagctagaggccctaccccccgagcccggaccaccaccggccacagtccccatggccccggggcctccctctgtgttccctcccgagcctgaggagcctgaagcggatcaacatcagccattcctgttcaggcacgcctcatactcctctacaacctccgattgcgagacagacggctatctgagcagcagcggcttcctggatgccagcgaccccgcattacagccacccgggggagtgccaagctccctggcagagagccatctgtgcctaccatctgcttttgcactgagtattcctcgcagcgggccaggcagcgatttctctccaggtgatagctatgcgagtgacgcggcttctgggctgagtgacgtcggagagggaatgggtcagatgcgcagacctcctggccgcaatctgcggcgaaggcctcgtagccgactccgcgtaacttccgtttccgatcagaatgacagagttgtcgagtgccagctgcaaacccataatagcaaaatggtcaccttcaggttcgacctcgacggcgatagccccgaggagatcgcagcagctatggtctacaatgagtttatcctgccgagcgagcgggatgggtttcttaggaggatccgtgaaatcatccagcgcgttgagacccttctgaaaagagatactggtccgatggaggccgccgaggacacactctcccctcaggaggaaccagcccctctgccagccttaccagttccactgcccgacccttcaaatgaggaactgcaatcctctacttctcttgaacacagaagctggacagcgttctctacctcgagctcttcaccgggaaccccactgtccccagggaatcccttttctcctggtaccccaatctcacctggcccgatatttcccataacctcgccaccatgtcatcctagccccagcccgttcagtccgattagctctcaggtctcatcaaacccgagcccccaccccaccagcagcccacttccttttagttcttccactcctgagtttcctgtgcccctgtcacaatgcccatggtctagcctgcccaccacctcacctccaacattttcccctacatgcagtcaggtgaccctgtcatcgcctttttttccaccctgccctagtactagtagttttccgtctacgactgccgctccactgttgtctttggcgagtgcgttttccctggcagtcatgacagtggcccaaagcctactgtcaccgagtccaggactgctctcccagtctccacctgcgcctcctagcccgctgccatcgctacccctcccacctccagttgccccgggtggtcaggagtcgccatccccgcatacagcggaagtggagtctgaggcgtctccgccccccgcccggcccttgcccggcgaggctagactcgccccaatttctgaggaagggaaaccacagttagttggtcggttccaggtaacctcaagcaaagaacctgccgaaccgcttccattacaaccgacctcccccaccctctccggcagccccaagccctctacgcctcagctcacaagtgagagtagcgataccgaggacagcgccggcgggggccccgagacccgggaggccctggcagaaagcgatagggcagccgaaggtctaggcgccggggtggaagaggagggagacgacggcaaggagccacaggtgggcggatcaccccagccactgtcacacccaagtcccgtctggatgaactacagttactcctcattgtgtttgtcctccgaggaatccgaatcttccggagaggatgaagaattttgggccgagctgcagagcctaagacagaagcacctttcagaagttgaaactctgcaaaccctgcagaagaaggaaatcgaggatctatactctcgcctggggaagcaacctcctcccggaattgttgccccggccgccatgttgtcatccagacagcgaagactgtccaaggggtcctttccaacaagtcggaggaattccttgcaacggtctgaacctcccggtccagggatcatgcgccgcaattctctgtccgggagtagtacagggtcacaagaacaacgcgctagcaagggcgttaccttcgcgggggacgtgggcaggatgtag

SEQ ID NO: 211514 - DNA, 1992 bp, synthetic construct
  misc_feature 1..1992: note = Description of Artificial Sequence: Synthetic coding sequence
  source 1..1992: mol_type = other DNA
atgcggcggcggcagcagggcgccgccggcggcaacttccccgtgggggggtcctttcccgaagatgttagcccacatcaagacagtggatatgccccttccccaaggtatcttagaagattcagggagatgaagccccgcgttctacagcggtggtctaggcaaatcctcaggggccttcatttcctgcacagccgtgtgccccccattctccacagagatctgaagtgtgacaatgtgtttatcaccggacctactgggtccgttaaaatcggggatctaggcctggcaacactgaagagagcttcgtttgcaaaatcagttatcggtacccctgagttcatggcccccgaaatgtacgaggagaagtacgatgaagctgtggacgtctacgctttcggaatgtgcatgctcgagatggctacgagcgaatacccatacagcgagtgccagaacgcggcccagatctataggaaagtcaccagcgggcgcaaaccaaattcttttcacaaagtcaagattcccgaagtgaaggaaataattgaaggatgcatccggacagacaaaaacgaacgtttcaccattcaggacttgctcgcccacgccttctttcgggaggaacggggggtccatgttgaacttgccgaggaagacgacggagaaaagcccggcttgaagttgtggctgcggatggaagatgcccgccgcgggggcaggcctcgtgataatcaggccatcgagttcttgttccagctgggtcgggatgcagccgaggaagtggcacaggaaatggtggccttgggactggtatgtgaggctgactatcagccggtggctagggccgtgcgagaacgcgtggctgcaattcaaagaaaacgtgagaaactgagaaaagcacgtgagctcgaggccctcccgcccgaacccggcccccctccggctactgttcccatggcgccaggacctccatcagtgttccctccagagcccgaagagcctgaagcagatcaacaccaacctttcttgtttcgacacgcgtcatacagtagtaccacgtccgactgtgaaacagatggttacctgtcatcaagcgggttcttggacgcctcagacccagccctgcagcccccgggcggagtgcccagttccctggctgagagtcatttatgcttgccctccgcctttgccctgtccattccccggtcaggtccaggctcggactttagcccaggcgactcctatgcctctgatgcagcctccgggctcagcgacgtgggggagggtatgggccagatgagaagacctcccggccgcaacttgcgtcgtaggccaaggtctcgcctcagggtgaccagcgtatccgaccagaacgaccgggttgttgaatgccagctgcagacacacaattctaagatggtgacatttcgtttcgatttggatggagacagccctgaagaaatcgccgctgcgatggtatacaatgagttcattctcccatcggaacgtgatggtttcctgcgaaggatcagggagatcatacaaagagtagaaaccctgctcaaacgagacacaggtcccatggaggccgcagaagatacgctctcaccacaagaggaaccagcacctctgcctgctctgcctgtgcccctccccgacccatctaacgaagagcttcagtccagcacctctcttgagcaccgcagttggacggcattctccacatcctcttcctcccccggtacacctctttcccccggaaatccgtttagtcctgggactcccatctcccccggcccaattgctcttcagagggagagcaggagcttttctttgcagcgcgcccagattcagcgcaccgtgcttgaggctggtcaacgccccggtaagctgtggctgagggcaacggttcaattgcgagtatgggggctggaactgaggagaaaagagatgatggggaggaaccccaagctcggcgctgcacccaatccatag

SEQ ID NO: 211515 - DNA, 471 bp, synthetic construct
  misc_feature 1..471: note = Description of Artificial Sequence: Synthetic coding sequence
  source 1..471: mol_type = other DNA
atgggccagatgcggcggccccccggccggaacctgcggcggcggccccgatcccggctccgggttacgagcgtgtcagaccagaatgatcgcgtggtggaatgccagctgcagacccacaattccaagatggtcacctttaggtttgatcttgatggtgatagccctgaagagatcgctgccgctatggtatacaatgagttcattctgccctctgaaagggacgggtttttgagaaggattcgggagatcatccagagggttgaaaccctgctcaagagggacacgggcccaatggaggccgcggaagatacgctttctccacaggttaggcccctgggcggtcattttcaaggaaaatggacactttgttctagagtgtactactctctcccctctgcggtgcccctggaccttacgccgttacatttatgggatcccaaaactgtggctctgttttttttcttctag

SEQ ID NO: 211516 - DNA, 894 bp, synthetic construct
  misc_feature 1..894: note = Description of Artificial Sequence: Synthetic coding sequence
  source 1..894: mol_type = other DNA
atggccaaggtgagcgagctgtacgacgtgacctgggaggagatgcgtgataagatgcggaagtggagagaggaaaattctagaaattccgagcagatcgtggaggttggagaagagttgattaacgaatacgcaagcaagcttggtgacgatatctggataatttatgagcaggtaatgattgccgccctggactatgggagggatgatcttgcattgttttgcctgcaggaactccgaaggcagttcccagggagccacagagtgaaaagattgaccggtatgaggtttgaggctatggaacgctatgatgatgccatacagctgtacgaccggattcttcaggaggatccgaccaacactgccgcgaggaaacgcaaaatcgccatcagaaaggcccaaggaaagaatgtggaggcaatacgggagcttaacgagtacttggagcagtttgtcggtgatcaggaggcttggcatgaactggctgaactgtatatcaacgagcatgattatgccaaggccgcgttttgtctcgaagagctgatgatgaccaatccacacaaccacctctactgtcaacagtatgccgaggtcaaatatacccaaggtgggctcgagaacctggaattgtccagaaagtatttcgcccaggccttgaaactgaacaaccgcaatatgcgcgctttatttggactctacatgagtgcttcgcacattgccagcaatccaaaggcatctgctaaaaccaaaaaagataacatgaagtatgcctcttgggccgcgtcccagataaacagggcgtatcagttcgccggcagaagtaaaaaggagactaagtacagcctcaaggcagtcgaggatatgttagagaccctccaaatcactcagtcctag

SEQ ID NO: 211517 - DNA, 1104 bp, synthetic construct
  misc_feature 1..1104: note = Description of Artificial Sequence: Synthetic coding sequence
  source 1..1104: mol_type = other DNA
atgcggtggttcctgccctggaccctggccgccgtgaccgccgccgcagctagcacggtgttagccactgctctgagcccagcccccacaaccatggacttcacccccgcaccccttgaagatacaagcagtagaccccagttctgcaagtggccctgtgaatgcccaccctctcctcctaggtgcccactaggagtgagcctgattaccgacggttgcgaatgctgcaagatgtgtgcacagcagctgggcgataattgtacagaagcagctatatgcgatcctcacagggggctttattgtgattacagtggagacaggccacggtacgctattggtgtttgcgctcaggttgtgggcgtggggtgcgtgttggacggtgtgagatataacaacggccagtcttttcagcccaactgcaaatacaactgcacctgcatagacggcgctgttggctgcacccccctttgcctccgagttcggcccccacggctgtggtgtccccaccctagacgtgtgtctattcccggtcattgttgtgagcagtgggtctgtgaagatgatgctaagcggccccggaagacggcgcctcgagacaccggtgcctttgatgccgtcggtgaagtagaagcctggcaccgtaactgcatcgcttatacgagcccgtggtctccttgtagcacttcatgcggcctcggcgtcagcacgagaatcagcaacgtaaatgcccagtgctggcctgagcaggaaagccggctttgtaatcttcgaccatgtgatgtggacatccataccctgatcaaagctgggaagaagtgcctagctgtgtatcagcctgaagcgtcaatgaacttcaccttggccggatgcatctcaactagatcgtatcagccaaaatattgcggagtatgcatggacaacaggtgctgcatcccatacaaatcaaaaaccattgacgtgagtttccagtgcccagacggtctggggttctctcgtcaggttctgtggattaacgcttgcttctgtaatttatcatgccggaatcctaatgacatctttgccgatctggagagctaccccgactttagcgagattgccaattag

SEQ ID NO: 211518 - DNA, 588 bp, synthetic construct
  misc_feature 1..588: note = Description of Artificial Sequence: Synthetic coding sequence
  source 1..588: mol_type = other DNA
atgcccgtgcccctgaccagccggcacgaggtggtgcccgccctggacgctggaagcagtgactcatcctcaaggcagcaccggccaggccacgatgcagtgggagaagtagaagcctggcaccgtaattgtatcgcatacacgtcaccgtggtccccctgctcaacaagttgtggactgggggtttccacgagaatcagcaatgtgaacgctcagtgctggcctgagcaagagtctcgcctatgtaacctgcgtccctgtgacgttgacattcatactcttattaaagccggaaagaagtgtctggccgtgtatcagcctgaggcttcaatgaactttaccctcgctgggtgtatctcaaccaggtcctatcagccaaaatactgcggagtctgtatggataacagatgttgtattccctacaagagtaagaccatcgatgtttcattccaatgcccagatggtctgggctttagcaggcaagtgctctggattaacgcctgcttctgcaacctcagctgtagaaaccccaacgacatctttgctgatctcgagagctaccctgacttcagcgagatagcgaattag

SEQ ID NO: 211519 - DNA, 468 bp, synthetic construct
  misc_feature 1..468: note = Description of Artificial Sequence: Synthetic coding sequence
  source 1..468: mol_type = other DNA
atgcggtggttcctgccctggaccctggccgccgtgaccgccgccgccgcgtccaccgtattggcaaccgcactatcccccgcgccaacaacaatggactttacaccagcgcccttggaagacacttcttcccgcccccaattttgtaaatggccgtgtgaatgccctcccagcccgcctcgttgtcccctgggagtttccctgattaccgatggttgcgaatgctgtaagatgtgtgctcaacaactgggagacaactgcactgaagcagcaatatgtgatccacatcgtggattatattgcgactattcaggagatagaccccgctacgccatcggggtctgcgcacgcagagaggaggtctccggatgtgttcccgcgcgtggcatccatgaactgcatacctgtggccttcatcagcacacactgctctcaacacaggtgttgtggagcctgcatgggcaatag

SEQ ID NO: 211520 - DNA, 369 bp, synthetic construct
  misc_feature 1..369: note = Description of Artificial Sequence: Synthetic coding sequence
  source 1..369: mol_type = other DNA
atgcggtggttcctgccctggaccctggccgccgtgaccgccgccgccgcctccaccgtgctagccacagccgggaagaaatgtcttgccgtctatcagcccgaggccagcatgaacttcaccctggcaggctgcatttccacacggtcttaccagccgaaatattgcggggtgtgtatggataaccgctgctgtatcccgtacaagtcaaagaccatagacgtttcctttcagtgtcctgacggactgggattttctcggcaggtcctttggatcaatgcctgtttttgtaatctgtcctgcagaaacccaaacgacatatttgctgatctggagagttatcctgattttagcgagattgccaactag

SEQ ID NO: 211521 - DNA, 753 bp, synthetic construct
  misc_feature 1..753: note = Description of Artificial Sequence: Synthetic coding sequence
  source 1..753: mol_type = other DNA
atgcggggcacccccaagacccacctgctggccttcagcctgctgtgcttactgtcaaaagtgcgtacccaactgtgtcctaccccctgcacatgtccctggccccctccacgctgtcccctgggggtcccactcgttttagacggctgtggatgctgtcgggtctgtgcaaggagactgggggagccttgcgaccagcttcacgtctgcgatgccagtcaggggttggtgtgccaacccggggccggtcctggcggccgtggcgccctctgtctccttgccgaagacgactcttcttgcgaggtcaacggtcgactctatagagaaggggagacgtttcagccccactgttctataaggtgccggtgcgaggacgggggtttcacgtgcgttcctttgtgcagcgaagatgtgaggctgccctcttgggactgtccgcatccacggcgtgttgaagtcctgggtaaatgttgccctgagtgggtttgtggccagggaggcggactaggaacgcagccacttccagcacagggtccacagttctccggcctggtgtccagcctgccccctggggtgccatgtccggagtggagcaccgcctggggcccttgttctacaacatgtggactgggcatggccaccagggtttctaaccaaaataggttttgtagattagagacccagcggcgactgtgtttaagccggccgtgcccacccagccggggaagaagccctcagaatagcgcattctag

SEQ ID NO: 211522 - DNA, 657 bp, synthetic construct
  misc_feature 1..657: note = Description of Artificial Sequence: Synthetic coding sequence
  source 1..657: mol_type = other DNA
atgcggggcacccccaagacccacctgctggccttcagcctgctgtgtctcctgtcaaaagttagaacccagctgtgtcctacaccttgcacttgcccatggccgcctcctcgctgcccactgggcgtcccgctggtgcttgacggatgtggatgctgtcgggtctgcgctagaagacttggggagccatgcgaccagttgcatgtctgcgacgcttcacaagggcttgtctgccagccaggagcgggccctggcggccgaggtgctctctgcctatgcaagcaggacccttccttcctggccttgtctctgccgtgtccactggtgtcccccgctcagaatggtgctaggcctggggatcctgccaggcctcccgtgggatgggcatggcccccaggatgtcccaccagaactgcctccgccgattggcgcccttcagcagcttgtgcctgtcctgggccagctcaccccccaggagttgcggtacacaaaacagttccatctcgcgccgggctcggtatgggcaccaggtgtcctccttcccctgccggaggccccgtcccggggccatgggcggatggacgttggagcgtgccccggcctctcgccgccggaaacactctggcctgggttcaccatgcggaacatcagtactag

SEQ ID NO: 211523 - DNA, 753 bp, synthetic construct
  misc_feature 1..753: note = Description of Artificial Sequence: Synthetic coding sequence
  source 1..753: mol_type = other DNA
atgcggggcacccccaagacccacctgctggccttcagcctgctgtgccttctcagcaaggttaggactcagctgtgtccgaccccatgcacctgtccttggcctcctccccgctgtcccctgggagtcccccttgtgctcgacggctgtggatgttgtcgcgtgtgcgcgcgccgactgggagaaccctgtgatcagcttcacgtgtgtgatgcatcccagggtctcgtgtgccaacccggcgctggaccaggtgggcggggagcactgtgcctacttgcagaagacgacagttcgtgcgaagtgaatggtaggctgtatcgggagggcgagacgttccagccccactgttccatccgatgtcggtgtgaagatgggggattcacctgcgttcctctgtgcagtgaagacgtccgcctaccctcctgggactgcccacaccccagaagagtggaagtactggggaaatgctgccctgagtgggtctgtggccaggggggcggcctgggcacacagccactgccagcccaaggaccacaattcagcgggctcgtgtcaagtctgcctcccggtgtcccttgtccagagtggtcaacggcttggggcccctgctcaacaacatgtggattaggcatggccacaagagtgagcaaccagaaccgattctgccgcctggagactcagagaagactgtgcctgagtcgcccctgccctccttccaggggaagatccccccagaattccgcattttag

SEQ ID NO: 211524 - DNA, 2571 bp, synthetic construct
  misc_feature 1..2571: note = Description of Artificial Sequence: Synthetic coding sequence
  source 1..2571: mol_type = other DNA
atggagagcgaggacctgagcggccgggagctgaccatcgacagcatcatgaataaagtgagggacattaagaataagttcaagaacgaagaccttacagatgagttatctttgaacaagatatccgccgatactactgacaacagcggcactgtgaatcagatcatgatgatggccaataaccccgaggattggctgtctctgctcctcaagctagagaaaaattctgtcccactttccgatgccctgctcaacaaacttatcggccgatatagccaagcgattgaggcacttcctcccgataaatatggacagaacgagagtttcgctagaattcaggtgcgtttcgccgagcttaaagcgatccaagaacccgacgacgcacgtgactacttccaaatggcaagggcgaattgcaaaaagtttgcttttgtccatatctcctttgcccagttcgaactgtcacaggggaatgtcaaaaagtctaagcaattactccaaaaagcggtggaaagaggggcagtgccattggagatgctggagattgctttgagaaacctgaacctccagaagaaacaattactgtctgaagaagagaaaaagaatctgagcgcatctaccgtgttgactgcccaagagagctttagcgggtctctgggtcacttacaaaacagaaataattcctgcgacagtcgggggcagaccacaaaagcccgatttctatacggagagaacatgcctcctcaggacgctgagatcggatacagaaatagcctgagacaaaccaacaaaactaagcaaagttgtcccttcggccgcgtgccggtgaatcttttaaactccccggattgcgacgtgaagaccgatgactcagtggtgccgtgcttcatgaaacggcagactagtagaagcgagtgcagggacctcgtggtgcctggatctaagcccagcggaaatgactcttgtgaattgagaaacctgaaatctgtgcagaactcccattttaaggaaccactggtcagcgatgagaaatcatccgaacttattatcaccgacagcataacactcaaaaataagaccgaatcctcacttctggccaaactggaggagactaaggaatatcaggagcctgaggtgcccgagtccaaccagaagcaatggcaatccaaacggaagtccgagtgtatcaaccagaaccccgctgcctccagcaaccactggcaaattcccgaactggcaaggaaagttaatactgagaaacacactacattcgagcagcctgtgttttctgtcagcaaacagtcacccccgatctccaccagtaaatggttcgatccgaagtcaatttgtaaaactccgtcgtcaaacacactcgatgattacatgtcttgcttccgaacgcctgtcgttaagaacgactttcctccggcttgtcagctgagcacgccttatggccagccagcctgcttccagcaacaacagcatcaaatcttagctactccattgcagaaccttcaggtgcttgcctcaagcagcgccaatgaatgcatttccgtcaaagggcgaatctactctatcctcaaacagattgggtctggcggtagttccaaagtcttccaggtgttgaatgagaagaagcagatatatgcaatcaaatacgttaatctagaggaagcagacaatcagacgttagacagctatagaaatgaaattgcctaccttaataagctccaacagcattccgacaagataattcgcctctatgactatgagattaccgaccagtatatatacatggtcatggagtgtggaaatatagacctgaatagctggctgaagaagaaaaagtccatcgacccctgggaaagaaaaagttattggaaaaacatgctagaagctgttcataccatccatcaacacggaatcgtgcacagcgacctgaaaccagcgaacttcttgatcgtggacgggatgctgaaactgattgatttcggaatcgccaaccagatgcaaccagacacaaccagtgttgtgaaagattctcaagtggggaccgtgaactacatgccacccgaggcaatcaaggatatgtcttccagcagggagaacggcaaatccaagagcaagatcagtcccaagagcgacgtgtggtcgcttggctgcattttatactatatgacctacggcaagactcccttccagcagatcatcaatcagatctccaagctccacgcgataatagatccaaaccacgagattgagtttcccgacatccctgaaaaggacctccaggatgtgctgaaatgctgcctgaagcgcgatccaaaacaaagaattagtatccccgagttgctggcacatccttatgtgcagattcagacacatccagttaaccagatggcaaaggggaccacagaagagatgaaatacgtccttggccaactggtggggctgaattcacctaattctattctcaaagcagcaaaaactctatatgagcactactccggcggcgaaagtcataactcgtccagcagtaagacgttcgaaaagaaacgaggcaagaagtag

SEQ ID NO: 211525 - DNA, 1119 bp, synthetic construct
  misc_feature 1..1119: note = Description of Artificial Sequence: Synthetic coding sequence
  source 1..1119: mol_type = other DNA
atgaacaagcggcggctgctgtaccccagcggctggctgcacggccctagcgacatgcaaggcctcctgttctctaccctgctgcttgcaggcctggcccaattctgctgcagagtgcagggcaccggcccactggataccaccccggagggcagaccgggcgaggtttcagacgccccacaaaggaaacagttttgtcactggccttgtaaatgtccacagcagaaacctaggtgcccccccggcgtgtcactcgttcgcgacggttgtggctgttgtaaaatttgcgctaagcaaccaggggaaatctgcaatgaagccgacctgtgcgacccacataaaggactttattgtgactattccgtggacagaccaaggtatgagacaggagtgtgcgcgtatctggtggccgtgggctgcgagttcaaccaggtgcactatcacaatggccaggtgtttcaacctaacccactcttctcctgcctttgcgtgtcgggggctatagggtgcacacccctgtttattccaaaactggccggaagccattgtagcggcgccaagggcggaaagaagtctgatcaaagcaattgctccctcgagcctctcttacagcaactcagcacctcctacaaaaccatgccagcataccggaaccttccattaatctggaagaaaaagtgcctggttcaggccaccaagtggacgccatgctctcgtacttgcggcatggggatctcaaacagggtgactaacgagaatagcaattgcgaaatgaggaaagagaagcggttatgttacattcagccctgtgactccaacattctcaaaaccataaagattccaaaggggaagacatgccagccgaccttccagctcagtaaagcggagaagttcgtgttttccgggtgtagcagtactcagagctacaaaccgacattctgcggcatctgtcttgacaaaaggtgctgcatacccaacaagtcaaaaatgattacaatccagtttgattgccctaatgagggtagtttcaaatggaagatgctgtggattactagctgcgtgtgccagaggaattgtcgcgaaccaggggatatcttttctgaacttaagattctctag

SEQ ID NO: 211526 - DNA, 996 bp, synthetic construct
  misc_feature 1..996: note = Description of Artificial Sequence: Synthetic coding sequence
  source 1..996: mol_type = other DNA
atgaagatcagccggggccgggtgtgcctggagagcgagaacaaggacgccggagtagcaggccgcaagcagttctgtcattggccatgcaagtgcccgcaacagaaaccacgatgtccaccaggggtgagcttggtgcgcgatgggtgtggctgctgcaaaatctgtgccaaacagccaggagagatctgcaacgaagccgatctgtgtgatccacacaaaggcctttactgtgactacagcgtggaccgaccccgttacgaaactggtgtctgcgcctgtaagtccgttggatgcgagttcaaccaagttcactaccataatgggcaagttttccaacctaaccctctgtttagctgtctgtgcgttagtggagcgatcgggtgtacacccttattcatccccaagcttgcgggctcacactgtagcggagccaaaggaggcaagaagtctgatcagtccaactgcagcctcgaacctctgctgcaacagttgtcaacgtcatataaaacaatgcctgcttatcgcaatttaccactgatctggaaaaagaagtgccttgtgcaggccaccaagtggaccccgtgtagccgtacgtgtggtatgggcatttcaaaccgggttaccaacgagaacagcaattgcgaaatgcgcaaagaaaaacggttgtgttacatccagccttgcgatagtaatatactgaagacgatcaagattcctaagggaaagacttgtcaacctacatttcagctgagcaaggcggagaaatttgtctttagtgggtgtagctcaacccaatcctacaaacctacattttgtggcatatgtcttgataaacggtgttgcattcccaacaagagcaaaatgattacgatccagttcgattgtccgaacgagggctcgttcaaatggaaaatgctatggatcacctcttgcgtgtgtcaacggaactgccgggaacctggagatattttcagcgagctgaaaatcctctag

SEQ ID NO: 211527 - DNA, 1065 bp, synthetic construct
  misc_feature 1..1065: note = Description of Artificial Sequence: Synthetic coding sequence
  source 1..1065: mol_type = other DNA
atgcagggcctgctgttcagcaccctgctgctggccggcctggcccaattctgttgccgggtacaaggcaccggccctcttgatactacaccagaggggcgccccggggaggtctctgacgcaccacagcgaaagcaattctgccattggccctgcaaatgtccccaacagaagcctcgctgtccaccgggcgtgtccttggtgagagatggatgtgggtgttgtaaaatctgtgccaagcaacctggcgagatctgtaacgaggctgacctgtgcgatccccacaaaggcctgtattgtgactatagcgtcgatcgcccacgatatgagaccggggtctgcgcctatctggtggccgtgggttgcgagtttaaccaggtgcactatcacaatggacaggtttttcaacccaacccgctgttctcctgtctgtgcgtctcaggcgccattggatgtacgccgcttttcatcccgaagctggctggatctcactgctcaggtgcaaagggcggcaagaagtcagatcagagtaactgttccctggagccactgctgcagcagctgtccacaagctacaaaacaatgccagcctatcgcaatttgccgctcatttggaagaaaaaatgtttggtgcaggctacgaaatggacgccttgtagtcgcacatgtggcatgggaattagcaatagggtaacaaacgagaattccaactgtgaaatgcggaaggaaaagagactctgctacattcaaccctgtgattctaacattttgaaaactatcaagatacctaagggaaagacctgccagcctaccttccagctctcaaaggccgagaaatttgtgttttccggttgttcttcaacccagtcatataaaccgaccttctgcggtatttgcctcgacaagagatgctgtatccccaataagagcaagatgattacaatacagttcgattgccctaatgagggaagcttcaagtggaagatgctgtggatcacaagttgtgtgtgccagaggaactgtagggagcctggcgacattttttccgaacttaagatcttatag

SEQ ID NO: 211528 - DNA, 693 bp, synthetic construct
  misc_feature 1..693: note = Description of Artificial Sequence: Synthetic coding sequence
  source 1..693: mol_type = other DNA
atgcagggcctgctgttcagcaccctgctgctggccggcctggcccaattctgctgtcgcgtccaaggaacaggcccgctcgacacgactcccgaaggacgcccaggcgaagtgagtgacgcaccacaacgaaaacagttctgtcactggccttgcaagtgtccgcagcaaaaacctaggtgcccaccgggtgtctcattggtgcgtgatggatgtgggtgctgcaaaatctgcgcaaagcagcctggcgagatatgcaatgaagccgatctgtgtgacccacacaaagggctgtactgtgattactccgtggaccgtccacgatacgagaccggcgtatgtgcctatctcgtagctgtgggctgtgaatttaatcaggtgcattatcataacgggcaggtgttccagcctaacccgctcttctcttgcctctgtgtctcaggggctattggctgcacaccactttttatccctaaattagctggcagccattgctccggcgcaaaggggggaaagaaaagtgaccagtcaaactgctcgttagagcctctcctgcaacagctgtctacgagttacaagactatgcctgcttatcgtaatctccccctcatctggaaaaaaaacgtgctttgtaagcagcaaaacgggctgcctgcacccgaacatgtaggatgggaatatcttaccgggtag

SEQ ID NO: 211529 - DNA, 393 bp, synthetic construct
  misc_feature 1..393: note = Description of Artificial Sequence: Synthetic coding sequence
  source 1..393: mol_type = other DNA
atgggcatcagcaaccgggtgaccaacgagaacagcaactgcgagatgaggaaagaaaagcgactttgctacatccagccttgcgacagtaacatcctgaaaaccataaaaatccccaaggggaagacatgccagcccacttttcagctcagtaaggctgagaaattcgtattcagcggatgttcatctactcaaagttacaagcccaccttctgtgggatatgcctggacaagcggtgttgtattccgaataagtctaaaatgataaccatacagttcgattgtccgaacgagggctctttcaagtggaaaatgctgtggataacttcttgtgtatgtcaacgtaactgtcgcgagccaggggatatattcagcgaactcaagattctatag

SEQ ID NO: 211530 - DNA, 1626 bp, synthetic construct
  misc_feature 1..1626: note = Description of Artificial Sequence: Synthetic coding sequence
  source 1..1626: mol_type = other DNA
atggccggcgccatcatcgagaacatgagcaccaagaagctgtgcattgttggcgggatcctcctggttttccagatcattgcgtttctcgttggcggcctgattgccccaggaccaacaaccgccgtgtcctatatgtccgtgaagtgcgttgacgcgcgcaaaaaccaccacaaaacaaaatggtttgtaccttgggggcccaatcattgcgataagattcgcgatattgaggaggctattccccgcgagatcgaagccaacgatatcgttttcagcgtgcatatacccctgccccatatggagatgtctccatggttccagtttatgcttttcatcctgcagttggatatcgccttcaagttaaataatcagattcgagagaatgcagaggtatccatggacgttagtcttgcatacagagacgacgcttttgctgaatggacggaaatggctcacgagagggtgcctagaaagcttaaatgcacatttacgagtccaaaaacaccagagcatgagggccgctactatgaatgtgacgttcttccctttatggaaatcggcagcgtagcccataaattttatctgctcaatattcgcctgcctgttaacgagaagaagaaaatcaacgtcggcataggtgagatcaaggatattcggctagtggggattcatcagaacggcgggttcactaaagtgtggttcgcgatgaaaacctttcttaccccctccatttttatcattatggtttggtactggcgccggatcactatgatgagtcgtcccccagtcttgctggaaaaggtgatctttgctctcggcattagcatgacctttatcaacatcccagtggaatggttctccattggtttcgactggacgtggatgctgctgttcggggacattcgccaagggatcttctacgccatgctccttagtttctggatcatcttctgcggtgaacacatgatggatcagcatgagaggaatcatattgctggatactggaagcaagtcggaccgattgcggtggggtcattctgcttattcatctttgacatgtgcgagcggggtgttcagctgacaaacccattctattccatctggaccaccgacatcgggacagaactggcaatggcgtttatcattgtagcaggaatctgcctctgtctatacttcttgttcttatgctttatggtgttccaagtatttcgcaacatcagtggcaagcagagctcgttgcctgccatgtccaaggtgagacggttacactacgagggccttatttttaggttcaaatttctgatgctgataacgcttgcatgcgcggcgatgaccgtaatcttttttatagtgtcacaggtgaccgaggggcactggaagtggggcggggtgactgttcaggtgaactccgccttctttactggcatttacggaatgtggaatctatacgtgttcgcattgatgttcctgtatgctccgagccataagaattatggtgaggatcaatcaaatggggatttgggggtgcattccggagaagagttgcagctgactacgaccataacccacgtggatggcccaacagagatttacaaactgacccgcaaggaggcacaggagtag

SEQ ID NO: 211531 - DNA, 1632 bp, synthetic construct
  misc_feature 1..1632: note = Description of Artificial Sequence: Synthetic coding sequence
  source 1..1632: mol_type = other DNA
atggccggcgccatcatcgagaacatgagcaccaagaagctgtgcatagtggggggaatattgttggtgtttcaaataatcgctttcctggtgggaggacttattggcccgactacggctgtatcatacatgtccgtcaagtgcgtagacgcgcgtaagaatcatcacaaaaccaagtggtttgttccctggggtcctaatcattgtgacaaaatccgcgacattgaagaggctatcccacgcgaaatcgaggctaatgatattgtgttctccgttcatatacctcttccacacatggagatgagcccatggttccagtttatgctattcattctgcagctggacattgcctttaagctgaacaatcagatccgagagaatgccgaagtctctatggacgtgagtcttgcttaccgagacgacgccttcgctgagtggaccgaaatggcacatgaaagagttcctcggaaactgaagtgtactttcacgtccccaaagaccccggagcacgaggggcgttactacgaatgtgacgtgctgccgttcatggaaatagggtctgtagcacataaattctatctgttgaatataagactacccgtgaatgagaagaagaagatcaatgtgggcattggcgagattaaagatatcaggcttgtcgggatccaccagaacggtggatttaccaaggtctggtttgccatgaaaacattcctaacaccgagcattttcatcattatggtttggtactggcggcgcatcactatgatgagcaggccccccgtgctgctcgagaaggtaatttttgcccttggtattagcatgacgtttatcaacatccctgtggagtggttctctatagggttcgactggacatggatgctactgttcggggatattcggcagggcattttttacgcaatgttgctgagcttctggatcatcttctgcggtgagcatatgatggaccagcatgaacggaaccacatagccggttattggaagcaggtgggccctatcgctgtaggttctttctgtctgtttattttcgacatgtgtgaacggggggtgcagctgacgaatcccttttactccatatggaccactgatattggcactgaacttgccatggctttcataatcgtcgccggaatctgcttgtgtctgtacttcctctttctgtgctttatggttttccaggtgttccgaaacatttcaggtaagcagtcctccctgcccgcaatgtccaaggtgaggaggctgcactatgaaggcctgatcttcagattcaagtttctgatgctgataacgctggcctgtgctgccatgactgtgatcttttttattgtgagtcaagtgacggagggacactggaagtgggggggcgttacagtgcaggtgaacagcgcgtttttcactggaatctatgggatgtggaacctatatgtcttcgctctgatgtttctctacgctcccagtcacaaaaattacggtgaggatcaatctaatggcatgcagctgccctgcaaatcacgagaggactgtgccctcttcgtgagcgagctttatcaggagttatttagtgcatccaaatatagtttcattaatgataacgctgcatccggcatatag

SEQ ID NO: 211532 - DNA, 1353 bp, synthetic construct
  misc_feature 1..1353: note = Description of Artificial Sequence: Synthetic coding sequence
  source 1..1353: mol_type = other DNA
atggccggcgccatcatcgagaacatgagcaccaagaagctgtgcatcgtggggggtattctgctggttttccagatcattgcctttctggtggggggattgattggggagaatgcagaggttagcatggatgtctctctggcgtacagggacgacgcatttgcggagtggacagagatggcgcatgaaagagtgccaaggaagttgaaatgcacctttacctcgccaaagacacccgagcacgagggcagatattatgaatgcgatgtattgccatttatggagatcgggagtgttgctcacaagttttacctgctgaatataaggcttccagtgaatgaaaaaaaaaagattaacgtggggatcggcgaaatcaaggacatcagactcgtgggcattcaccagaacggcggcttcacaaaagtttggttcgcaatgaaaacctttctgacgccgtccatcttcattataatggtctggtactggcggcgcattaccatgatgtccaggccaccagtgctgctcgaaaaggtgatcttcgctcttggtatcagcatgaccttcattaacatacctgtagaatggttcagtatcggcttcgattggacatggatgctactcttcggcgacatcagacagggtatcttttatgctatgttactctccttctggatcatcttctgtggtgagcacatgatggaccagcacgagcgtaaccacattgccgggtactggaagcaggtgggccccatagctgtggggtccttttgcctgtttatttttgacatgtgtgagcgcggagtccaactgacgaaccctttctattctatttggactaccgatataggcacagagctggcaatggcttttatcattgtggctgggatttgcctttgcctatactttctcttcctgtgtttcatggtcttccaggtttttcgcaacatttcaggcaagcagagctcactgccggctatgtctaaggtccggaggcttcactacgaaggacttatcttcaggttcaagtttctgatgctgatcactttggcctgcgcagctatgacagtgattttctttatagtgtcccaggttactgagggtcattggaaatggggtggggtcactgtgcaggtcaatagcgcattcttcaccggtatttacggcatgtggaacctatatgttttcgcgctgatgtttttatatgcgccaagtcacaagaattacggtgaggaccagtcaaatggcgatcttggcgtccactccggtgaggagctgcagctcaccaccaccatcactcacgtggacggacctactgaaatttataagctcactaggaaggaggctcaagagtag

SEQ ID NO: 211533 - DNA, 1638 bp, synthetic construct
  misc_feature 1..1638: note = Description of Artificial Sequence: Synthetic coding sequence
  source 1..1638: mol_type = other DNA
atggccggcgccatcatcgagaacatgagcaccaagaagctgtgcatagtcggcgggattcttttagttttccagattatcgcttttctcgtgggtggcctaatagcgcctggtcctacaactgccgtctcttacatgtcagtaaaatgcgtcgacgcccgcaagaaccatcataaaaccaaatggttcgtgccttggggacccaaccactgtgacaaaattcgggacattgaagaggctattcccagggagattgaggcaaatgatattgtgttctccgtgcatattcccttacctcatatggagatgtccccttggttccaattcatgcttttcattctacagttggacatagcatttaagctgaacaatcagatccgcgaaaatgctgaggtgtccatggacgtttccctagcatatagggatgatgccttcgcggagtggaccgagatggcccatgaacgcgtgcccagaaagctgaagtgcactttcacgtcacccaaaaccccggagcatgaggggcgctattacgaatgtgacgtgttaccgtttatggagattggcagcgttgctcataagttttaccttttgaacatcagactaccagtgaacgaaaagaaaaagatcaacgtcgggatcggagagatcaaggacattcgcttggtcggtatccatcagaatggcggattcacaaaggtgtggttcgcgatgaagacgtttcttacacccagcatattcatcatcatggtgtggtattggcggcgcatcacaatgatgtccagaccgccggttcttcttgaaaaggtcattttcgcactcggaatatctatgactttcatcaacattcccgtggagtggttctccattggctttgactggacgtggatgctacttttcggggacatacggcaaggcatcttttacgccatgttgttaagcttttggatcatcttttgcggagaacacatgatggaccagcatgagaggaatcacatagcaggatattggaagcaagtaggtccgatcgccgtgggtagcttttgcctgtttatctttgatatgtgcgagaggggcgtgcagctcacgaatcctttctatagtatatggacaactgatattggaacagaactggccatggcctttatcatagttgcgggtatatgcctgtgcctctacttcctcttcctgtgcttcatggtgtttcaggtgttcagaaatatttctggcaagcagtccagcttacctgcaatgtccaaggtccggcggctgcattacgagggcctgatttttcgtttcaaattccttatgctgatcaccctagcttgtgccgccatgaccgtcattttcttcattgtgtctcaggttactgaaggtcattggaagtggggcggcgtcacagtgcaagtaaatagcgctttcttcaccgggatttacggcatgtggaatctgtatgtgtttgcattgatgttcttatacgccccctcacataaaaactacggcgaggatcagagtaacggtatgcagcttccttgcaagagcagggaagactgtgcccttttcgttagcgaactctaccaggaattgttctctgcctcaaagtacagcttcattaacgacaacgcagccagtggtatctag

SEQ ID NO: 211534 - DNA, 2142 bp, synthetic construct
  misc_feature 1..2142: note = Description of Artificial Sequence: Synthetic coding sequence
  source 1..2142: mol_type = other DNA
atggccggcagcttctgctggcggatgctgggcctggtgagcaaggtgggaaaccgcgcccgctgcttctcgagcatggcggctagtgaggaagagctgctggacttttccggatccgagttgcagtttaattcatgctcactacaccttagtctgcaccccttcttcaatttcttactaggcattcattcctgtttcgtttgcaaggagagtaaaactgatgttaagcggtgtgtcgttacacaatgcggaaagttttaccatgaggcgtgtgttaagaagtaccccctaaccgtgttcgaatcccgaggatttcgttgtcctctgcattcttgtgtcagttgtcatgcaagcaacccatctaacccacgcccttcaaagggcaaaatgatgcgctgcgtaagatgccctgttgcctatcacagcggagacgcttgtctggccgctggatgtagtgtgattgcctccaactccataatttgcactgcacactttacagcacggaaaggcaaacggcaccatgcccatgtcaacgtgagttggtgttttgtgtgttcaaagggagggtctctgctttgctgcgaatcatgccccgctgcttttcacccagattgtcttaacatagagatgccagacggctcctggttttgtaacgattgtcgagccgggaaaaagctccatttccaggatatcatctgggtgaagctgggcaattaccgatggtggccagccgaggtctgtcaccctaagaatgtccccccaaacattcagaaaatgaagcatgagataggagaatttcccgtgttctttttcggctccaaagattactactggacgcaccaggctagagtatttccttatatggaaggggatcgaggctcgcgctatcagggtgtgagaggcatcggcagagtgttcaagaatgctctgcaggaagccgaggctcgctttagggaaatcaagctacaaagagaggctcgggaaacacaggaaagtgaaaggaaacccccaccgtacaagcatattaaggtgaacaaaccatacgggaaggtccagatatacaccgctgatatctcagagatcccaaaatgtaactgcaaacccaccgacgaaaatccctgtggctttgactctgaatgccttaataggatgctgatgttcgaatgccatccacaggtgtgcccagcgggggagttttgtcagaatcagtgtttcactaagaggcagtacccagagacaaagataattaaaacagacggcaagggctggggattggttgccaagagggatattcggaagggcgagtttgtgaacgagtatgtgggcgaattgatcgatgaggaagaatgtatggcgagaattaaacatgcacatgagaatgatatcacacacttttacatgttgactatcgataaggatcgaattattgatgctggccctaaggggaactacagccgattcatgaatcacagttgtcagcccaactgcgagacactcaagtggacggtgaatggggataccagggtcgggctgttcgcagtctgcgatatccccgccgggacagagctgaccttcaattacaatctcgactgtctggggaatgagaaaacagtgtgcagatgcggggcaagcaattgcagcggttttctaggtgaccgaccaaagacaagcacaaccttatcctccgaggaaaaggggaagaaaacaaagaaaaaaactagacgacgcagggcaaaaggggaaggcaagcgtcaatctgaagacgagtgcttccggtgcggggacggcggtcagcttgtgttgtgcgaccggaaattctgcacaaaggcataccacctatcctgtctgggtctgggcaagaggcctttcggaaagtgggagtgcccatggcatcactgtgatgtctgtgggaaaccctctacctccttttgccatctttgccccaacagcttttgtaaggaacatcaggatgggacagccttctcttgtacaccagacggacgaagctactgttgcgaacatgacttgggtgcagcgtcagtgagaagcacaaagacagaaaagcctccaccagagcctggaaaacccaaagggaaacgtagaagaaggcgcgggtggcgtagagtaaccgagggtaagtag

SEQ ID NO: 211535 - DNA, 4098 bp, synthetic construct
  misc_feature 1..4098: note = Description of Artificial Sequence: Synthetic coding sequence
  source 1..4098: mol_type = other DNA
atggagttcagcatcaagcagagccccctgagcgtgcagagcgtggttaagtgtatcaagatgaaacaggctcccgagatcttggggtccgctaatggcaaaacaccatcctgtgaggtgaaccgagaatgctcggtgtttctttccaaggctcagctgagctcttccttgcaggaaggcgtgatgcaaaagtttaacggacatgacgctcttccattcattcccgccgacaaactgaaggacctgacatccagggtttttaacggcgagcctggtgctcacgatgccaaactgcggtttgaatcccaggaaatgaaaggcatcggtacaccacctaacaccaccccaattaaaaacggaagtcccgagattaagctaaagatcacaaagacctacatgaacggcaagcccctatttgaaagttccatctgcggagacagcgccgcagacgtgtctcagtccgaagaaaacggacagaagcctgaaaacaaggcaagacgcaatcgcaagaggtctatcaaatatgattccttgctagaacagggcctagtggaagccgccctagtgtcaaagatcagctcccctagtgacaagaagatcccagcgaaaaaagagtcctgccccaacactggcagagacaaggatcatctgctgaaatacaatgtgggagatctggtgtggagtaaagtctctggttacccttggtggccctgtatggtcagtgccgatcccttacttcactcatacactaagcttaaggggcagaagaaaagtgccagacaataccatgtccagttctttggtgatgcccccgagcgggcctggatcttcgagaaatctctggtggcattcgaaggggaggggcaatttgaaaagctgtgtcaggagagtgcaaagcaggcgcccacaaaggccgaaaaaatcaaactgctgaagccaatctccggtaagctcagagctcagtgggagatggggattgtccaggcagaggaagcagcgtctatgagtgtcgaagagagaaaagctaaatttacatttctgtatgtcggggaccagctccatctgaacccacaggtagccaaagaagcaggcatcgccgcagaaagccttggcgaaatggcagagagcagcggggtgagcgaggaggctgcagagaatcccaaaagtgtgagagaggagtgtattcccatgaaacggcgcaggagagccaagctgtgttcttctgccgagacgctggagtctcaccccgacattggaaaatctacgcctcagaaaaccgcagaagctgatcccaggagaggggtgggcagccctccaggcagaaagaagaccacagtcagcatgcctaggtcaagaaaaggggacgcggctagccagtttttggtcttttgtcaaaaacatcgggacgaagtggtcgctgagcaccctgatgccagcggagaagaaatcgaagagctgttgaggagtcagtggtctttactctccgaaaaacagagggcccggtacaacactaagtttgccctggtagcccccgtgcaggccgaggaggacagcgggaatgtgaacgggaaaaagcgcaatcacacaaaacgcatccaagatccgactgaggatgctgaggcagaggatactccacgcaaacggctccgcactgataaacacagtttgcggaaaagggataccattacggataagactgcacggacaagttcttacaaagcaatggaagcggcctcttctctgaaatcgcaggctgccacaaaaaatctgagtgatgcttgcaaacccctaaaaaagcgtaatagggcctcaaccgccgctagctccgcgctgggattctctaagtccagctccccatcagcgtccctgaccgagaatgaagtcagcgatagccccggcgatgaacccagcgaaagcccctacgagtccgcggatgagacccagaccgaagtttctgtttctagcaaaaagtccgagcggggcgtaacagctaagaaagaatatgtatgccagctctgcgagaaacctggatccctgctcctgtgtgagggcccttgctgcggcgcctttcacctggcttgcctcgggctgtcacgacgccccgagggccggtttacctgttccgagtgtgctagcggtatacacagctgcttcgtgtgcaaagaatctaagacagatgttaaaagatgtgtcgtcactcaatgcggcaagttctaccatgaggcatgcgtgaaaaagtacccgttgactgtctttgagtccagagggtttcgatgcccgttgcatagctgcgtctcctgccacgccagcaaccctagcaacccaaggccgagcaagggtaagatgatgaggtgcgttaggtgcccggtcgcgtatcactctggtgacgcctgcctggcagccggctgctctgtgattgcgagcaacagtatcatctgcactgcccattttaccgctcggaaaggaaaacgccatcacgcacacgttaacgtgtcttggtgctttgtgtgtagcaaggggggttcactcctgtgctgtgagtcttgccccgccgcatttcaccccgactgcctaaatatcgagatgcctgatgggagctggttctgcaacgactgccgcgctgggaagaagcttcacttccaagacatcatttgggtgaaactgggaaactaccgttggtggcccgcagaggtctgtcatcccaagaacgtacctcccaacattcagaaaatgaaacacgagattggggagttccctgtgttcttctttggatcaaaagactattattggactcatcaggcgcgggtgtttccctacatggagggggaccgtgggagcagatatcagggcgtacgcggaatcggccgggtgttcaaaaatgcccttcaggaagccgaggctcgttttcgggagattaagctgcagagagaagctcgagagacccaggagagcgagcggaagcctccgccttacaaacacatcaaagtgaataagccgtacggtaaagtgcagatctacactgccgatatctccgaaatacctaaatgtaactgcaagcctacggatgagaatccttgtgggttcgatagcgagtgcctgaaccggatgttgatgtttgaatgtcaccctcaggtctgtccagctggcgaattctgccagaaccagtgttttaccaagcggcagtatccagagacaaaaattataaagacagatggaaaagggtggggtctggtcgctaaaagagatatacggaaaggagagtttgtcaatgagtacgtgggggaattgatagacgaggaggaatgcatggctcgtatcaagcacgcccacgaaaatgatatcacgcatttttatatgctgaccatcgataaagaccggataatagacgcagggcctaaagggaactattcccgcttcatgaaccatagctgccagccgaattgcgaaaccctaaagtggacagtcaatggggacactcgcgtcggcctcttcgccgtgtgcgatatccctgccggaactgagctgactttcaactacaatcttgactgcctgggcaatgaaaagaccgtgtgtcggtgtggggctagcaactgctctggattcttgggtgataggccgaaaacctcaactaccctgagctccgaagaaaagggcaagaagacaaagaagaagactagaaggcgccgcgccaagggcgagggcaaacgacaatccgaggacgagtgcttccgatgcggggacggcggtcagttggtgctgtgtgatagaaaattttgcactaaggcttatcacctgagttgtttgggactgggtaagcgcccgtttggcaaatgggagtgtccctggcaccactgcgacgtttgcggaaagccttccacatccttttgtcacttatgccccaactcgttttgcaaagagcatcaggacggaacggcttttagctgcacgcctgacggcagaagttactgttgcgaacacgaccttggtgccgcctctgtgcggtcgacaaaaacggagaaacccccacccgagcccggtaagcccaagggtaagcgaagacgccgacggggatggcgtcgggtgactgagggcaaatag

SEQ ID NO: 211536 - DNA, 4098 bp, synthetic construct
  misc_feature 1..4098: note = Description of Artificial Sequence: Synthetic coding sequence
  source 1..4098: mol_type = other DNA
atggagttcagcatcaagcagagccccctgagcgtgcagagcgtggttaagtgcatcaagatgaaacaagcaccagagattctgggcagtgccaacggcaagactcctagctgcgaagtcaacagagaatgttcagtctttctcagcaaggcccagctgagctcaagccttcaggagggggtgatgcagaagtttaacgggcacgatgctctgccctttatacctgcggataagctaaaggatttaacatcgcgtgtatttaacggagagccaggtgcccatgacgccaaactgcgatttgagagccaggagatgaagggaataggcaccccacccaatacgaccccgataaaaaacggttcccccgaaataaagctgaaaatcaccaaaacatacatgaatgggaagcctttattcgaaagcagcatctgcggggattccgccgcggatgtgagccagtctgaagaaaacggacaaaagcccgaaaacaaagctcgaaggaatcggaaacggtctatcaaatacgactccctgttggagcaggggttagtagaggcagcgctagtctccaaaataagctctccgagtgacaagaagattcctgctaagaaggaaagctgccctaataccggccgagacaaggatcacctgctgaaatataacgtgggagacctggtgtggtcgaaggttagtggctatccctggtggccctgtatggtctctgccgatcctctcttacattcttataccaaattgaagggacagaagaagagcgctagacagtatcatgtgcagttcttcggagatgctcctgaaagagcctggatattcgagaagtccctggtggccttcgagggcgagggccagttcgagaagctctgccaggaatccgctaaacaagcccccaccaaggcagaaaaaatcaaactgctcaagcccatttcagggaagctcagggcccagtgggaaatgggcattgtgcaagcagaggaggccgctagcatgtctgttgaagagaggaaagcgaagttcacattcctgtatgtgggagaccaactgcatttgaacccgcaagtggccaaggaagcaggaattgccgcagaaagcctgggagaaatggcagagagttccggcgtgagtgaggaggcggctgagaaccctaaatctgtgagagaggaatgtatacctatgaagcgtcgccggcgcgccaagctgtgcagctccgctgaaacactggagtcccatcccgacatcggcaagagcacgccccagaagacagctgaagcagacccacggaggggcgtcggctctccacccggcagaaaaaaaaccaccgtctcgatgccgcgcagccggaaaggagacgctgcatcccagttcctggtattctgccagaagcatcgagacgaagttgttgctgagcacccagatgcctccggagaagaaattgaggaactcctgaggagccaatggagtctcttgtctgagaagcagcgtgcaaggtataacacaaagttcgccctcgtcgcacccgtgcaggccgaggaagattccggcaatgtgaatggaaagaagcggaaccatacaaaacgcatccaggatccgactgaggacgcagaagccgaggatacccctagaaaaagattacgtacggataagcattccttgagaaaacgggataccatcacagacaagactgcccgcacgagcagctataaagccatggaagccgctagttctctcaaatctcaggccgccacgaaaaacctgtccgacgcctgtaagcctctcaaaaagcggaatagagccagcacagctgcatcaagcgcactagggttcagcaaatcttcctctcccagtgccagtttgaccgagaacgaggtgtccgatagccccggtgatgagcctagtgagtccccatatgagtccgccgatgaaactcagacagaggtctcagtgtcttctaagaagagcgagcggggcgttaccgccaagaaagagtatgtttgtcagttatgcgagaagccaggttctctgctgttatgcgaagggccctgctgcggcgcgttccatctggcttgtctgggcctgtctcgacgtccagaaggacgcttcacctgcagtgaatgtgcctcaggtatacacagctgcttcgtctgtaaggagagcaaaacagacgtgaaacgctgcgtggttacacagtgtggaaagttctatcacgaagcttgtgtgaagaagtacccccttacagtctttgagagcagaggtttcaggtgccctctgcactcttgtgttagctgtcacgccagcaaccctagtaacccgcggccatcgaagggtaagatgatgcggtgtgtccgttgcccggtggcctaccattcaggagacgcatgcttggcggcgggctgtagcgtgatcgcaagcaacagcattatctgcacagctcacttcaccgccagaaaggggaaaagacatcatgctcatgttaacgtttcctggtgtttcgtgtgttcgaaagggggttcattgctttgttgtgagtcttgccccgccgcgttccacccagactgtctgaacatagagatgcccgacgggtcctggttctgtaatgactgcagggctggaaagaaactccatttccaggacataatctgggtcaaactggggaactatagatggtggccagccgaagtctgccacccaaagaacgtgcctccaaatattcaaaaaatgaagcatgagataggagaattcccagttttcttcttcggaagcaaggattactattggactcaccaggcaagagtgttcccatatatggagggggatagaggttcccgatatcagggcgttaggggtattggcagggtttttaagaacgctctgcaggaggctgaggctcgattcagagaaataaagttgcagagagaggcgcgcgaaacccaggagagcgagagaaagcccccgccatacaagcacattaaggtaaataagccttacgggaaagtgcaaatctacactgcagatatctccgaaattccaaagtgtaattgcaagcccacagacgaaaacccctgcggcttcgacagcgaatgtctaaataggatgctgatgttcgaatgtcacccacaggtgtgccctgccggagagttttgtcagaaccagtgttttactaagaggcagtatcctgagaccaaaattattaagaccgacggaaaagggtggggactggttgccaagcgtgatatcagaaagggcgagttcgtaaacgaatatgtcggcgagctcatcgatgaagaagagtgtatggcaagaattaagcacgctcatgagaatgatataacccacttctatatgctcacaatcgataaggatcgcatcatcgacgccgggcccaaggggaactattctagattcatgaaccattcctgccagccaaactgtgagacgcttaagtggaccgtgaacggagacaccagagtcggcttgttcgctgtttgcgacatccccgcagggactgagcttacctttaattacaacttagattgtcttggaaatgagaagactgtttgcagatgtggtgcctctaactgtagcggctttctcggtgacagacctaaaacttccacaactctttcttcggaggaaaagggcaaaaagaccaagaagaagacccgaaggcggcgggcgaaaggcgaaggaaagagacagagcgaagacgaatgctttcgttgtggcgacggtggtcaactcgtactctgtgatcgaaaattctgcacaaaagcctatcatctctcctgcttgggactaggaaagagaccctttggtaagtgggaatgtccctggcaccattgtgacgtgtgcggaaagccatccacatcgttctgccacctctgccctaatagcttttgtaaagaacaccaagacggaacagcatttagctgcacaccggatgggcggagctactgttgcgagcacgacctgggggcggcgtccgtgaggtccacgaagacagagaaaccgcctcccgaacccggtaagcctaaaggtaagagaaggcgaagacggggatggcggcgggtcacagaggggaaatag

SEQ ID NO: 211537 - DNA, 4098 bp, synthetic construct
  misc_feature 1..4098: note = Description of Artificial Sequence: Synthetic coding sequence
  source 1..4098: mol_type = other DNA
atggagttcagcatcaagcagagccccctgagcgtgcagagcgtggtgaagtgcatcaagatgaagcaggctcctgagattttggggtcagccaacggaaagacgccaagctgcgaagtgaaccgggaatgtagcgttttcttgtccaaagctcaactctccagctcacttcaggagggggtgatgcagaagtttaacggtcacgacgctcttcctttcatcccagcagacaagttgaaggacctcacttcacgggtgttcaacggcgaacctggggctcacgacgccaagctgcgcttcgaaagccaggagatgaaaggaatcggcactccccctaataccacgcccatcaagaacggttctcctgagattaagctgaagataacaaagacatacatgaatggcaaaccactcttcgaatcatccatctgtggcgattctgcggccgacgtctcccaatccgaggaaaacggccagaagcctgagaataaggctagacgtaatcggaaacgaagcatcaagtacgattctctgctcgagcaagggttagtggaggccgcgctggtcagtaagatctctagccctagcgacaagaagataccagccaaaaaggaaagctgccccaacaccggcagagacaaagaccatctgttgaaatataatgtaggcgatctggtctggtccaaggtgtccgggtacccctggtggccctgcatggtcagcgcagatcctctgcttcattcctatacgaaacttaaagggcagaaaaagtctgcccggcaatatcatgtgcagttctttggggacgcccccgaaagagcctggatcttcgagaaatctcttgtggcattcgaaggggagggtcagtttgagaaattgtgccaggaatctgctaaacaggctcctaccaaagctgagaagatcaaactgttaaagcccatcagcggtaaactgcgcgcgcaatgggaaatggggatcgtccaggccgaggaggccgcttcaatgagcgtggaggagagaaaggccaaattcacttttctttatgtgggagatcagctgcatttgaacccacaagtcgcgaaggaggcggggattgccgccgagtcgctgggggagatggccgagagctccggcgtttcagaagaggccgctgagaatcccaaatccgtgcgagaggaatgtatccccatgaagcgccggaggcgggcaaaactttgttcttcagccgaaaccctggagagccaccccgatatcgggaagtcaactccccagaagactgcggaggctgaccccaggcgtggcgtcggctcaccacccggccgaaaaaaaaccactgttagcatgcctagaagccggaaaggggatgccgcttctcaattcctggttttctgtcaaaagcaccgcgatgaggttgtagccgagcaccccgacgcttccggggaggaaattgaggagctcctccgatctcagtggagcctcctcagcgagaaacaacgagccaggtataacaccaagttcgcactcgtggccccagtacaggccgaagaagattcaggaaatgtgaatggaaaaaagcggaaccacacaaaacggatacaagaccccactgaggatgcagaagctgaggatacaccacgaaaacgcctcaggacggataagcacagcctgagaaaacgggataccattacagataagactgctaggacctcctcttacaaagcaatggaggccgcaagttctttaaagtcccaggccgcaactaagaatttgtccgatgcatgtaaaccattgaagaaacgaaaccgggcctctactgcagcatcctctgcactgggattttccaagagttcctccccttctgctagcctgacagagaacgaagtgagtgatagcccaggcgatgaaccgagcgaaagcccttatgagtctgccgatgagacacaaactgaagtgtcggtatcttccaagaaatctgaaaggggcgtgactgccaagaaggagtacgtttgccagctttgtgaaaagcctggttccctcctgctttgtgaaggcccctgctgcggagcctttcatctggcttgtctggggttgtcccgtcggcctgagggacgcttcacatgtagcgaatgtgcaagcggcattcacagttgcttcgtctgcaaagagagcaaaacagatgtcaaacgctgcgtggtcactcaatgcggcaaattctatcatgaagcttgcgtcaaaaagtaccctctgaccgtctttgaaagccgtgggtttcgttgtcctctgcatagctgcgtatcatgtcatgcttccaacccttctaacccccggccctccaagggtaagatgatgcgctgcgtgcgctgtcctgtagcctaccattctggggacgcttgtctggccgcgggatgtagcgttatcgcctccaattcaatcatatgcacagctcattttactgcccgcaaggggaagcgccaccatgctcacgtgaatgtgtcctggtgttttgtttgctccaagggtggtagcctgttatgttgtgagagctgccccgcggcgtttcatcccgattgtttaaacatcgaaatgccggatgggagctggttttgcaacgactgtcgcgccggcaagaaactgcatttccaggatatcatttgggtgaaactcggcaactaccgctggtggcccgccgaagtctgccacccaaagaacgtgcctcccaacatacaaaagatgaagcacgaaataggggagtttcctgtcttcttctttggatcaaaggactattactggacacatcaggccagggtgttcccatacatggagggtgatcgcggatctagataccagggtgttagagggattggacgggtgtttaagaatgcccttcaggaggccgaggctcgatttagggaaattaagctgcagcgggaggcccgggaaactcaggagagcgagaggaagccacccccttataagcatattaaagtcaataagccttacgggaaggtgcaaatctacacagccgatatcagcgagataccgaaatgtaattgcaagcccactgatgaaaacccatgtggcttcgattccgagtgcttaaatcgtatgctcatgttcgagtgccatccacaggtctgtccagcgggtgaattctgccagaaccagtgcttcactaaaagacagtaccctgagaccaagatcattaagaccgatgggaaggggtggggcctggtagcgaagcgggatatcagaaagggcgaatttgtgaacgagtatgtgggtgaactgatcgacgaggaagaatgtatggcccgtatcaagcacgcacacgagaatgacataacacacttctacatgctgaccatagacaaagatagaatcatcgatgctggtcctaagggaaattacagtaggtttatgaatcactcctgccagcccaactgcgagactctgaagtggaccgtgaacggggatacgcgcgtgggcctctttgcagtttgcgacattccggccgggaccgaactcacgtttaattacaatctagactgcttagggaatgagaagactgtgtgtaggtgtggcgccagtaattgctccgggtttctcggcgatcggcctaaaacttccaccaccctgtctagtgaagagaaggggaaaaagacgaaaaaaaagacacggaggcgtcgggcaaaaggagagggaaagcggcagagcgaggacgagtgtttcaggtgtggggatggcggccagctcgtgctttgcgaccggaaattttgcacaaaagcgtaccatctatcttgtctcggcttgggtaaacggccctttggaaaatgggagtgtccatggcaccattgcgacgtgtgcgggaagccctccacatcattttgccacctctgccctaatagtttttgcaaggagcaccaggacggaacagctttttcgtgtaccccagatgggcggtcctactgttgtgagcatgatttaggtgccgcctccgtgcgcagtaccaagacagagaaaccccctccagagccgggcaagcctaagggcaaaagaagaaggcgacgcggctggcgaagggtgaccgagggtaagtag

SEQ ID NO: 211538 - DNA, 1944 bp, synthetic construct
  misc_feature 1..1944: note = Description of Artificial Sequence: Synthetic coding sequence
  source 1..1944: mol_type = other DNA
atggagttcagcatcaagcagagccccctgagcgtgcagagcgtggtgaaatgcattaagatgaaacaggctcctgaaatcctaggtagtgcgaacggcaagacaccctcctgtgaggtcaaccgcgagtgctcggtgttcctttctaaagcacagctgtcctctagtctccaggagggcgtcatgcagaagtttaacggtcacgatgcgctgccttttatacctgcagataagctgaaagacctgacttcccgcgtgttcaatggcgaaccaggcgcacacgacgccaaacttcgctttgaatcgcaagagatgaaagggattggcacccctccaaataccactcccatcaagaacgggagccccgagattaaactcaagattacgaagacttatatgaatggcaagcccctgtttgaatcaagtatttgcggtgacagtgctgccgatgtttctcaaagtgaagagaacggccaaaaacctgagaacaaagcccggcgtaataggaagaggagtatcaaatatgactccctgctcgaacagggccttgtggaggctgcgctcgtgagcaagatctccagtccgtctgacaaaaagatacctgcaaaaaaagagagttgcccgaatactggacgcgataaagatcatctgcttaagtacaacgtgggcgacctcgtatggtctaaggtgagcggctatccctggtggccctgtatggtatcggctgaccccctcttacattcctacaccaagctcaaaggtcagaagaagagcgccagacagtatcacgtccagttcttcggggacgcacccgaacgcgcgtggatcttcgagaagtctcttgtggccttcgagggcgaagggcaattcgaaaagttatgccaggagagcgctaaacaagctcccacaaaggcagaaaagatcaagctgctaaaacctatcagcgggaagcttagggcccagtgggagatggggattgtgcaggccgaggaagctgcaagcatgtccgtggaggaacgcaaagccaaattcaccttcctatatgttggagaccaattgcatctgaatccccaggtcgctaaggaagcaggcatcgctgctgaaagcctgggcgaaatggcagaatcctctggagtatccgaggaggctgcggagaatccgaagagtgtgcgggaggagtgcatcccaatgaagagacgacggcgcgcaaagctgtgtagttcggctgagaccctggagagtcatcccgacattggtaaatccaccccgcaaaagacagccgaagcggacccgcggcggggagtcgggtcaccacctggacgcaaaaaaactaccgtaagtatgccacggagccgcaagggcgacgcagcaagccagttcctagtgttctgccagaagcatcgagacgaggtcgtcgcagagcatccagacgcatctggagaagaaatcgaagagctgctgcgaagtcagtggtcactcctttcggaaaaacaaagggcccgctacaatacaaagtttgcgctagtagcgccggttcaagctgaggaggattctggcaacgtcaacggcaagaaaaggaatcacacaaaaaggatccaggatccgactgaggacgcagaggcagaagacactcctaggaagcgcctgcgcactgacaaacacagcctacggaaacgggataccattactgataaaacagccaggactagctcctataaggccatggaggctgctagctctctcaaaagccaagcggccacaaagaatctatccgatgcgtgcaaaccattgaaaaagcgcaatcgagcctcgacagcagcctctagcgctcttggcttctcaaagtcgtcatccccaagtgcgtccctgacggagaatgagttgctgtgggaacccaccccagttaagttggacttgaaccctgcagcactttactgtacgtag

SEQ ID NO: 211539 - DNA, 1890 bp, synthetic construct
  misc_feature 1..1890: note = Description of Artificial Sequence: Synthetic coding sequence
  source 1..1890: mol_type = other DNA
atggagttcagcatcaagcagagccccctgagcgtgcagagcgtggtgaagtgtatcaaaatgaagcaagcgcccgaaatcctaggcagtgccaacggcaagacaccatcctgtgaagtgaatcgcgagtgcagtgtatttttgagtaaggctcagctttcgagctcactgcaggagggagtcatgcaaaaatttaatgggcatgacgctctcccctttataccagcagacaagttaaaagaccttactagtagagtgtttaatggagaacctggggctcacgatgcaaagcttaggtttgagtcgcaagaaatgaagggcatcggaaccccaccaaacaccacccctatcaaaaatggtagtcccgagatcaagctgaaaatcactaaaacatatatgaacggcaagcctctgttcgagtcatccatttgtggagattctgcggccgacgttagccaatccgaggagaatggtcagaaacctgagaataaggctcgtaggaataggaaacgctccatcaagtacgattccctcctggagcaggggctcgtcgaggccgcccttgttagtaagatctccagcccctccgacaagaagataccagccaaaaaggagtcctgtcccaataccggacgggacaaagatcatttgctgaagtacaacgtcggtgacctggtctggagtaaagttagcggttacccctggtggccttgcatggtctctgccgatccgctgcttcactcttacacaaaactcaaaggacagaaaaaatccgctcggcagtaccacgttcagtttttcggcgacgcaccagagagagcctggattttcgagaaaagcctggtcgccttcgagggggaggggcagttcgagaagctgtgtcaggagtccgctaaacaagctccaacaaaggccgagaaaatcaagctcctgaaacctatctcgggtaaactgagggcccagtgggaaatgggcatcgtccaggccgaagaggccgccagcatgtctgttgaagaaaggaaagctaagttcacattcctgtatgttggggatcagctgcacctcaaccctcaagtcgccaaggaggctggcatcgcagccgaatctttgggagaaatggctgaatcatccggggtttctgaagaagcagccgagaacccaaaatctgtcagagaagagtgcatcccaatgaagcgccggagaagggctaagctgtgttccagtgccgaaactttggagtctcaccccgacattggaaaatctactccccaaaagacggctgaggctgatccccgccggggggtaggtagtcctcccggtcgcaaaaaaacgactgtgtcaatgccaagatctagaaagggcgacgccgctagccagtttctggttttttgtcaaaaacatcgggatgaggttgtggcagagcacccagatgcctctggagaagagatcgaggagctccttagatcccagtggtcacttctgtcggagaaacagcgggctcgctacaatactaaatttgctctggtcgcccccgtgcaagccgaggaggactcaggcaatgtcaacggaaagaagaggaatcacaccaagagaatacaggaccctaccgaagatgcggaggcagaggacactccccgcaagagactgcgcaccgacaaacattcgctcagaaaacgcgacactataacagacaaaactgcccggacctcttcctacaaagcaatggaggcagccagctccttgaaatctcaggctgcaaccaagaatttgtccgatgcgtgtaagcccctgaagaaacgaaacagggcaagtaccgccgcgtcgagcgccctgggcttttccaaatcttctagccctagcgcttcactgacggagaatgaggtcaagtag

SEQ ID NO: 211540 - DNA, 822 bp, synthetic construct
  misc_feature 1..822: note = Description of Artificial Sequence: Synthetic coding sequence
  source 1..822: mol_type = other DNA
atggagttcagcatcaagcagagccccctgagcgtgcagagcgtggtcaaatgcatcaaaatgaagcaggcaccggaaatcctcggtagcgctaacggcaagaccccctcctgcgaggtgaatagggaatgcagcgtttttctgagcaaagcccagctgtccagttctttgcaggagggagttatgcaaaagttcaacggacatgacgccctgcccttcatacctgccgacaagctcaaggatttaacaagcagagtatttaatggggagcccggcgctcacgatgccaaactgcgcttcgagtcgcaggaaatgaagggtataggtactccccccaacactactccaataaaaaatgggtctcccgaaatcaaactgaagattaccaagacttacatgaatgggaaacccctgttcgaatcctcaatctgcggagacagtgcagcggacgtttcccaaagtgaggagaatggccagaagccagagaataaggctcgacggaaccggaaacgaagcattaagtatgatagtctgcttgagcagggcctggtcgaagccgcgctggtgagcaagatctctagtccctctgataagaagatcccggccaaaaaggaaagttgccccaatacgggccgcgataaggatcatttattgaagtacaacgtgggtgacctggtgtggtcaaaggtctccggctatccctggtggccatgtatggtctccgccgatccgctcctgcactcctacacaaagctcaaagggatatttaaaagtaagaagttcgaacatctgaagacttcccagattgttctgaaagattag

SEQ ID NO: 211541 - DNA, 1944 bp, synthetic construct
  misc_feature 1..1944: note = Description of Artificial Sequence: Synthetic coding sequence
  source 1..1944: mol_type = other DNA
atggagttcagcatcaagcagagccccctgagcgtgcagagcgtggtcaaatgcatcaagatgaaacaggctccagaaatactggggagtgccaacggcaagaccccatcatgtgaagtgaatagagagtgtagtgtctttctcagtaaagcccagctgtctagtagcctccaagagggggtgatgcagaaattcaatgggcacgatgcgctgcccttcattcccgctgacaagctgaaggatcttactagtcgggttttcaatggcgaacccggtgcccacgacgcaaagctgcgattcgagagccaggaaatgaaaggtataggaactcccccaaataccacgcccataaagaatgggtcgcctgagattaagcttaaaatcaccaaaacttacatgaacgggaaaccactttttgagagttccatttgtggagattcagcagcggatgtgagtcaaagtgaagagaacggacagaaacccgagaataaagctcgcaggaatcgcaaacgctcaatcaagtatgactcacttctggaacaggggctggttgaggctgccctggtctctaagatcagttctccttcagataagaagattcctgccaagaaagagtcatgccctaatactgggagagataaagatcaccttctgaaatacaatgtcggtgatctggtgtggtccaaggtctctgggtatccttggtggccgtgcatggttagcgctgacccactccttcatagttacaccaagcttaagggccagaagaaatctgccaggcagtatcatgttcagttctttggagacgcacctgaacgcgcctggatctttgaaaagagcctagtggcctttgaaggcgaaggacagtttgaaaagctctgccaagagtctgccaaacaggcccccaccaaggcagaaaagatcaaactacttaaaccaatctcaggcaagttgcgcgctcaatgggagatggggattgtgcaggcggaggaggccgcgtcaatgtctgtagaggaacgcaaggctaaatttacttttttgtatgttggggatcaattgcacttaaatccacaggttgcgaaggaagctggcatcgctgcggaaagtctgggggagatggccgagtcctccggggtctcagaggaggctgccgagaatccgaaaagcgtgagggaagaatgtatcccgatgaagcgaagacggcgggctaaactttgctctagcgcagagactctcgaaagccatccagacatcgggaaatccaccccccagaaaaccgcggaggcggaccctaggaggggtgttggatccccaccggggagaaaaaagactaccgtgtccatgcctcgatcgcggaagggggacgccgcttcgcaatttttagttttctgccagaaacatcgtgatgaagttgtggccgagcacccagacgccagtggagaagagattgaagaattgctgcgctctcagtggagcctgctgagcgaaaagcaacgcgctaggtataataccaagtttgcccttgtggccccagtacaggcggaggaggatagcgggaatgtgaatggcaaaaagcgcaatcatacaaagaggatccaagatcccaccgaggacgccgaagccgaggatactcctaggaaacgactccggaccgacaagcattccctacggaaaagagacactattactgataaaacagctcggacttcctcttataaagccatggaggcagctagcagcttgaagagccaagccgcgacaaaaaacctgagtgatgcctgcaaaccacttaaaaaaaggaaccgcgctagcaccgcagcctcctcagcccttggctttagcaaaagcagcagtccctctgcttcccttactgaaaacgaattattgtgggaacctacaccagtaaagctcgacctcaatcctgctgctctctactgcacatag

SEQ ID NO: 211542 - DNA, 114 bp, synthetic construct
  misc_feature 1..114: note = Description of Artificial Sequence: Synthetic coding sequence
  source 1..114: mol_type = other DNA
atggagttcagcatcaagcagagccccctgagcgtgcagagcgtggtgaaatgtatcaaaatgaagcaggcacctgagattttgggaagtgcaaatggaaaaaccccatcgtag

SEQ ID NO: 211543 - DNA, 4098 bp, synthetic construct
  misc_feature 1..4098: note = Description of Artificial Sequence: Synthetic coding sequence
  source 1..4098: mol_type = other DNA
atggagttcagcatcaagcagagccccctgagcgtgcagagcgtggtgaagtgcataaaaatgaaacaggcaccggaaatcctgggcagtgccaatggcaagacgccctcatgtgaggtgaacagagaatgctccgttttcctctccaaggcacaattgagctcttcactgcaagaaggggttatgcagaagttcaatggccatgacgccctgccatttatccctgcagataaactgaaagacttgacttccagggtcttcaacggcgagccaggcgcacatgacgccaagctccgattcgagtctcaagaaatgaagggaattgggactcctcctaataccacccccatcaagaacggctccccagaaattaagctgaagataaccaagacttacatgaatggcaagcctcttttcgagtctagcatctgcggggattccgccgccgatgtgagtcagtccgaagaaaacggccaaaagcctgagaataaagctcggcgcaacaggaagagatctattaaatacgactccctgttggagcaaggtctggttgaggccgccttggtctctaagatatcatctccgagtgataagaagatcccggctaaaaaggagtcgtgtccaaatacaggtcgggacaaagatcacctactgaagtacaacgtgggcgatcttgtttggtcaaaagtcagcgggtacccatggtggccgtgcatggtgagcgccgatcccctcctccattcatatacaaagctcaagggtcagaaaaagtctgcccggcagtaccatgtgcaattcttcggagatgctcccgaaagagcttggatttttgagaagtcgttggtggccttcgaaggcgagggacagttcgaaaagctgtgtcaggagagtgcaaagcaggcccctacaaaggccgagaagatcaaactgttgaagcccatttctggcaaactgcgagcacagtgggaaatggggattgtccaggctgaagaagctgccagcatgtccgtggaagaaagaaaagccaagttcacatttctctatgtgggcgatcagcttcacctgaacccccaggtcgccaaagaagctggcatagctgcggagagcctgggcgaaatggccgagtccagtggcgtgtcagaagaggcagccgaaaaccctaaaagcgttcgtgaggagtgtatacccatgaaacgccgacgtcgcgctaagctgtgctcaagcgccgaaacgcttgagtcccatcctgatattggtaagtctacaccacagaagacagctgaggctgacccaagacgcggtgttggttctccccctggacgaaagaagactactgtgtcgatgcctcggagcagaaagggggacgcggctagccagtttctcgtgttctgccagaaacacagggatgaggtggtggccgagcatccagatgcctcaggcgaggaaatcgaagagcttttaaggtctcagtggagcctcttgtccgagaaacagagagctcgatacaacaccaaatttgccctggtggccccagtgcaggctgaggaggactccggtaacgtgaatggtaaaaagcgcaaccacaccaaaagaatccaagatccaacagaggacgcggaagctgaggatacacctaggaaacgcttgcggaccgataaacacagcctgcgcaagcgcgataccattactgataaaacggcacggacctcctcatataaagcaatggaagccgcatcaagcctgaaaagccaggcagcaaccaagaatttgtccgacgcttgtaagcccctaaaaaagcggaatagagcgagtactgccgcgtcttcagcgcttgggttcagtaagtcatcatctccgtcagcatccttaacagagaacgaggtctctgacagccccggagatgagcctagtgagtctccttacgagagcgcagatgagacccagacagaggtcagtgtttcctccaaaaaatcggagcggggtgtcacggctaagaaggagtatgtgtgtcaactctgtgagaaacccgggagcttgctcctttgcgaggggccatgctgtggcgcctttcacttggcatgtctggggctcagtagacgccccgaaggtagatttacttgctcggaatgtgcaagtggcatccacagctgcttcgtgtgcaaagagagtaaaactgatgttaagagatgtgttgtcactcagtgcggcaagttttaccatgaggcttgcgtcaaaaagtacccattgacagttttcgaatcccgcgggtttcggtgcccattgcactcatgtgtgagttgtcatgcgagtaatccaagtaatcctaggccttctaaggggaaaatgatgcgttgcgtcagatgccctgtcgcctatcattcaggagatgcctgtctggcggcagggtgtagcgtgatagcctccaattcaattatctgtacagcgcattttaccgccaggaagggaaaaaggcaccatgcccacgtaaatgtgagttggtgtttcgtgtgcagcaaaggggggtctctgctgtgctgcgaatcatgtcccgctgcctttcaccctgattgtttgaacattgaaatgccagacgggagttggttttgcaatgattgtcgtgctggtaaaaaactgcatttccaggacatcatatgggttaagcttggcaactataggtggtggcctgcagaagtatgccatcccaagaacgtgcccccgaacatccagaaaatgaaacatgaaataggcgaatttccggtcttcttttttgggtccaaggactattattggactcatcaagcccgggtctttccgtacatggagggggatcgtggttccaggtatcagggggtccgcgggatcggccgggtcttcaaaaacgctctgcaagaggccgaggcccgctttcgggagataaagctgcagcgggaagcaagagagacacaggagtccgaacgtaaacctcccccatataaacacataaaggttaataaaccttacggcaaagtccaaatttacacagcggacatctcagagatacccaaatgtaactgcaagccaaccgatgagaacccatgcggattcgacagcgagtgtcttaacagaatgttgatgttcgagtgccacccacaggtctgtcccgccggcgaattttgccagaatcaatgttttactaagagacaataccctgagactaaaatcattaaaactgacggtaagggctggggcttggttgcaaagcgcgatattcgtaaaggagagttcgtgaatgaatatgttggcgaattaatagacgaggaggagtgcatggcaagaattaagcacgcccatgagaacgacattacccatttctacatgttgaccatcgacaaggacagaatcatagatgcaggcccaaaaggtaactattccaggtttatgaatcattcatgccagcccaactgcgaaaccctgaaatggactgtcaatggggacactagagtcgggctgtttgctgtgtgcgacattccagctggcactgagctcacttttaactacaatctcgactgcctcggaaatgaaaaaactgtctgtagatgcggcgcatctaactgttccggctttcttggtgaccggccaaagacgagcaccactctcagctccgaagagaaaggtaaaaagaccaaaaagaaaactagacggcgcagggctaagggcgagggtaagcggcagtctgaggacgagtgctttcgctgtggtgacggcggccagctcgtactttgtgaccgcaagttctgtactaaggcttaccacctgtcctgtctaggcttaggcaagaggccatttgggaaatgggaatgtccttggcaccattgcgacgtctgcggaaagccttccacaagcttctgtcacctctgcccaaatagtttctgtaaagaacatcaagacgggactgcctttagttgtacccccgacggtcgcagttactgctgtgagcacgatctgggcgcagcatcagtgcgatcaactaagacagaaaagcccccccctgaaccaggcaagcctaaggggaaacgccggagacgcagaggctggcgacgcgtgactgaaggcaagtag

SEQ ID NO: 211544 - DNA, 1179 bp, synthetic construct
  misc_feature 1..1179: note = Description of Artificial Sequence: Synthetic coding sequence
  source 1..1179: mol_type = other DNA
atggagttcagcatcaagcagagccccctgagcgtgcagagcgtggtcaagtgcattaagatgaagcaggcaccggagatcctgggcagcgctaacggtaagaccccttcttgcgaggtgaatcgtgaatgctctgtgttcttgtcaaaagcacagctatccagcagtctgcaggaaggggtaatgcagaagttcaatgggcacgacgccctacctttcattcccgctgataaattgaaggatcttacttcacgcgtattcaacggagagcccggggctcatgacgcaaagctgcgcttcgagtctcaagaaatgaagggcatcggaaccccaccgaatacaactcccatcaaaaatggttcacctgagatcaagttaaagatcaccaaaacctacatgaacgggaagcctctgttcgaatcctctatctgtggcgattccgccgctgatgtatcacagtccgaagaaaatggccagaagcctgaaaacaaggcccggcgaaataggaaaagaagcatcaaatatgatagcctgttggaacaagggttagtggaagctgccctcgtgagcaaaatctccagccctagcgataagaagatcccggccaagaaagagtcatgtcctaatactggtcgcgataaggaccacctcctcaaatataacgtcggtgatcttgtgtggagcaaggtctcaggttacccttggtggccatgcatggtctcggctgatccattgctgcactcctatacaaaactcaaaggccagaagaagtctgctaggcagtatcacgtacagttttttggcgatgcccctgaaagggcctggattttcgaaaagtctctggttgccttcgagggtgagggccagttcgagaaactctgccaggagagtgccaagcaagctcccacaaaggccgaaaagataaaactcctgaagccgatcagtggaaaactgagagctcaatgggagatggggatcgtccaggccgaagaggcagcgtcaatgtcagtggaggaacgtaaggctaagttcacttttctgtatgtcggcgaccagcttcatctcaatccacaagtggccaaggaggcaggcattgcagctgagagcctcggagaaatggccgagtcaagtggggtctccgaagaggcagcagagaaccctaagagcgtccgggagtag

SEQ ID NO: 211545 - DNA, 1890 bp, synthetic construct
  misc_feature 1..1890: note = Description of Artificial Sequence: Synthetic coding sequence
  source 1..1890: mol_type = other DNA
atggagttcagcatcaagcagagccccctgagcgtgcagagcgtggtcaagtgtataaagatgaagcaggcccctgagattctgggaagtgctaacggcaaaacaccgagctgcgaagtgaacagagagtgttccgtcttccttagtaaagcccagctgtcaagctctttacaggagggcgtgatgcagaaatttaatggacacgacgcgttgccctttattcccgccgataaactcaaagatctcacctcccgggtcttcaatggtgagcctggagcgcacgatgccaagctgagattcgagtcgcaggagatgaaaggaattggaacacctcccaacacaactccaatcaagaatgggtcacccgagatcaagctgaagatcactaagacctacatgaacggcaagcccttgttcgaatcttctatctgcggcgattcggccgctgacgtgtcccagtctgaagagaacggccagaagcccgagaataaggcccgccgaaaccgcaagcgctcaatcaagtacgattctcttctagaacaaggtctggtggaagcagctctcgtgtctaaaatctcaagcccatcagacaagaagatcccggcgaaaaaagaatcatgccctaacaccggccgggacaaagatcacctgctgaagtacaatgtcggtgatcttgtctggagcaaagtctccgggtatccgtggtggccatgtatggtttccgctgacccccttttacacagttacacgaaactgaagggccagaaaaaatctgcaagacagtaccacgtgcagttcttcggggacgcgccggagagggcatggattttcgagaaatcactggtggctttcgagggtgaaggacagtttgagaagttgtgtcaagaaagcgcaaagcaggcacctaccaaggcggagaaaatcaagctcttaaaacctatcagcggaaagttacgcgcccaatgggagatgggcatagtacaagccgaagaggccgctagtatgagtgtcgaagagagaaaggctaagtttacattcctgtatgttggggatcaactgcatctgaatcctcaggtggctaaggaggcagggatcgccgcagaaagtctgggcgagatggcagagagctccggtgtgagcgaggaggcggccgagaacccaaaatcggtccgggaggagtgcattcctatgaagaggagacggagagccaagttgtgcagcagtgcggagacactggagtcccaccccgacatcggaaagagcaccccccagaagacagcagaagctgatcctcgaagaggtgtgggctcacctcccggtagaaaaaagacaactgtgtccatgcctcgaagcagaaagggagacgccgcgtcacagtttttggtgttctgccaaaaacatcgggatgaggtagtcgcggagcatcccgatgcctcaggcgaggagattgaggagctcctccgctcacaatggagcctgctgtctgagaagcagcgagcccgctacaacaccaagtttgcccttgtggcccctgttcaggctgaggaggattcaggaaacgtcaatggaaaaaagcggaaccatacaaaacgcatccaggaccctactgaggacgctgaggcagaagacaccccgcggaagcggctgcgaactgacaaacatagcctgcgaaaacgcgacacgataaccgataagacagctcgtacctcctcttacaaagcaatggaggccgcaagctcactcaagtcccaggcggctacaaagaatctatctgacgcatgcaaacccctgaaaaaacgcaatcgggcatctactgcggcctcctccgctctaggattctctaaatcatcttcgcctagcgcctctctcacagaaaatgaggttaaatag

SEQ ID NO: 211546 - DNA, 600 bp, synthetic construct
  misc_feature 1..600: note = Description of Artificial Sequence: Synthetic coding sequence
  source 1..600: mol_type = other DNA
atggagttcagcatcaagcagagccccctgagcgtgcagagcgtggtgaaatgtatcaagatgaaacaagcgcccgaaattctcgggtctgccaatgggaagacccctagttgcgaggtgaatcgggaatgtagcgtatttctctctaaggcccaactgagtagcagtcttcaggagggggtgatgcaaaagtttaatggccacgatgccctgcctttcatacctgccgataagctcaaggacctgacatcacgggtgtttaacggagagcctggggcacatgatgcaaagctgcggtttgagagccaggaaatgaaaggcatcggcacgccgcctaacaccacccccattaagaacggttctccagagatcaaattgaagatcacgaaaacatatatgaacggcaagccacttttcgaaagtagcatctgcggagactccgccgctgacgtctcccagtccgaggaaaacggccagaagcccgagaacaaagcaaggagaaatcgaaagcgcagcataaaatacgacagtctgctggagcagggacttgtggaggcagcacttgtgagcaagatcagttctccctccgataagaaatag

SEQ ID NO: 211547 - DNA, 1938 bp, synthetic construct
  misc_feature 1..1938: note = Description of Artificial Sequence: Synthetic coding sequence
  source 1..1938: mol_type = other DNA
atggacttcagcttcagcttcatgcagggcatcatgggcaacaccatacagcagccccctcagctgatagactctgcaaacatccgccaggaggatgcatttgacaataactccgacattgcggaggacggcggccagacaccctacgaggctaccctacaacagggttttcagtaccccgctactaccgaagacctgccaccgcttaccaacggttacccttccagcatctcagtctatgaaacacagacaaagtaccagtcctacaaccagtacccaaacgggagtgctaacgggtttggagcggtgaggaatttctcacccaccgactattatcattccgagattcctaatacccggccacatgagattttagagaagcctagcccccctcagcccccccctcccccatcggttccccaaaccgtcatacctaagaagacagggtcacctgagatcaaactgaaaattacaaagacaatacagaatgggagagagctgtttgagtcctcgctttgtggagacctacttaatgaagtgcaagcatcagagcacactaagtctaagcacgagagtagaaaggagaagagaaagaagagtaacaaacacgattcttcacggtcagaggaaaggaagagtcacaagatcccaaagctggaacccgaagaacagaaccggcctaatgaacgagtggatacagtttccgagaagccccgggaagagcctgtcctgaaagaggaggcacccgtacagccgatcctttccagtgtgccaaccacagaagtcagcaccggtgtcaaattccaggtgggggatctcgtgtggtcaaaggtggggacgtacccttggtggccatgtatggtctccagcgacccgcaactcgaggttcatacaaagatcaatacaaggggggcccgcgaataccacgtgcaattcttcagcaaccagccggagagagcttgggtgcatgagaagcgtgtgcgagaatacaaaggacacaagcagtacgaagaactgctggctgaggctacaaagcaggccagcaaccactcggagaagcagaagattcggaagccgagaccacaaagagagcgcgctcagtgggacatcggcatcgcacacgccgagaaggccttaaaaatgactcgggaggaacgcattgaacagtatacattcatctacattgataaacagcccgaagaggccctgagtcaggctaagaaatcagtagccagcaagacggaagtgaagaaaacccgaagaccccggtctgttctgaacacacagccggaacagacaaacgccggagaagtggcctcttccttgagttctactgagattagacgtcacagccagagacgccacacaagcgccgaggaggaagagccgccccctgtcaagattgcttggaaaaccgcagcagcccggaaaagccttccagcttcgattactatgcataagggctccctggacttgcagaaatgcaacatgtcgccagtagtgaaaattgaacaagttttcgcgctccagaacgctaccggagacggtaagttcattgaccagtttgtgtactcaacaaagggcatcggcaacaagactgaaattagtgttcggggccaggaccggctgattatatcaactccaaaccagagaaacgaaaagcctactcaatcggtttctagcccagaggcaaccagtggtagcacagggtccgttgaaaagaagcagcaacggcggtccattcgaacgagaagcgaatctgaaaagtcaactgaggtggtgcctaaaaaaaaaatcaaaaaggaacaagttgaaacagtaccccaagccaccgttaagaccggcctccaaaagggttctgcagataggggcgtccagggatccgtccgcttctccgacagctccgtctccgcagctattgaagaaacagttgactag

SEQ ID NO: 211548 - DNA, 4314 bp, synthetic construct
  misc_feature 1..4314: note = Description of Artificial Sequence: Synthetic coding sequence
  source 1..4314: mol_type = other DNA
atggacttcagcttcagcttcatgcagggcatcatgggcaacaccattcagcagcctcctcagctcattgactccgccaatattaggcaggaggacgcctttgacaataactcagatatagcagaagatgggggtcagacaccctatgaagcaacattgcaacagggatttcagtatccagctaccaccgaagacctccctccattgactaacgggtatccctcctccattagtgtgtacgaaactcagactaagtaccagtcttacaaccagtatcctaatggaagcgctaatggtttcggggccgtccggaatttttctcccactgactactaccacagtgaaatacccaatacacggccccacgagattctcgaaaagccttcccccccccagccccccccccctcccagcgtcccccagacagtcatcccaaaaaagacagggtcgcccgagattaagttgaaaatcacaaaaacgatccagaacggccgcgagttgtttgagtcaagtttgtgtggagatctgcttaatgaggtgcaggcctcagagcacacaaaaagtaagcacgagagccgcaaggaaaaacggaagaaaagcaacaagcacgacagttcccggtccgaggaaaggaagtcccataaaatcccgaaactcgagcctgaggagcagaaccggcccaacgagagggtcgatactgtgtccgagaaaccacgagaggaacccgtcctcaaggaagaggctcctgtacagcccattttgtcttccgtcccaactacagaggtgagcaccggcgtcaaattccaggtgggggatttggtgtggtccaaggttggaacctacccttggtggccatgtatggtatccagtgacccacagctcgaggtccatacaaagatcaatacacggggagcacgggaataccacgttcaatttttttctaatcaacctgagagagcttgggttcatgagaaacgcgtgagggagtataaaggacataagcagtacgaagagttgctggctgaagctacgaaacaagccagcaaccacagcgaaaagcaaaaaattaggaagccacggcctcagcgggagagggctcaatgggatatcggaattgcccatgcagagaaggctttaaaaatgacccgggaggagcggattgaacaatacaccttcatctacatcgacaaacagcctgaagaggctctgtcccaagccaagaagagcgtggcctccaaaaccgaagtcaaaaaaacccggaggccccggtccgttcttaatactcaacctgagcagacaaacgcaggagaagtagcgtcgagtctctcctccaccgagattcggcgacattcacaaagacggcacacaagtgccgaagaagaggaaccacctccggtaaagatcgcctggaagaccgccgctgctcggaaatccctaccagccagtattacgatgcacaagggttctctcgacctgcagaagtgtaacatgtctcctgtggtcaaaattgagcaggtctttgcactgcagaatgccacaggggacggcaaatttatcgatcagtttgtgtatagcactaaaggcattggcaacaaaacagaaattagcgtgcggggccaggacaggctgatcattagcacaccaaaccagcggaatgaaaagccgactcagtcggtgagctcacccgaagccacaagcggcagcacaggcagcgttgagaaaaaacagcagcggcgatccatcagaacaagatctgaaagtgaaaagagcacagaggtggtgccgaaaaagaaaattaagaaagagcaggtcgagacggttcctcaggccaccgtgaagaccggcctgcagaagggggcttctgaaattagcgatagctgcaaaccactgaagaagaggtcccgggcctcaaccgacgtggaaatgacgagttcggcatatcgcgataccagcgatagcgactcacgaggcctgtccgatttgcaggttggctttggaaaacaggtggatagtccctctgccacagctgatgctgatgtgtccgacgtgcagtctatggacagcagtttgtctagacggggtaccggaatgtctaagaaggataccgtatgtcagatttgtgagtcaagcggagatagcctcataccgtgtgagggcgagtgttgcaagcatttccacctggagtgcttagggctcgcctccttgccagattcgaagttcatctgtatggaatgtaagaccgggcagcacccatgtttcagttgtaaggtgtcgggaaaagatgttaagagatgtagtgtgggggcttgcggaaagttttaccacgaggcatgcgtgcgtaaatttcctaccgcaatattcgagtctaaaggattccgctgcccacaacactgttgttctgcgtgcagcatggagaaggatatccataaagcttccaaagggagaatgatgagatgtttaagatgtcccgttgcctatcacagcggggacgcgtgtatcgctgccggatccatgctggtgtcgagctacatcttgatctgttctaaccactccaagcgttcctccaatagctctgcggttaacgtcggattctgcttcgtgtgtgctcggggccttattgttcaggatcattctgatccaatgttctcttcatacgcctataaaagccactacctactcaatgagtccaatcgagctgaacttatgaaacttcctatgattcctagctcgtccgcttccaaaaagaagtgtgagaagggagggcgtctactttgctgtgaatcctgccctgcgagcttccacccggagtgcctgagcatcgaaatgccagaaggctgttggaattgcaacgattgcaaagcaggtaaaaagctccactacaaacaaattgtctgggtcaagctgggaaactatcgatggtggcccgccgagatttgcaaccctagatccgtgccactgaatatccaggggctgaagcatgatttgggagacttcccagtctttttcttcggaagtcatgactactattgggttcatcaggggagagtatttccctacgtggagggtgacaagtcttttgccgaggggcaaacaagcataaacaaaactttcaagaaggcactcgaggaagccgctaaacgctttcaggagttgaaggcacagcgtgagagcaaggaggcactcgagattgagaagaatagccgcaaacctcctccttacaagcatatcaaggccaataaagtcataggaaaagtacagattcaggtggctgatctctcagaaatcccaaggtgcaactgtaaaccagccgacgaaaatccttgcggcctcgaatcagaatgcctgaatcgtatgttgcaatacgaatgccaccctcaggtttgtccagctggtgacagatgtcagaaccagtgttttaccaagcggttatacccagatgcggaaattattaaaacagagcggaggggttgggggctgcggacgaaaagaagcataaaaaagggggaattcgtgaacgagtatgtgggagagctaatcgatgaggaagaatgtcgcttaagaattaaacgggcccacgaaaacagtgtgacaaatttctacatgttaaccgttacaaaagatcgcattatcgacgccggtccaaagggcaactactccagattcatgaaccactcctgcaatcccaactgtgagacgcaaaagtggaccgtcaatggcgatgtacgtgtgggcctgttcgccctctgcgacatacccgcaggcatggagctgacgttcaattacaaccttgattgcctgggtaatggacgcacggagtgtcattgcggagccgacaattgctccggtttcctgggagttcggcccaaaagcgcttgcgcatccaccaacgaagagaaggcaaaaaacgctaagctgaaacaaaagcggcgcaaaataaagacggaacctaaacagatgcatgaggactattgtttccagtgcggtgatgggggagagttggtcatgtgtgataaaaaagattgtccaaaagcgtatcaccttctttgcctaaatttgacacaacccccttacggcaaatgggagtgtccatggcatcagtgcgatgagtgctcaagtgctgccgtgtctttctgcgagttttgcccacatagcttctgcaaggatcacgagaaaggtgcgctggtacccagtgccctagagggtaggctgtgctgtagcgaacacgaccccatggctcccgtgagccctgagtactggtccaagatcaagtgcaaatgggagagccaggaccatggagaagaggtgaaggagtag

SEQ ID NO: 211549 - DNA, 4167 bp, synthetic construct
  misc_feature 1..4167: note = Description of Artificial Sequence: Synthetic coding sequence
  source 1..4167: mol_type = other DNA
atggacttcagcttcagcttcatgcagggcatcatgggcaacaccattcagcagccgccgcagttaatagactcagccaatattaggcaggaagatgcttttgataacaactcggacatagcggaagatgggggccaaactccctacgaagccacactgcagcagggtttccagtatcctgctaccactgaggacctacccccactgactaacggatatccgagctctatttctgtttatgagacccagaccaagtaccagtcatacaaccagtaccccaatggcagcgccaacgggttcggcgccgtgcgaaattttagccccaccgactactatcattcagagattccaaatacccgtcctcatgagattctggagaaacctagtccccctcagccacctccgcctcctagcgtgcctcaaacagtaattcctaaaaagaccggttcacctgagattaagctcaaaatcactaaaactattcaaaatgggcgcgaactcttcgagagctcactgtgcggtgacctgctgaacgaagtgcaggcttcagaacacaccaaaagcaagcacgaaagccgaaaagaaaagaggaaaaaatcaaacaagcacgatagtagtaggtcggaagagcgaaaaagccataagatccctaaattagagccagaagagcaaaaccgcccaaatgagcgggtggatacagtgagcgagaagcccagggaggagccagtacttaaggaagaggcacccgtgcaacccatattgtcctctgttccaacaacagaagtttctaccggcgtgaaattccaagtgggcgatctggtctggtccaaagttggtacgtatccctggtggccttgcatggttagcagcgacccacaactggaggtccacaccaagattaatacccggggggctagagagtatcacgtccagttctttagtaaccagccagaacgtgcttgggttcacgaaaagcgcgttcgggagtacaaaggccataaacaatatgaggaactgctcgctgaggctactaagcaggcaagcaaccacagcgagaagcagaaaataagaaagccccgcccacagcgggagagggcccaatgggacatcggaattgctcatgcggagaaggccctgaaaatgactcgcgaagagcgcatcgagcaatatacattcatctacattgataaacaaccagaggaagctctgagccaggccaaaaagtctgttgcgtcgaagaccgaggtgaaaaaaacccgccgaccacgaagcgtgctgaatacccagcccgagcagaccaatgccggtgaggtcgccagcagcctgtcatctacggagatcagacgccattctcagcgtcgccatacaagcgccgaagaagaagagcccccgcctgtgaagattgcctggaaaacagctgcagcaaggaaaagcctgcccgcgagcatcaccatgcacaagggaagtttagatctgcagaagtgcaatatgagccccgtggtgaaaatagagcaggtcttcgccctgcaaaatgctactggcgatggaaagttcatcgatcagttcgtgtatagtacaaagggcatcggaaacaagactgagatctcagtgcggggccaagatagactcattatctccacaccgaatcaacgtaacgaaaaacccacccagagtgttagtagtcccgaggctacaagtggcagcactggtagcgtggaaaagaaacagcagaggcgctcaattaggactaggtctgagtccgagaagtcgacggaggttgtaccgaagaaaaagataaagaaagagcaggttgagactgtgcctcaggctaccgtgaaaacagggcttcagaaaggcgcttcagagatctcagacagctgtaaacctctgaagaagcgtagcagggcctctaccgacgtcgaaatgacaagctcagcctaccgcgacacttccgattccgacagccggggcctctctgatctacaggtgggttttgggaagcaggtcgactctccaagtgctactgcagacgccgatgtgtctgacgtgcagagcatggacagctcactctcacgtagggggactggtatgtctaaaaaagatacggtctgtcagatttgtgagagtagtggggatagcctcattccttgcgagggagagtgctgcaaacacttccatttggaatgtcttggactagcctccctgcctgattcaaaattcatttgtatggagtgtaaaactggccaacacccgtgttttagctgtaaggttagcgggaaggacgttaaacgctgctcggtgggcgcttgcggcaaattctaccacgaggcatgtgtccggaagtttcctacagctattttcgaaagtaaggggtttagatgtccacagcactgttgctctgcttgtagcatggaaaaagacatccacaaggccagcaagggtcgtatgatgcgctgcctgcgctgtcctgtggcataccactctggagacgcatgcatcgccgccggctccatgctggtgagctcatatatcctcatttgtagcaaccatagcaaacgatcaagtaattcttcagccgtcaacgttggtttctgtttcgtgtgcgcaaggggcggtagacttctatgctgcgagagttgtcctgcatctttccacccagaatgtctctctattgaaatgcccgaagggtgttggaactgcaacgactgtaaggccggtaagaaactgcactataaacagatcgtgtgggtgaaacttggcaattaccggtggtggcccgctgaaatatgtaaccccaggtcagtcccactcaacatacagggcttgaagcacgatctgggtgactttccagtctttttcttcgggtctcacgattactattgggtgcaccagggccgggtgttcccttacgtcgaaggtgacaaaagctttgcagagggtcagacgtccattaacaagaccttcaagaaagctcttgaagaggcggctaaacgtttccaggaactcaaagctcaacgtgagtcgaaagaagccctggagatcgaaaagaattccaggaagcctccaccatataagcatatcaaagctaataaggtgatcggcaaggttcagatacaggttgccgatctgtccgagattcctaggtgcaactgtaagccagcagacgagaacccatgtggcctggaaagcgagtgtctgaacagaatgttacagtatgagtgccatccacaagtatgtcccgccggagatcgctgccagaaccagtgttttactaagagactctacccggatgccgagatcatcaagaccgagaggagaggttggggtctgcgaaccaagcgatcaattaaaaaaggtgagttcgtcaacgaatacgtgggagagctgatcgatgaagaagagtgtcgcctgcgcataaaacgagctcacgaaaactccgtaacgaacttttacatgttaacggtcaccaaagaccgcatcatcgatgccgggcctaaggggaattatagccggtttatgaaccactcttgcaatccaaactgtgagacacaaaaatggacagtaaatggcgatgtgcgcgtaggactcttcgcactgtgcgatatcccagctggcatggaactgaccttcaattacaacctggactgcttaggcaacgggaggacagaatgtcactgcggggccgataattgctccggctttttgggggtccggcctaaaagtgcttgtgcaagtaccaacgaggagaaagcaaagaatgctaaattaaagcagaagcggaggaaaatcaagacggaacctaagcagatgcacgaagactactgctttcagtgcggggacggcggcgagctggtgatgtgcgataagaaagattgccctaaagcataccatctgttgtgcttgaacctgacacagccaccctacgggaagtgggagtgcccttggcaccagtgcgacgagtgttcgtccgccgccgtctcattctgtgaattttgtccacatagcttctgcaaggatcacgagaaaggcgcactcgtgccaagtgcgctggaaggaaggctgtgctgcagtgagcacgatcctatggcccccgtctcacccgagtattggtcaaaaattaaatgtaaatgggaatcccaggatcatggtgaagaagtgaaggagtag

SEQ ID NO: 211550 - DNA, 4125 bp, synthetic construct
  misc_feature 1..4125: note = Description of Artificial Sequence: Synthetic coding sequence
  source 1..4125: mol_type = other DNA
atggacttcagcttcagcttcatgcagggcatcatgggcaacaccatacaacagccaccacagctcatcgactccgccaatattaggcaggaggacgcgttcgacaacaacagtgatatcgccgaagatggaggtcagaccccgtatgaagctactctgcagcagggctttcagtaccccgcaacaaccgaggatttgccacctcttccccctcccccgccatccgtcccgcagaccgttatccctaagaagacgggcagccccgagatcaaattgaaaatcacaaagaccattcagaatggaagggaacttttcgaaagctcactgtgcggagatctgctgaatgaggttcaagcctccgaacacactaagagcaagcatgagagcagaaaggagaaacggaaaaagagcaataagcatgactcgagcagatctgaggagcggaagagtcataaaattccaaaactggagccagaagagcagaacagaccaaatgagagggttgatactgtgtcggagaagcctcgggaagaacctgtcctgaaggaagaagctccggtccaaccaatcctgtctagcgtgccgactactgaagtaagcaccggtgtgaagtttcaagtgggagatctcgtgtggtccaaggtcgggacgtacccatggtggccgtgcatggtgtcttccgacccccagcttgaggtccacacaaagattaacaccagaggggcccgagaatatcatgtgcagttcttttccaatcagcccgagagagcttgggtgcacgaaaaacgcgtgcgggagtataaggggcacaagcagtacgaagagctgctcgccgaagccactaaacaggcctccaaccactcagaaaagcagaaaatcaggaaaccgaggcctcagcgcgagagagcccagtgggatattgggattgcacatgctgagaaggccttgaagatgacgcgcgaggagagaattgaacagtatactttcatttatatcgacaagcagcccgaagaagctctcagtcaggcgaagaaatcagtggcttctaagacagaagtaaaaaagacccgccgacctcggagtgtcctgaacacccagcccgagcagacgaacgcgggggaagttgcgagctctttgtcttcaaccgagattaggcgccatagccagagaaggcacaccagcgcagaggaagaagaacctcctcccgtgaaaatagcctggaagacagctgcagctagaaagagcctacctgcttcgataacgatgcataaagggtcactggatctgcagaagtgtaatatgagtccagtggtcaagattgaacaggtctttgccttgcaaaacgccactggagatgggaaatttattgaccagttcgtttatagtacgaagggcatcgggaataaaacagaaatctccgtgcgcggacaggatagacttattatttccactccgaaccagagaaacgagaagccaacacagtcagtaagcagcccggaagcaacctcaggcagcacaggctcggtcgaaaagaagcagcaaagacggagcattcggacccgctctgaaagtgaaaaatccaccgaggtggttccaaaaaagaagattaagaaagagcaggtggaaacagtcccccaggctacagttaagaccggcttgcagaaaggggcatccgaaatttctgattcctgcaaaccactaaaaaaaaggtcgcgagcctcgacagacgtagagatgaccagctccgcttatagggatacctccgacagcgattccagggggctgtccgatttacaagtagggttcggtaaacaagtggattctcctagtgccaccgccgacgctgatgtctcggacgttcaaagcatggattccagcctgtcgaggcgcgggactggtatgtccaagaaagacacagtgtgtcagatatgcgagagttctggagatagcctgataccatgtgaaggagagtgttgcaaacactttcacctggagtgcctgggcctggcaagtcttcccgacagcaagttcatatgcatggaatgcaaaacaggacagcacccatgttttagttgtaaggtgagcgggaaagacgttaagcgctgcagtgtgggggcctgtggcaagttctaccatgaagcctgtgtccgaaagttccccacagcgattttcgaatccaaagggttcaggtgtccccagcattgctgctctgcctgctccatggaaaaggatattcataaggcttccaagggccgcatgatgcggtgtcttcggtgcccggtcgcataccactcaggagatgcttgtatcgctgccggtagcatgctcgtgtcatcctacatacttatttgtagcaatcatagtaagagaagtagtaattcatctgccgtcaacgttggattctgcttcgtgtgcgcgcgagggctgattgtccaggaccactctgatccgatgtttagctcgtatgcttataaatcacattacttactcaacgagagcaatcgggctgaacttatgaagttgcccatgatccctagctcttcggccagtaagaagaagtgtgagaaaggcggcaggctgctctgctgcgagtcatgccccgcctccttccaccctgagtgtctgtccatcgagatgcccgaaggatgttggaactgtaatgattgtaaagctggcaaaaaactccactataagcagatcgtgtgggttaagcttggcaactaccgttggtggccagcagagatctgtaacccaaggagcgtgcccttgaatattcagggcctcaagcatgacttaggcgacttccctgtgttctttttcggcagccacgactactattgggtccaccaaggtcgggtgttcccctacgtagaaggcgataaatcctttgctgaggggcagaccagtataaataagaccttcaaaaaagcccttgaggaagcagccaagcgctttcaggagctcaaggctcagcgcgaatctaaagaggccctggagattgaaaagaattcccgaaaacctccgccttataagcacatcaaagctaataaagtgatcggtaaggttcagattcaggtggccgatctgagcgagatacctaggtgtaattgtaaaccagccgacgagaacccgtgcggcttggagagtgaatgtttgaaccgtatgttgcaatacgagtgccatcctcaggtgtgtcccgcaggcgatcgttgtcagaatcaatgctttacgaagcggctgtatcccgatgcggagattatcaagaccgagcggcgggggtggggcctgcgcacaaagcgatctatcaagaaaggtgaattcgtcaatgaatatgtcggcgagcttattgacgaggaagaatgccggctgagaatcaagcgggctcacgagaatagcgtgacgaatttctacatgctcactgtgacaaaagacagaatcatcgatgctggtcctaaaggtaattacagccggtttatgaaccactcatgcaatccaaactgtgagacacaaaagtggacagtgaacggagatgtcagagtcggcctgtttgccctttgcgatatcccagcaggtatggagctgactttcaactataacctggactgtttaggcaatggtcgcacagaatgtcactgcggcgctgataactgtagtggctttctgggggtgagacccaagtcagcctgcgccagcacaaatgaggaaaaagctaagaatgctaaactgaagcaaaaacgccgaaaaattaagacagaaccgaagcaaatgcatgaggattattgctttcagtgcggtgatggcggggagctggtcatgtgtgataagaaggattgtccaaaggcctaccatctgctgtgcttaaacctgactcaaccaccctatggaaagtgggagtgcccctggcaccaatgtgatgagtgttcctcagcagcggtgtccttctgtgaattttgccctcattccttctgtaaggaccatgaaaaaggggcccttgtgccgtcagcactcgaggggaggctttgctgctctgagcatgatcccatggcccctgtgtcaccagagtattggtctaagattaaatgtaagtgggagtcccaggaccatggggaggaagtgaaggagtag

SEQ ID NO: 211551 - DNA, 4281 bp, synthetic construct
  misc_feature 1..4281: note = Description of Artificial Sequence: Synthetic coding sequence
  source 1..4281: mol_type = other DNA
atggacttcagcttcagcttcatgcagggcatcatgggcaacaccatccaacagcccccacagctcattgattctgctaacataagacaggaagatgccttcgataataacagcgatatcgctgaggacgggggtcagacaccctacgaggctacactgcagcagggctttcaataccccgcaacaacagaagatctgccacccctcaccaacggctatcctagcagcatcagtgtgtacgagactcagaccaagtatcagtcatataatcagtatccaaatggcagcgctaacggtttcggtgccgtgaggaacttcagtcccactgactattatcacagtgagatccccaatacacggccccatgaaatcctcgaaaaaccttcccccccccagccgcccccgccaccaagcgtcccacagaccgtgatccccaaaaagaccggctcgcctgagattaagctaaagattaccaaaactatacaaaatggccgagagctattcgaaagcagcctttgcggagacttattaaatgaggtgcaggcctctgagcacaccaaaagtaaacacgaatcgaggaaggaaaagaggaagaaaagtaataaacacgactcgtctcgttccgaagagcgaaaatctcacaaaattcctaaacttgaaccggaagagcagaatcgtccaaatgaacgagtggacactgtgtccgagaagcctcgggaggagccagttttgaaagaagaagccccggtgcaaccaatactgtcaagtgttcctacaactgaagtttccaccggcgtcaaattccaggtcggagatcttgtgtggagcaaagtggggacatatccttggtggccttgtatggtgtcctctgatccccaactggaagtccataccaagattaatacaaggggtgcccgtgaatatcacgtgcaattcttctccaaccagccagagagggcctgggttcatgagaagcgggtgagggagtataaggggcacaagcagtacgaagaactgttggcagaggccacaaaacaggcttccaaccatagtgagaaacagaagataagaaaacctcggcctcagcgggaacgagcccaatgggatatcggaatcgcccatgctgagaaagcactgaaaatgactagggaagaacgcatcgagcagtacaccttcatctatatcgataagcaacccgaagaagccctgtcacaggccaaaaaatccgttgcttctaagacagaagtgaagaagactcggaggccaaggtctgtgctcaacacccagcccgaacagaccaatgcgggagaagtggcatcctctttgtcaagtaccgaaattcgtaggcacagccagagacggcacacaagcgccgaagaagaggaacccccgcctgtgaagattgcttggaagaccgcagccgcgaggaaatcccttcctgctagcatcaccatgcataaagggagcctggacctccagaaatgtaacatgtcgccggtggtgaagatcgaacaggtctttgcattacagaacgccactggtgacgggaaattcatcgaccagtttgtctattcaacaaaagggataggcaataaaacagagatctctgtgagagggcaggacaggctaattatctcaacgccaaaccaacgcaatgaaaaaccaacccaatcggtgtcttcccccgaggctacaagtgggagtaccggctcagtggaaaagaagcagcagagaaggtcgatcagaacaaggtcggagagcgaaaaaagcaccgaggtggtgcccaagaaaaagatcaaaaaagagcaggttgagacagtgcctcaggccacagtgaagactggcttacagaagggcgcatctgagatatccgattcatgcaagcctctcaagaaacggtcccgggccagcacagatgtcgagatgaccagcagcgcgtaccgggatacttcagattctgatagtagaggcctgtctgacctgcaggtgggctttggcaagcaggtggactcaccaagcgctactgctgatgccgacgtctcagatgtccagtccatggactcctccctgtcccgacggggcaccggcatgtccaaaaaagacacggtgtgtcagatatgcgaaagctcaggagatagcttgataccatgtgagggcgagtgttgcaaacacttccacctcgagtgtctggggctggccagtctgcccgatagcaaattcatatgcatggagtgtaagacaggacagcacccctgtttttcctgcaaagtttccggcaaagatgtcaagcgttgctcagtgggagcgtgcgggaagttctaccatgaggcctgcgtacgaaaatttcctacggctatctttgagtcaaaggggtttagatgtcctcagcactgctgcagcgcctgcagcatggaaaaagacattcataaagcctcaaaaggcagaatgatgaggtgtctgcggtgcccagtggcatatcactccggcgatgcctgcatcgccgctggatctatgcttgtctcatcctacatcctcatttgctccaatcattctaaacgctcctcaaacagctctgccgtgaatgtaggtttctgttttgtgtgcgcccgcggactgatcgtccaagatcatagcgaccctatgttctcttcatacgcttataagtcgcattacctcttgaacgagagcaaccgcgccgagctcatgaagcttccaatgattccctccagcagtgcttctaagaaaaaatgcgagaaaggagggaggttgctgtgttgcgaatcatgtccagcgagttttcatcctgaatgtctctcaatcgaaatgccggagggctgctggaactgcaatgactgcaaggccggcaaaaagttacattacaaacagatcgtctgggttaagctcggaaattaccggtggtggcccgcggaaatttgcaatccccgttcagtgccactgaacattcaggggctgaagcatgatctcggcgatttccccgtgttcttctttggctcccatgactactactgggtgcaccaagggagggtctttccctacgtcgaaggcgacaagtcttttgcggagggccaaacaagcattaacaaaacgttcaaaaaagcactggaggaggcggccaaaagatttcaggaactgaaggctcaacgtgaatccaaagaagcactcgaaatcgaaaagaattcccgcaaacctcccccatacaaacacatcaaagccaacaaagttattggtaaagtccagattcaggtggcagacctgtctgagatccctagatgcaattgtaagccagccgatgaaaatccatgtggcctggaaagcgagtgcctgaaccgtatgctgcagtacgagtgccatccgcaggtttgtcccgcaggggatcgttgccagaatcagtgcttcaccaaaaggctgtacccggacgcggagattataaagacagagcggcggggctggggtctgcgcaccaagcggtcgatcaagaaaggggagttcgtaaacgaatacgtgggagaattaattgatgaggaggaatgtaggctgaggattaaaagggcacacgaaaacagcgatcgtattatcgatgcggggccaaaagggaattattctcgtttcatgaatcactcgtgcaaccccaactgcgaaactcaaaagtggacggtcaacggagatgtgcgcgtcggactgtttgcgctttgcgatatcccagctggcatggagctgaccttcaactataatttggattgtttgggcaacggtagaacagagtgtcactgcggggctgataactgcagcgggtttctgggggtccgaccgaaatctgcctgtgccagcacgaacgaggaaaaagccaagaatgctaaattgaagcagaagaggcgcaaaataaaaaccgagcctaaacagatgcacgaggattattgttttcaatgcggggatgggggagagctcgtgatgtgtgacaaaaaggactgtcctaaagcatatcatcttctgtgcctgaatctcacacagcctccctacgggaaatgggagtgtccatggcatcagtgcgacgagtgtagctccgctgccgtgtccttctgcgaattttgtcctcatagcttttgcaaggatcatgaaaagggcgctctagtgccgagcgcactggaggggagactgtgttgttctgaacacgatccaatggcccccgtgtcaccggagtactggagtaagattaaatgtaaatgggagagtcaggatcatggggaagaggtgaaggagtag

SEQ ID NO: 211552 - DNA, 849 bp, synthetic construct
  misc_feature 1..849: note = Description of Artificial Sequence: Synthetic coding sequence
  source 1..849: mol_type = other DNA
atggacttcagcttcagcttcatgcagggcatcatgggcaacaccattcaacagcctccccagctgatcgattcagcaaacatacggcaggaggatgcatttgacaataattctgatattgcggaggatggcggccaaacaccctacgaggctacactccagcagggatttcagtacccagctacgaccgaagacctcccacccctgaccaacggatatccaagttcaatttctgtgtacgaaacgcagacaaaataccagagttataatcagtatccaaatggctctgccaatggcttcggggctgttcggaacttttctccaactgattattaccattcagagattcccaacacccgtcctcatgaaatcctcgaaaagcccagcccacctcagccgcctcccccaccatctgtaccccagacagtgataccaaaaaaaactggtagtcctgagatcaaactgaaaattacaaagacgattcaaaacggacgagaactgtttgagtcttctttatgtggggatctgttgaatgaggtccaagcgtcagaacacacaaaatccaagcacgagtctcggaaggagaagcgcaagaaatctaataagcacgactcctcccgctcagaggagcgaaaatctcacaaaatcccaaaactggaacccgaggaacagaatcggccaaacgagcgggtggatacagtcagtgaaaaacccagagaggaacccgttctcaaggaagaggccccagtacagcccattctgtctagcgtaccaactacagaagtctccacaggagttaaatttcaggtcggagacttggtgtggtcaaaggttgggacgtacccatag

SEQ ID NO: 211553 - DNA, 78 bp, synthetic construct
  misc_feature 1..78: note = Description of Artificial Sequence: Synthetic coding sequence
  source 1..78: mol_type = other DNA
atggacttcagcttcagcttcatgcagggcatcatgggcaacaccatccagcagccaccacagctgattgattcatag

SEQ ID NO: 211554 - DNA, 48 bp, synthetic construct; identical to SEQ ID NO: 105360
  misc_feature 1..48: note = Description of Artificial Sequence: Synthetic coding sequence
  source 1..48: mol_type = other DNA

SEQ ID NO: 211555 - DNA, 1620 bp, synthetic construct
  misc_feature 1..1620: note = Description of Artificial Sequence: Synthetic coding sequence
  source 1..1620: mol_type = other DNA
atgcccggccagcggcgggccctgagccccaagatggccagcatgagagaatcggacactgggttatggctgcataacaagctcggtgctacggatgagctatgggctccaccatccatcgcgagtctgctgacggccgccgtgatcgacaacatccggttgtgtttccacggactttcgtctgcagtcaaactgaagttacttttaggcacactccatctcccaaggaggacagttgatgagatgaagggagcactgatggaaattatccagcttgcttcactcgactcagatccctgggttctgatggtggctgatattctgaagtctttccccgatacaggctccctaaatcttgagttagaggaacaaaatccaaatgttcaggacattctaggtgaattacgcgagaaggtaggggagtgcgaagcctctgccatgctgccgctggagtgccagtatctcaacaagaacgcactgactaccctggctggacccctgacaccgcccgtcaagcacttccagctcaagcggaaacccaagtccgctacgcttcgtgccgaattattacaaaaatctaccgaaacagcacagcagctcaagcgaagcgccggggtccctttccatgccaaaggcaggggcttgctccgcaaaatggacaccaccacacccctgaaaggcattcctaagcaggccccatttcgcagtcctacggccccaagtgtcttcagcccaaccgggaataggacacccattcctcctagtcgcactctgctgcggaaagaaagaggcgttaagctgctggatatctcggagttggatatggtgggggccggtagagaagccaaaagaaggaggaagacactcgacgctgaagtggtggagaaacccgcaaaggaagagaccgtggtggagaatgcgactcccgattacgctgcggggctggttagtacccagaaacttgggtcattgaacaatgaacctgctctcccctccacttcctatctcccgagcacaccgtcagttgttcccgccagttcctacattccctcttcagagacgcctccggcaccttcaagccgggaggcgtcacggcctccagaggaaccgtccgctccttctcctacattacccgctcagttcaagcagagggcccccatgtataacagtggtctgtcccccgccacaccaacacctgcagctccaacaagtcccctgacccccactaccccaccagcagtcgctccgaccactcagacccctcctgtcgctatggtagccccacagacccaggctccagctcaacagcagccaaagaagaacttgtccctgactagggaacagatgttcgccgcccaggagatgtttaaaacagctaacaaggtgacgcggccggaaaaagccctgattctgggttttatggcgggcagtagagaaaacccctgccaggaacagggagacgtgattcagataaagttgtcagaacacaccgaggacctccccaaggcggacgggcaaggctccaccaccatgcttgtcgatactgtgttcgaaatgaactacgctacaggccagtggaccagatttaagaaatacaagcctatgacaaacgttagttag

SEQ ID NO: 211556 - DNA, 1587 bp, synthetic construct
  misc_feature 1..1587: note = Description of Artificial Sequence: Synthetic coding sequence
  source 1..1587: mol_type = other DNA
atggccagcatgcgggagagcgacaccggcctgtggctgcacaacaaattgggcgcgaccgatgaactgtgggcgccacctagcatcgcttccttgctgaccgctgcggtcattgacaatatacgcttatgcttccatggcctttccagtgcagtaaaactgaagctcctgcttggtacactgcacctccctaggcggaccgtggacgaaatgaaaggggccctaatggagatcatccagttggcctccctggattcggacccctgggtgctgatggtggctgacatccttaagtcatttcccgacaccggttctctgaacctcgagctcgaggagcagaaccccaatgtccaagatatcctcggcgaactgagagaaaaggtcggagagtgtgaagcgtccgcaatgttgccactcgagtgccagtacctgaataagaatgccttaactacattggctggtcccctgacaccaccagtgaagcactttcagctgaaaaggaagcctaagagcgccacactgcgcgccgagctgctgcaaaaatctaccgagactgcgcagcaattgaaaaggtctgcaggtgtacccttccatgccaaaggacggggcttgctgagaaaaatggacactaccactcccctaaaagggatccccaagcaggctccattccgatctcccacggccccctctgtgttctcaccaactggtaaccggaccccaattccacctagcagaaccctcctaaggaaagaacgcggcgtaaagctcttggatatttcagaactggatatggtgggagccggtcgcgaagccaagaggcggaggaagaccttggacgccgaggttgttgaaaaacctgccaaagaagagacggtggtggagaacgctacaccggactatgcagctggcctggtgagcacccagaagttggggagccttaataacgaacccgccctgccgtcgacttcctacctgcctagcacaccatcagtcgtacccgcatcctcatacattcctagctcagagacgccaccagcaccctcgagcagagaagcatcgcggccccctgaagaaccctctgctccaagtccaaccctgcccgcccagtttaagcagagagccccaatgtacaattccggcttgagcccggcaaccccaacaccagctgcccccacaagtccactgacgcctaccaccccacccgcagtggctccaaccacccagaccccacccgtcgccatggtggccccacaaacacaggcccccgcccagcagcagcctaagaagaatctcagcctcactcgagagcagatgttcgccgctcaggagatgttcaaaaccgccaataaggttacgaggcctgagaaggctctcattctgggttttatggccggcagcagagagaacccctgtcaggaacagggagacgtgatccaaatcaagctgtctgagcataccgaggacctccctaaggcggatggccaaggtagcaccactatgctggtagatacagtgttcgagatgaattatgccaccgggcagtggactcggtttaaaaaatataaaccaatgactaacgtgtcctag

SEQ ID NO: 211557 - DNA, 1182 bp, synthetic construct
  misc_feature 1..1182: note = Description of Artificial Sequence: Synthetic coding sequence
  source 1..1182: mol_type = other DNA
atgctgcccctggagtgccagtacctgaacaagaacgccctgaccactctcgctggaccactcactccgccagttaagcactttcagttaaagaggaagcctaaaagcgcaacccttcgagcggagctgcttcagaagagtacagagacggctcagcagctaaaacggtcagcgggagtcccatttcacgcaaaggggcgcggactcctgcgaaaaatggatacgacaacacccttgaagggaatcccaaagcaggccccctttaggtctcctactgccccaagcgtgttcagccctacaggtaatcggactccaatccccccaagccgcacactccttcgcaaggaacgaggggtgaaactcctggatatctccgagctcgacatggttggcgctggacgcgaagccaagcggcgccgcaagactctggatgcagaagtggtcgagaagccagccaaagaggaaaccgtggtggaaaatgccacccccgactatgcagcggggctggtgagcacacagaagctgggctctttaaacaacgagccagcactgccgagcacctcctatctaccttcaacgccttcagtcgtacctgcctcaagctacattccttcctccgagaccccacccgcccctagcagccgggaggcctctcggccccctgaagagccatctgcaccctctcccactctaccagcacagttcaaacaacgggcacccatgtacaactccggcctgagcccggccacacctacgccagcagcccctaccagcccacttaccccaacaacaccccctgccgtggctcccaccactcagaccccgcctgtcgcaatggtggcaccccagactcaggctcctgcgcagcagcagccaaagaaaaatttatcgcttacccgggagcaaatgttcgctgcccaggagatgttcaagacagctaacaaagtgacaagacctgaaaaggccttgatactcggatttatggcaggcagccgggagaatccgtgccaggagcagggggacgtgattcagattaaactcagtgaacacaccgaagatctacctaaggctgatggacaaggatccaccaccatgcttgtggataccgtctttgagatgaactatgccacgggccagtggacgcgcttcaaaaagtacaagccaatgactaacgtctcttag

SEQ ID NO: 211558 - DNA, 462 bp, synthetic construct
  misc_feature 1..462: note = Description of Artificial Sequence: Synthetic coding sequence
  source 1..462: mol_type = other DNA
atgtaccggatgcagctgctgagctgcatcgccctgagcctggccttggtgacaaactctgcacctacgtcctcttctacgaagaaaactcagcttcagcttgaacaccttctgcttgacctgcaaatgatcttgaatggcatcaacaattataagaaccctaagctgaccaggatgctaaccttcaagttctatatgccaaaaaaggctactgagttaaagcaccttcagtgtctggaggaagaactgaaacctcttgaggaggtcctgaatttggcccaatctaaaaattttcacctgcgcccacgcgatctcatctccaatattaacgtcattgtcctggagcttaaagggtccgaaaccacatttatgtgcgagtacgctgatgagaccgccacaattgtcgagttcctcaataggtggatcacattctgtcagagtattatctctacactgacttag

SEQ ID NO: 211559 - DNA, 2673 bp, synthetic construct
  misc_feature 1..2673: note = Description of Artificial Sequence: Synthetic coding sequence
  source 1..2673: mol_type = other DNA
atggacagcaacaccgcccccctgggccccagctgcccccagcccccgccagctccccagccccaggcgaggtcccggttaaacgcgaccgctagcttggaacaggaacgcagcgagcgccctagggcacctggccctcaggctggaccaggccctggtgtgagggatgccgctgcccctgctgaacctcaggcacagcatacacgctctcgggagcgggccgatgggacaggacctactaagggcgatatggaaatcccatttgaggaggtattagagagagcaaaggcaggggaccctaaagcgcagactgaagtaggtaagcactatctccagttagcaggagataccgacgaagaacttaactcttgtaccgctgtggactggttggtgctggccgcaaagcagggcaggcgcgaggcggtaaagctgttgaggagatgtctcgctgatcggcgcggcattacttctgaaaatgagcgcgaggtccgccagcttagcagcgagactgacttggagcgggccgtccgaaaggcagccctcgtaatgtactggaagctgaatcccaaaaagaaaaagcaggttgcagtggcagaactgcttgaaaacgttggccaggtcaacgaacacgatgggggcgcccagcctggcccagtccccaagtcccttcagaaacagcggaggatgctcgagcggttggtcagttctgaatccaaaaattacatcgcactggatgattttgtcgaaatcaccaaaaagtacgcaaagggcgtgattccctcctccctatttctacaggatgatgaagatgacgatgaacttgccggtaagagtcctgaggacctgcccctgcggctcaaagtggtcaagtaccctctccacgcaattatggagataaaggaatacctgatcgatatggcgtcacgagcaggaatgcattggctgagtactattattccaactcatcatatcaacgctctaatttttttctttattgtcagtaacctcacgatcgatttcttcgccttcttcattccactagtgattttctatttaagctttatctctatggttatttgtacactcaaggtgtttcaggactctaaggcctgggagaatttcagaacgctgaccgatcttctgcttcggttcgagcctaatctggatgtggaacaagccgaggtgaatttcgggtggaaccaccttgagccatacgctcattttcttctgagcgttttcttcgtgattttctcatttccaatcgcctccaaggactgcatcccctgttcagagttggcagtgatcactggttttttcacggttacttcttacttatcactttctacacacgcagaaccctacacacggcgcgccttggcaaccgaggttacagctgggctgctttctctactgcctagcatgcccctaaactggccatacctgaaggttttggggcagaccttcatcactgtccccgtaggacacttggtggtcctcaacgtgtccgtgccctgcttattatacgtgtacttgctgtacctgttcttcaggatggcccagctgagaaacttcaagggtacctattgctatttagtcccttatctggtgtgtttcatgtggtgcgaactgagtgtggttatcctgctggagtcaactggacttgggctgctgagggccagcatagggtacttcctgtttctgttcgccttgcccatactcgttgccgggttagcactcgtgggtgtgttgcagtttgcccgttggtttacctcacttgagctcaccaaaatagctgtgactgtggccgtgtgttcagtccctctcctcctgaggtggtggaccaaagcttcattcagcgtggtcggcatggttaaaagccttactaggtcgtctatggtgaagctcatattagtgtggctgacagcaattgtgttattttgctggttttatgtctatagatcagaagggatgaaggtctacaattctacgctgacctggcagcagtacggcgccctgtgcgggcctcgcgcctggaaagagaccaatatggcccgcactcagatcctttgtagccacctagaaggtcacagagtgacctggactgggcgattcaaatatgtgcgagttaccgacattgataactcggccgagagcgccatcaatatgctgcccttctttattggagactggatgcgttgtttgtatggcgaggcatatcctgcttgttcacccggtaacacctcaactgccgaggaagagctttgccggctcaagctgctagctaaacacccctgccatatcaagaaatttgataggtataaatttgagataactgtcggaatgcctttttccagcggcgcagacggatcccgcagtagagaagaggatgatgtgacgaaggatatcgttctgcgcgcttctagcgaattcaaaagcgttcttttgtctttaagacaaggctctttgatcgaattttctaccatcctggagggccgcttagggtcgaagtggcccgtgttcgagttgaaagccatctcttgtcttaactgtatggcgcagttatctcctacacggcgccacgtaaagatcgagcacgactggaggtcaacagtgcacggggctgtgaagtttgcttttgattttttttttttccctttcttgtctgctgcatag

SEQ ID NO: 211560 - DNA, 807 bp, synthetic construct
  misc_feature 1..807: note = Description of Artificial Sequence: Synthetic coding sequence
  source 1..807: mol_type = other DNA
atggtgaagagcctgacccggagcagcatggtgaagctgatcctggtttggctgactgccatagtgttattttgttggttttacgtgtaccggtctgagggaatgaaagtgtacaactctacgctgacttggcaacaatacggagcactgtgtggcccacgggcttggaaggagacaaacatggctaggacccagattctgtgttctcacctcgaggggcatcgagtgacatggaccgggagattcaagtatgtgagggtgaccgatattgacaatagcgccgaatctgcaataaatatgcttccattctttatcggggattggatgaggtgtttgtacggtgaggcttatccagcatgctcacccggtaacactagcaccgccgaggaagaactgtgtcggctgaagttgctcgcaaagcacccatgccatataaaaaagtttgaccgctataagtttgagattaccgtcggcatgccatttagttctggagcagacggatctcgttctcgagaggaggatgatgtgaccaaagatattgtcctgcgcgcttcttcggaatttaaatccgttttattatccctgcgccagggatcgttgatcgaattctctacgatactagagggccggttaggtagtaagtggccagtctttgagctcaaagccatcagctgtctgaattgtatggcacaactttcccctacgagaaggcatgtcaagattgagcatgactggagatcaaccgttcatggggccgtcaaattcgctttcgatttcttctttttcccatttcttagcgctgcgtag

SEQ ID NO: 211561 - DNA, 3342 bp, synthetic construct
  misc_feature 1..3342: note = Description of Artificial Sequence: Synthetic coding sequence
  source 1..3342: mol_type = other DNA
atgccccggcccgagctgcccctgcccgagggctgggaggaggcccgggacttcgacgggaaggtgtattacatcgaccacactaaccgaaccaccagctggatcgatcccagagatcgttacactaagccactgacatttgcagactgcatcagcgacgagctgcctcttggctgggaggaagcctatgatccacaggtgggggactattttatcgatcacaataccaagaccacacaaattgaggacccccgcgtccagtggcggagggaacaggaacacatgctgaaagactacctggttgttgcccaggaagcactatctgcgcagaaggaaatttatcaggtcaagcagcagcgattggaactcgcacaacaggaatatcagcagctccatgctgtgtgggaacacaaattgggcagccaggtaagtcttgtgtcagggtcttcctcatcaagtaagtacgaccctgagatcctgaaggctgagatcgcaaccgcaaaatctcgagtcaacaagcttaaaagggagatggtgcatctccagcacgagctgcaattcaaggagagaggtttccaaaccttaaagaaaattgacaagaagatgtctgacgcccaggggtcttataagctggatgaggcgcaggctgtactgcgggagacaaaggcaattaaaaaagccattacctgcggggaaaaggagaaacaggacttgattaaatcccttgcaatgctgaaggacggctttaggacagatagaggaagtcatagcgatctttggagcagcagctcatcattagagtcatcttctttcccacttcccaaacaatacttagacgtgagcagccaaaccgatatttcaggcagcttcggtattaattcaaataaccagcttgccgaaaaggttaggttgaggctgaggtacgaggaagccaaaaggcgcatagctaatttgaagatccaattagcgaaactagacagcgaggcatggcctggggtacttgattcagagagagatcgcctgattctgattaacgagaaggaggagttattgaaggagatgaggtttatttctcctagaaagtggacccagggggaggtcgagcagctcgagatggcaaggaagaggctagaaaaggacctccaagcggctagagacacccaatcaaaggctttgaccgaaagactcaagctcaattctaaaagaaatcagctagtgcgtgagctcgaggaggctactcgccaggtggctacacttcactcccaactgaagtcgctcagcagtagcatgcagtcactaagctctggttcctccccgggctcattgactagctcccggggctctctcgttgcctcctcgttggactcaagcaccagtgcctcctttactgatttgtactacgatccattcgagcagctagatagcgaattacagagtaaggtagaattcctcctgctggagggagcgacaggctttcgcccttccggttgcatcacaactatccacgaggacgaagtggccaagacacagaaggcggagggaggcggccgcctgcaggccctacgctcactgtcaggcacccctaagtctatgacaagcctgtccccccggtcatctctgagctccccctcgcccccttgttccccactcatggcggaccctctcctagccggagacgcgttcttgaattccctggaatttgaggaccccgagcttagcgccacactgtgtgagttatcccttggcaattccgcacaagagcgatacaggctggaagagcctggcacggaagggaaacagctggggcaagctgttaataccgcgcaggggtgtggactcaaggtggcatgcgtgtctgccgctgtgtctgatgagtctgtggccggtgacagtggcgtttatgaagcatctgtacaacgcctaggagcctctgaggcagccgcattcgacagcgatgagtctgaggccgtcggagcaactcgcatccagatcgccctcaagtacgacgaaaagaacaaacagttcgcgatactcatcattcaactcagcaacctctctgctctgctgcagcagcaagatcagaaggtgaacatcagggtggcagtgcttccttgttccgagtcgacaacatgtctgtttcgaactagaccactcgacgccagcgatactctggtgttcaacgaggtcttctgggtcagtatgtcctacccagcactgcaccagaagactctgcgggttgacgtctgtacaacagaccgctcccatttggaggagtgcctgggtggcgcccagatatctcttgcggaagtctgcagaagcggggaaagatcaactcgatggtacaaccttctttcttataaatatcttaagaagcaaagcagggagctgaaacccgttggcgtaatggcccccgccagtggacctgcctctacagacgccgtgtccgctctcctcgagcagaccgcggtggaacttgagaagcgtcaggagggacggagtagcacccaaaccttggaggactcttggcggtacgaagaaacctccgaaaatgaagcagtggcggaagaagaggaagaggaggtggaggaagaggaaggggaagaagatgttttcacagaaaaggcaagcccagatatggacggctaccctgcccttaaggtcgacaaggagaccaatacagagacccctgcaccctcaccaactgtagtgagaccgaaagatcgtcgggtaggtacaccctcccagggtcccttcctacggggaagtaccataattcgcagcaaaacattctcaccaggcccccagagccaatacgtttgcaggctgaaccggagcgatagcgactccagcaccctatccaagaagccccctttcgtgcgcaactctctggaacggcggagcgtcagaatgaaacgcccatcatccgttaaatctttaaggtccgagcgcttgatcagaacatccctcgacctagagctggacttgcaggccaccagaacctggcatagccagttgacacaggaaatctcagtattgaaagagctgaaggagcagctagaacaggccaagtcccatggtgaaaaagaacttccgcagtggctgcgagaggatgagaggttccgtctgttgctgagaatgctggaaaagcgacagatggatagggcagagcacaaaggggagctgcaaacggataagatgatgcgggccgctgctaaggatgttcacagactcagaggacagagctgcaaggaaccgccagaagtgcagtccttccgcgaaaaaatggcttttttcactcgcccacgcatgaacatacccgccctgagcgccgacgatgtgtag

SEQ ID NO: 211562 - DNA, 3360 bp, synthetic construct
  misc_feature 1..3360: note = Description of Artificial Sequence: Synthetic coding sequence
  source 1..3360: mol_type = other DNA
atgccccggcccgagctgcccctgcccgagggctgggaggaggcccgggactttgatggcaaggtctactatattgaccataccaatcggacaactagctggattgaccccagagaccgttacactaagccactaactttcgccgattgtatttccgacgagttgccccttgggtgggaggaagcctacgacccccaagtgggcgactacttcatcgaccataacaccaagactacccagattgaggatccacgcgtccagtggaggagagagcaagaacatatgcttaaggactatctggttgtcgctcaggaggctctgtctgcacagaaagagatctaccaggtcaaacagcagaggcttgagctagcgcagcaggaataccagcaactgcatgctgtgtgggagcacaaactcgggagccaggtgagcctggtctcaggcagttctagtagctctaagtatgaccccgaaattctgaaggccgagattgccaccgccaaaagcagagttaataaattaaagagagagatggtgcatttgcagcatgagttacagtttaaggagcgagggttccagactctcaagaaaattgataagaagatgagcgatgcgcagggctcctacaagctggacgaagctcaagctgtcctccgggagaccaaagcgattaagaaagcaattacctgtggcgagaaggaaaaacaggacctgattaagtccttagctatgctgaaagatggatttaggaccgatcgagggtcacactccgacctgtggagttcctcctcctcgctggaatcatcatcctttcccttgcctaagcagtatctggacgtatcatctcagaccgatatctcggggtcattcggcattaactcaaacaatcagttggccgagaaagtacgcctgcgtctccgatatgaggaagccaagcggcgtatcgccaatttgaagatacagttggcaaaactggatagtgaagcctggccgggggtactggactcagagagggaccgattgatactcatcaacgaaaaagaagaactgctgaaagagatgcgctttatatcaccccggaaatggacccagggtgaggtggaacagctggaaatggcccgtaaacgcctggagaaagatttacaagccgcaagagatacccagagcaaggccttaacagaacgcttgaagttaaattcgaaacgtaaccagctcgttcgcgagttggaagaggcaacaagacaagtcgcgaccttacattctcaactcaagagcctgtcctctagtatgcagagtctgagctccggttccagccccggatcgttgacatccagtcgaggttcactggttgcatcttcactggacagcagcacaagcgcctcttttacagatttatactatgatccatttgagcagctggacagcgagctccagtccaaagtggagtttctgctgcttgaaggggcaaccggtttccgtccgagcggatgcatcaccacaatccacgaggatgaggtggcgaaaactcagaaggcggagggaggcggaagactccaggcactgcgctcgttgtctggcacccccaaatctatgacctcactcagccctcggagctccctgagctccccctctcctccctgtagtccccttatggccgacccactgctagcgggagacgcctttctgaatagccttgagttcgaggacccggaattatctgccaccctgtgtgagctgtcacttggcaactctgctcaggagcgctataggctggaagaacccggtaccgagggtaagcaacttggtcaggccgttaacacggcgcaaggatgtggactgaaagtcgcgtgcgtcagcgccgccgttagcgatgaaagcgtggccggtgactctggcgtgtatgaggcttccgttcagcggctcggagcaagcgaggcggccgccttcgacagtgacgagagcgaagccgtgggagcaacccggatccagatcgccctgaagtatgacgagaaaaataaacagtttgctatcctgattatccagttgtcaaatctgagtgctctgctgcagcagcaggatcagaaggtgaacatccgcgtcgcagtccttccgtgtagtgagagcacaacatgtttgttcaggacaaggccgctggatgcatccgatacactggtctttaacgaagtattttgggtgtcaatgagttatccagctctgcaccagaagactttacgtgttgacgtgtgtaccaccgaccgatctcatctcgaggaatgtcttggaggcgcgcaaattagcctggcagaagtatgcagatctggtgagaggtcaactagatggtacaatctgctgtcatataaatacctaaaaaagcagagtcgggagcttaaaccagtcggcgtcatggcacctgcatctggccctgcttctaccgacgcagtgtcagcactgctagagcaaaccgccgtggaactggaaaagcggcaggagggcaggagctctacccagaccttggaggacagttggagatacgaggaaactagcgagaacgaggccgtggccgaagaagaggaagaggaagtggaggaagaggagggtgaagaggatgttttcactgagaaggcctcacctgatatggatggataccctgcgttgaaggtagataaggaaacgaacacagaaacccccgctccctccccgacagtcgtcaggcctaaagaccgacgcgtaggcactccctctcaagggccctttctcaggggctctactattattaggagcaagacctttagtccggggccccagtcccagtacgtatgtcgcctcaacagatctgactcggattcgagcaccctgagtaagaaacctcccttcgttcgaaacagtctggagaggagatccgttcgcatgaaacgcccatcgccccctccccaaccttcttccgtgaagtctctccggtctgagcggctgatccgtacctctctggatttggagcttgacctacaggccacccgaacatggcactcacagctgacccaagagatttctgtcctcaaggaactgaaggaacagttagagcaggccaagtcacacggggaaaaagagttgcctcagtggctgcgggaagatgagcgctttagactgctgctccgcatgctagagaaacgccagatggatcgagccgagcacaagggcgaactgcagactgacaagatgatgcgagctgcagcaaaggatgtgcacaggctccgcggccaatcttgcaaagagccgccagaggtgcagtcattccgggaaaaaatggccttcttcacacggccacgcatgaacatacctgccctgtctgcagacgatgtttag

SEQ ID NO: 211563 - DNA, 438 bp, synthetic construct
  misc_feature 1..438: note = Description of Artificial Sequence: Synthetic coding sequence
  source 1..438: mol_type = other DNA
atggccgaggtggagcagaagaagaagcggaccttccggaagttcacttatcggggagtggatctggaccagctgctggatatgtcatacgaacagttgatgcaactatattccgctcggcagagaaggcgcctgaatcgcgggttacggcgcaagcaacatagcctgctgaagcgcctgaggaaagccaagaaagaggccccaccaatggagaagcccgaggttgtcaaaacacacttgagggatatgatcatcctgccagaaatggtaggaagcatggtgggtgtctacaacggcaagactttcaatcaggtcgaaatcaagcccgaaatgatcggccattatctgggcgagttctcgatcacttataaacccgtgaagcatggcagacccggcataggggctacccacagcagtcgctttattccactgaaatag

SEQ ID NO: 211564 - DNA, 786 bp, synthetic construct
  misc_feature 1..786: note = Description of Artificial Sequence: Synthetic coding sequence
  source 1..786: mol_type = other DNA
atggccctgaacaagaaccacagcgagggcggcggcgtgatcgtgaataacaccgagagcatcctcatgagttacgatcacgtcgagttgactttcaacgacatgaagaatgtccctgaggccttcaaggggacaaagaaaggcaccgtttacctgaccccctacagggtgatcttcctttctaagggcaaagatgccatgcagtcgttcatgatgcccttctacctaatgaaggactgcgagattaagcaacctgttttcggagctaactacataaaaggcaccgtgaaggctgaggctgggggcggctgggagggaagtgccagctacaagctgacattcaccgctggtggagccattgagtttgggcaacgtatgctgcaggtggcatcacaggcaagcagaggggaagtacccagtggtgcctacggctactcctacatgccatcaggagcatatgtctatccaccgcctgtagcaaacggcatgtacccttgccctcctggatacccctacccgccacccccccctgagttctatccagggccccccatgatggatggggcaatggggtatgtgcagccaccgccccctccataccccggccctatggagccccctgtgtccgggcctgatgtaccttcgactcccgccgctgaagcaaaagctgccgaggccgcagcgagcgcatattacaaccccggcaatcctcacaacgtgtatatgcctaccagccagcctccccctcccccctattacccacccgaggacaaaaagacccagtag

SEQ ID NO: 211565 - DNA, 720 bp, synthetic construct
  misc_feature 1..720: note = Description of Artificial Sequence: Synthetic coding sequence
  source 1..720: mol_type = other DNA
atgagctacgaccacgtggagctgaccttcaacgacatgaagaacgttccggaagcgttcaagggtacgaagaaagggacagtgtacctgaccccctaccgcgtgatctttctgtcaaagggcaaggatgccatgcagtccttcatgatgccattttatctcatgaaggactgtgagattaagcaacccgtgtttggggccaattacatcaaaggcactgttaaagccgaggcaggcggtggctgggaggggagtgcgagctacaagctgaccttcacagctggcggagcaattgagtttgggcaacggatgctgcaggtcgcttcacaggcctctcgaggggaagtacccagtggtgcctacggttactcttatatgccatcgggcgcctacgtgtatccaccaccagttgccaacggcatgtatccctgtccacccggctacccttatcctcccccccctccagaattttatcccggaccccctatgatggacggagccatgggatacgtgcagccgcctccaccgccctatcccggcccgatggagccacctgtctccggccctgacgtgccaagtactcccgccgccgaagctaaggccgcagaagccgccgctagtgcttattataacccaggaaaccctcacaacgtgtacatgccaacgagtcagccccccccgcccccctactatccccccgaggacaagaagacccagtag

SEQ ID NO: 211566 - DNA, 654 bp, synthetic construct
  misc_feature 1..654: note = Description of Artificial Sequence: Synthetic coding sequence
  source 1..654: mol_type = other DNA
atggccctgaacaagaaccacagcgagggcggcggcgtgatcgtgaacaataccgagtctatactgatgagctacgatcacgtggaattgacgttcaatgatatgaagaatgttccggaggccttcaaaggcactaaaaaaggaactgtttatttgaccccatatagggttatttttttatcgaagggtaaggacgccatgcagtcatttatgatgccattttacctgatgaaagattgtgagatcaagcagcccgtgtttggcgctaattatataaaggggaccgtaaaagctgaagccggagctagccgaggagaggtgccctcaggagcatacggctattcatacatgccatcaggcgcctacgtttacccacccccagtcgccaatggaatgtatccctgtcctccagggtacccttatcctccaccgccccccgaattctaccctggccctcccatgatggacggggctatgggatatgtccagcctccgcctccgccatatccaggtccaatggaaccacctgtctctggaccggatgtcccttccacgcccgcgggggaaggaccgtgggtgctggcggcgctgcgagatcaaccttcccccccaagatgccggacagagtctctcaggatggccagggactgctag

SEQ ID NO: 211567 - DNA, 630 bp, synthetic construct
  misc_feature 1..630: note = Description of Artificial Sequence: Synthetic coding sequence
  source 1..630: mol_type = other DNA
atggccctgaacaagaaccacagcgagggcggcggcgtgatcgtgaacaatactgaatctattcttatgagctacgatcatgtagagctcacattcaacgatatgaaaaatgtgcccgaagcatttaagggaacgaaaaaggggactgtctacctgaccccatatcgcgtcattttcctgtcgaagggaaaggatgcaatgcaaagctttatgatgccattttacctcatgaaagattgtgaaatcaagcagccagtctttggagctaattatatcaaagggaccgtgaaggctgaagccggaggcggctgggaaggaagcgcaagctacaaactgacatttaccgcgcccatgagcccccctctgctgcagcctaagccgagaccccagaaacagccccctgcacctattactacacaggctattgcctctcgtagacatttacctaccacgcacaggaagattgaagatccagtgggaccgcccgcatcgcttccaccaacactgatttccctgccttacccatctcacaggggctgcgccggtgcatgggggggcgagggtgctccatgctcccctagcagaagcgaccacaagcagttgcccggcacaagcatcgtcggtcactag

SEQ ID NO: 211568 - DNA, 651 bp, synthetic construct
  misc_feature 1..651: note = Description of Artificial Sequence: Synthetic coding sequence
  source 1..651: mol_type = other DNA
atggccctgaacaagaaccacagcgagggcggcggcgtgatcgtgaacaacacagagtctattttaatgagttacgaccatgtagagctcacattcaatgacatgaagaatgtgcctgaggctttcaaaggtacaaaaaagggcaccgtatacctgaccccttaccgagttatattcttgtctaagggaaaggatgccatgcaatcttttatgatgcccttctatttgatgaaagattgtgaaattaagcaacccgtttttggagcaaactatattaaaggcactgtgaaagcagaagcaggcggcggttgggaggggtccgcaagctataaactgacatttactgcaggtggagctattgagtttggacaacggatgttgcaggtggcgagccaggagttctaccccggcccaccaatgatggacggggccatggggtatgtccagccccccccccctccctaccctggccccatggaaccgccagtatccggtccagatgtgccctctacgccagccgcagaggctaaggcagctgaagcagctgcgtctgcatattataacccaggcaatccccacaacgtgtacatgcccacctcacaaccgccccctcctccgtattacccgcctgaggacaagaaaacacagtag

SEQ ID NO: 211569 - DNA, 2769 bp, synthetic construct
  misc_feature 1..2769: note = Description of Artificial Sequence: Synthetic coding sequence
  source 1..2769: mol_type = other DNA
atggccaccgccagcccccggagcgacaccagcaacaaccacagcggccggctccagctgcaggtgaccgtgagtagtgccaagctgaagcggaaaaaaaattggtttggaaccgcaatttatacagaagtggtggttgatggagaaataactaagacggccaagtctagttcctcttcaaatcccaagtgggacgaacagttaacagtcaacgtgaccccacaaacgaccttggaattccaggtatggtcccacaggactttgaaggcagacgcactactggggaaggcaaccatcgaccttaagcaggcgctgctgatacacaaccggaaactggaacgcgtgaaggaacagcttaagctgtcactggagaataaaaacgggattgctcagacaggcgaactcacagtggttctagacggtctggttattgagcaggagaatatcacgaattgctcaagtagtcctactattgagattcaggaaaatggagatgcactccacgagaatggagaacctagtgctaggactacagccagattagccgtagaaggcactaacggcatagacaaccacgtccccacttcaactctcgtacagaacagttgttgcagttacgtagtgaatggagacaatacaccatcaagcccctctcaggtggccgcgcgaccaaagaacactccagcacccaagcccttagccagcgagcctgccgatgatacagtgaatggggagtcttcttcgtttgcccctaccgataatgcaagtgttacaggaactcccgtcgtctccgaagaaaatgccttatctcccaactgcactagtaccacggtcgaggatcctcccgttcaggagattttgacgtcttctgagaacaatgagtgcatcccaagcacgtcagcagaacttgagtctgaagctcgcagcatcctcgagcctgacacgtcaaatagtagatcatccagcgccttcgaggctgccaagtcacgccagcccgatggctgtatggacccagtgcgacaacagagcggcaatgcgaatacagaaactctgccgagcggatgggaacagaggaaggacccacatggcagaacatactatgttgaccacaatactaggaccacgacttgggagaggccacagcctcttccccccggatgggaacggcgggtggacgataggagacgggtctattatgtggatcataacaccagaaccaccacctggcagcggccaacaatggaatcagtccgtaacttcgagcagtggcagtctcagagaaatcagctgcagggggctatgcaacaattcaatcagcgctatctctattccgcctccatgctggctgccgagaatgacccctacgggcccctgccccccgggtgggaaaagcgggtagactctaccgatcgggtgtattttgtcaatcataatactaagacaactcaatgggaggatcctagaacccaggggttacagaacgaggagcctctgcctgagggatgggaaattcgatacaccagagagggcgtacgatactttgtggaccacaacacacgcacaaccacctttaaggatcctagaaacggaaaatctagcgtaactaagggaggaccacagatcgcttacgagagaggattcaggtggaagcttgcccactttagatatctctgtcagagcaacgctctgccatcccatgtgaagatcaatgtgtctcgacagacactatttgaagattcgtttcagcaaattatggccctgaagccctatgatcttcgacgccgtctttacgtcatatttaggggagaagaagggctcgattatgggggtttggcgcgagaatggttcttcctgctgtcccatgaggtcctcaaccctatgtactgcctattcgagtacgccgggaagaacaactattgcctacagataaacccagcttccacaattaatccagaccatctgagttacttttgttttattggtagattcatagctatggccctctttcacgggaagttcattgatactgggtttagtctccccttctacaagcggatgttgtccaagaagttgactattaaagatttggagtctatcgacacagagttctataactctctgatctggattagggacaacaatatcgaggagtgtggcttggagatgtatttcagtgttgacatggagatccttggcaaggtgacaagccacgacttgaaactcggtggatcaaacatccttgttaccgaggagaataaggacgagtatattggattgatgacagagtggcgctttagcaggggagtccaggaacagacaaaggcgtttttggacggattcaatgaagtggtccctttgcagtggctgcagtactttgatgagaaagagctggaagtaatgctctgcggtatgcaggaggtcgatttggccgattggcagcgtaacacagtttacaggcactacactagaaacagtaaacagatcatttggttctggcaatttgtcaaagagacagacaacgaagtccgaatgcgcttactccagtttgttactggcacatgcagactgccgctgggggggttcgctgaactgatgggctctaacggtccccaaaagttttgcatcgagaaagttggtaaggatacttggctgcccagaagccatacctgctttaacagactcgacttgcctccctataaatcatatgaacagctgaaggaaaagctgttgttcgctatcgaagagacagaaggcttcggtcaggagtag

SEQ ID NO: 211570 - DNA, 2379 bp, synthetic construct
  misc_feature 1..2379: note = Description of Artificial Sequence: Synthetic coding sequence
  source 1..2379: mol_type = other DNA
atggccaccgccagcccccggagcgacaccagcaacaaccacagcggccgcctgcaacttcaggtgacggtgtcatcagccaagttgaagcggaagaagaattggttcgggactgctatttacactgaggtggttgtggacggcgaaattactaagacagcaaaatcctccagcagctctaaccctaagtgggatgaacagcttactgtcaatgtcactccacagaccacccttgagtttcaagtgtggagccatcggaccctgaaggcagacgctctgctggggaaagccaccattgacctcaaacaggccctgctgattcacaataggaaatttaatggggagtcttcttcctttgcccctaccgacaacgctagcgttactgggacaccggtggttagcgaagagaacgccctgagtcctaactgtaccagcaccaccgtggaggatcctccggtgcaagagattctgacttcctcggagaataacgaatgcatcccatccaccagcgccgagttggagagtgaagcgcgatcgatcctcgagcccgacacatccaactctaggtcatcatctgcctttgaggcggccaaatccaggcagccagatggctgcatggatccagtgagacagcagtcgggtaatgccaacactgagacactgcccagcgggtgggagcaacggaaggacccacacggacgcacgtactatgtcgaccataatactcggactaccacctgggagcgcccacaaccattgccccccggctgggagcgcagggtcgacgatcgccgcagagtttattatgtcgatcacaatactcgcaccactacctggcagaggcccaccatggaatccgtgagaaatttcgagcagtggcagagccagagaaaccaactccagggggccatgcagcagtttaatcagaggtatctgtactcagcaagcatgctggccgccgaaaatgatccttacggtcccttgccccctgggtgggagaagagagtggactccactgaccgggtttatttcgttaatcacaacacaaagaccacacaatgggaggacccccggacccagggactccagaatgaagaaccgctgcctgaaggctgggagattagatataccagggaaggggtgcgctatttcgttgatcataacactaggaccactacctttaaagacccacggaatggaaagtcatccgtgactaaaggcggacctcagatcgcctatgaacgaggtttccgctggaagctggcccactttcgatatctttgccagtcaaacgccctccccagccacgtgaaaattaatgtttccagacagactctcttcgaggatagcttccagcagattatggctttgaagccctacgacctgcgacgccggctgtatgtcatttttcgaggagaagaggggttagactatggaggcctggcacgggagtggttttttttacttagccacgaggtgcttaatcctatgtactgtcttttcgagtacgcaggcaagaataactattgtcttcagatcaaccctgcctccactatcaatcccgaccatctgtcgtatttttgtttcattggcagattcatcgccatggctcttttccatggcaagtttatcgacactggcttctcactccctttctacaagcgtatgctctctaagaagctcacaattaaagacctggagtccattgacacagaattctacaattcactgatttggattcgggataataatattgaggagtgtgggcttgaaatgtacttctccgtggacatggaaatcctgggaaaggtgacaagccacgatcttaagttagggggcagcaacatactggtcaccgaggagaacaaagacgagtacattggcttaatgacagagtggagattttctagaggagtacaggagcagacaaaggcatttctggatgggtttaacgaggtggttccactgcagtggctgcaatactttgacgaaaaagagctcgaggtcatgctttgcggaatgcaggaggtcgacctagccgactggcagagaaacacagtctatagacactacacgcgaaactcgaagcagattatttggttttggcaatttgttaaggagaccgacaacgaagtcaggatgcgcttgttacagttcgtgaccggaacatgccgtctgcccctcggcgggttcgcagaattgatgggatccaacgggcctcagaaattttgtatcgaaaaagtgggaaaagatacttggctgccgagatcacacacgtgttttaaccggctcgatctgcctccgtataaatcatacgagcagctaaaggagaaactgctgtttgctatcgaggaaaccgagggctttggccaggagtag

SEQ ID NO: 211571 - DNA, 2115 bp, synthetic construct
  misc_feature 1..2115: note = Description of Artificial Sequence: Synthetic coding sequence
  source 1..2115: mol_type = other DNA
atggccaccgccagcccccggagcgacaccagcaacaaccacagcgggaggctccagctccaggttacagtgaatggtgaatcctcttcttttgcccctactgataatgccagcgtgacaggtaccccagtcgtgagtgaggagaacgccctgtcgccaaactgcaccagtaccacagtggaagaccccccagtacaggagatcctgacttccagtgagaacaatgagtgtatcccctctacaagtgctgagctggaaagtgaggcgcgtagcatcctcgagcccgacactagtaactcccgctctagtagtgcattcgaggcggctaagtctagacagcctgatggatgcatggatcccgtaagacagcagagcgggaacgccaacaccgagacgctgccttccggctgggaacagcgcaaggatccacacggccggacgtactatgtggatcataatacccgcacgacaacttgggagcgaccacagcccttgccccccggatgggagagaagagttgatgatagaaggcgggtttattatgttgatcacaatactaggaccactacctggcagagacccactatggaaagtgtaaggaattttgaacagtggcaatcccagcgtaaccaactgcagggagctatgcagcagtttaaccagagatacttgtattctgcctccatgcttgctgccgagaatgacccttacgggcccttgcctccaggctgggagaagcgcgtggactccacagatcgagtttatttcgtgaaccacaatacaaagactactcagtgggaagacccaaggacccaagggctgcagaatgaggaacctttgcctgagggatgggaaatacgctatacaagagagggggttcgctatttcgtagatcacaacacaagaacaacgacattcaaagatcctcgcaatggtaagagctcagtcaccaagggcggtccccagatagcttatgagcggggttttagatggaaactggcccattttcggtatctgtgtcagtccaacgctttgcccagtcatgtcaaaatcaatgtgtctagacagaccctttttgaggatagttttcagcagataatggccctcaagccatatgacttgaggagaaggctatacgttatcttccgcggagaagagggcctggattatggaggactggcaagggagtggttcttcctcctaagccacgaggtcctcaacccaatgtactgcctgttcgaatatgctggaaagaacaactattgcctgcaaatcaatcccgcctctacaattaatccagatcatctctcatacttttgctttattggcaggttcatcgccatggcactctttcatgggaaattcattgacactggcttttcgctgcctttctataagcgaatgctgtccaagaaactgaccattaaagacctggaaagtattgatacggaattttacaactctctgatctggatacgggataacaacattgaggagtgtggtctggaaatgtatttctccgtcgacatggaaatattgggaaaagttacgagccacgacctaaagctggggggctccaatatcctggtcactgaagagaataaggatgaatatattggcttgatgaccgagtggcgatttagccgcggcgtccaagaacagacaaaggcctttcttgacggattcaatgaggtggtaccgttacagtggcttcagtactttgacgagaaagagcttgaggtgatgttgtgtgggatgcaggaagtggacttagccgactggcagcgaaatactgtgtatagacactataccagaaatagtaaacaaattatttggttttggcagttcgtgaaagagaccgataatgaagttcgcatgaggctgctccagtttgtcaccggaacctgtcggctgccccttggcggtttcgccgagttgatgggctccaacgggcctcagaaattctgtatcgaaaaggtggggaaggatacatggctgccccggtcacacacctgcttcaataggctggacctaccaccatacaaatcctacgaacagttgaaagagaagcttctctttgccatagaggaaacagaaggctttggccaggaatag

SEQ ID NO: 211572 - DNA, 336 bp, synthetic construct
  misc_feature 1..336: note = Description of Artificial Sequence: Synthetic coding sequence
  source 1..336: mol_type = other DNA
atggccaccgccagcccccggagcgacaccagcaacaaccacagcgggagactccagctgcaggttactgtgtcaagtgccaagttaaagcgcaaaaaaaactggttcgggaccgcgatatacacagaagtggtggtcgatggagagatcacaaagacagccaagtcgtccagtagttcaaatcccaagtgggatgagcagttgacagtaaatgttactcctcaaacgacccttgagtttcaagtgtggagccatcggaccctgaaggcggacgcgcttttaggcaaggccacaattgatctcaaacaggctttgctcatacacaaccggaagtag

SEQ ID NO: 211573 - DNA, 2769 bp, synthetic construct
  misc_feature 1..2769: note = Description of Artificial Sequence: Synthetic coding sequence
  source 1..2769: mol_type = other DNA
atggccaccgccagcccccggagcgacaccagcaacaaccacagcgggcgattgcagctccaggttactgtgtcatccgctaaacttaagcggaagaagaattggttcggtacagccatctacaccgaagtggtggtggatggagaaatcactaagacggcaaagtcaagcagttcttccaatcctaaatgggacgagcagctgacggtaaatgtgacgcctcaaaccaccttggagttccaggtatggtcgcatcgcactttaaaggcggatgcactgctaggaaaggctaccatagacctgaaacaggcactgttgattcataatcgcaaactcgagagagtgaaagaacagctcaagctgagcctcgagaacaagaatggcatcgcccagactggcgagctgactgtggtgctagatggcctcgttatcgagcaagagaatatcacgaattgtagctctagtcccacaattgaaatccaggaaaatggagacgccctgcatgaaaacggagagcccagcgcccggaccacagcaagactagctgtggagggcaccaacggcatagataatcatgttcctacttccacactcgtccaaaacagctgttgctcatatgtcgtgaatggcgataatactccaagttctccttcccaggtcgcggctaggcccaaaaatacacctgcccctaaaccactggcatctgagccagctgatgacaccgtgaatggtgagagctcgtctttcgcacctacagacaatgctagtgtcacgggtactccagtcgtctctgaagagaacgctttgagtcctaattgtacctccaccaccgtagaggatcctccggttcaggaaatattgacttcttctgagaacaacgagtgcatccctagtacctcagccgaactggagagcgaagccaggtccattctggaacccgacacttcaaactccaggagttcatctgcgttcgaggcagctaaaagccgtcagcctgacggttgtatggaccccgtgcgtcaacagtctggaaacgcaaacactgagactctcccctccggctgggaacagcgcaaagacccgcatggtcggacatattacgtcgatcacaatacgcggactaccacatgggagcgccctcagcctctgcctcctggctgggagcggagggttgatgatcgcagacgagtatattacgtcgaccataacactcgaaccactacctggcagcgtcccacaatggagtctgttcgtaacttcgaacaatggcagagtcaacgtaatcagctgcagggcgccatgcagcaattcaaccagagatacctctattccgcttccatgctggccgcagaaaatgatccgtatggccctctccctccaggctgggaaaagcgcgtggattctactgatagagtttattttgtcaatcacaataccaagacgacgcagtgggaggatccacgtacccagggactgcagaatgaagaacccctgcccgagggttgggagattcggtacacaagggaaggtgtccgctatttcgtggaccacaacacccggaccactacgttcaaagatcctagaaatggcaagtcttctgtgactaaaggcggcccacagatcgcttatgagcgggggttcaggtggaaactcgctcatttccgctatctatgtcaatcgaatgcactcccttctcacgtaaagattaacgtgtctcgccagaccctgttcgaggacagcttccagcagattatggccctcaagccgtacgacctcaggcggaggctgtacgtgatctttcggggcgaagaagggttggactacggcgggctcgcaagagagtggttctttctgctaagccacgaggtgcttaatcccatgtattgcctgtttgaatacgccggcaagaataattactgccttcaaataaaccccgccagcaccatcaatcccgatcacctcagttatttctgtttcattgggaggtttatagcaatggccttgtttcacggcaagtttattgatacaggtttctcattgccattttacaaacgcatgttaagtaagaagctgacgatcaaggatctggaatcaatcgatactgagttttataattctcttatttggataagggataacaatattgaagaatgtggactagagatgtatttcagcgtcgatatggaaatcctcggcaaggtcactagccatgatttgaagctggggggatccaacattctcgtcaccgaagagaataaggacgaatacattgggctgatgactgaatggaggtttagccggggcgttcaggaacaaaccaaggccttcctggatggtttcaatgaagtggtgccactccagtggctccagtattttgatgagaaggagctggaagttatgctctgcggtatgcaagaggtggacctggcggactggcagcgcaacaccgtgtataggcattatacacggaacagtaagcaaatcatctggttctggcagttcgtcaaagagacagacaacgaagtgagaatgcggctcttgcaattcgtgactgggacatgccggttgcccctcgggggctttgccgagctgatgggcagcaacggcccccagaagttctgcatcgaaaaggttggcaaggatacatggctgcccagaagccacacctgttttaatcggctggatctccccccttataaatcttacgagcaactgaaggaaaaactcctgttcgctattgaagagaccgaaggctttggtcaggaatag

SEQ ID NO: 211574 - DNA, 2613 bp, synthetic construct
  misc_feature 1..2613: note = Description of Artificial Sequence: Synthetic coding sequence
  source 1..2613: mol_type = other DNA
atggccagcgccagcagcagccgggccggcgtggccctgcccttcgaaaaatcccaactcaccctaaaagtggtgtcagctaagccgaaggttcacaataggcagcctcgcataaactcctacgtggaggtggctgtggatggccttccgtctgaaacgaagaaaaccggaaaaaggatcgggtcgtccgaacttctgtggaacgaaatcataattctgaatgtgacagctcagagccatttggacctcaaagtctggtcatgccacacactgaggaatgaactgctcgggactgcatctgtgaacttgagcaacgttctcaagaacaatggtggaaagatggaaaatatgcagctgacacttaacctgcagaccgagaataagggtagcgttgtaagtgggggcgagttgacaatctttctcgatgggcctacagtggacctcggtaacgtgcctaatggctcagccttaaccgatgggtcacagcttccttcgcgggattcatcaggtaccgctgtcgctcccgagaatcggcaccagccaccaagtactaattgtttcgggggtaggagcagaactcatagacactccggtgcttcagcccgtaccacccctgcgaccggcgagcagtcgccaggggccagaagcaggcacaggcagcccgtgaagaacagtggacatagcgggttggctaatgggaccgtgaacgacgagcctaccactgcaacagaccctgaggagccatcagtggtgggtgtgacaagtcccccagctgcgcccttgagtgttacaccaaatcccaatacgacttcattacccgcacctgcaactccagcggaaggagaagagccgtctacttctggcacccaacagctcccagctgcagctcaagccccagatgcgctgcccgctggatgggagcagcgtgagcttcctaatggtagagtgtactacgtggatcacaatacaaagaccacaacttgggaacgcccgctgccacccggctgggaaaaaagaacggatccgagaggaagattttactatgtggaccacaacaccagaacgaccacgtggcagcggccaacggctgaatacgtgagaaactacgagcagtggcagagtcagaggaaccagctccagggagccatgcaacatttctctcagcggtttctgtaccagagcagttctgcctccaccgaccatgatcctttgggcccccttccacctggctgggaaaaaagacaagacaacggccgggtctactatgtgaatcataacactcgtacaactcagtgggaggacccgaggacccagggaatgatacaggaacctgcacttccacctgggtgggaaatgaagtatacctccgagggcgtgaggtatttcgtggatcataacactaggacgacaacattcaaagatcctcgcccgggttttgagtccggaactaagcaagggtcccctggcgcctacgataggtctttcaggtggaaataccaccagtttagattcctgtgccactccaatgcgctgccctctcacgttaagatcagcgttagccgacagaccttgttcgaggattcttttcagcaaataatgaatatgaaaccttacgacctgaggagacggctctacatcatcatgcgcggtgaggagggcctggactacggtggaattgcacgtgagtggttcttcctgctgtcacatgaggtcctgaatccaatgtactgtctttttgagtatgccggtaaaaataactactgccttcagatcaaccctgcgagttcaataaaccccgaccacctcacttacttccgatttattggcagattcatcgctatggccctgtatcacggaaaatttatagataccgggttcacattgcccttctataagcgcatgctaaataagagaccaacccttaaagaccttgagtcaattgatccggaattctacaatagcatcgtgtggattaaagaaaacaacttagaagaatgcggcttggagctgtacttcattcaggatatggagatcctgggtaaggtaactacacacgagctgaaagagggtggagaatcaatacgagtgacagaggaaaataaggaagaatatatcatgttgttaacagattggcgttttactcgcggggtcgaagagcagactaaggccttcctcgacgggtttaatgaagtggctccactagaatggctacggtacttcgacgagaaagagttggaactcatgttgtgtggtatgcaggagatcgacatgtctgactggcaaaagtccactatttaccgtcactacacgaagaacagcaaacagatccagtggttttggcaggtcgtcaaagaaatggataatgagaagaggattcggctcctccagttcgtgacagggacatgccgattgcccgttgggggatttgctgagttaatcggttccaacggaccccaaaaattctgtatcgacaaggtgggcaaggaaacctggctgccaaggtctcacacgtgtttcaataggctagatctgcctccatacaaatcttacgaacagctccgggaaaagttgttgtacgccattgaggagaccgaaggctttgggcaagagtag

SEQ ID NO: 211575 - DNA, 2613 bp, synthetic construct
  misc_feature 1..2613: note = Description of Artificial Sequence: Synthetic coding sequence
  source 1..2613: mol_type = other DNA
atggccagcgccagcagcagccgggccggcgtggccctgcccttcgagaaaagccagctcaccctgaaagtagtgagcgccaagcccaaggtacacaatcggcagccgagaattaacagttacgttgaagtcgccgtcgacggactccctagcgaaacaaaaaagaccggcaaacgcataggatcatcagagctcctgtggaatgagattataattcttaatgttactgcccagtcccatctcgacctgaaagtgtggtcgtgccacaccctgaggaacgaactgctcggtactgcatcggtgaacctgagtaatgtgctgaagaataacggaggtaagatggagaacatgcagctgaccctgaatctgcagactgagaataagggctccgtagtgtctggaggtgagctcaccatcttcctcgacggaccaactgttgatctagggaacgtgccgaatggatccgccctgaccgacggttctcagttaccgagccgggacagctccggcacagccgtagcccccgagaatcgccatcagcccccttctaccaactgcttcggcggtcgctccaggacccatcgccactcaggggcttccgctaggactaccccagccacgggagagcaatctccgggagccagaagcaggcatcgtcagccagtgaaaaattcgggacactctggcctcgctaacggaacagttaacgacgaacctaccacagcaacagaccccgaggagcccagtgtggtgggggtcacttcccccccagcagcccctctgagcgttactcccaacccgaacaccaccagtcttcccgcacctgccactcccgcagagggagaggagccgagcacctccgggacacaacagctgcctgcagctgctcaagcacccgacgccctccccgcagggtgggagcagcgtgaacttcccaacggacgcgtatattacgttgatcacaataccaagaccaccacctgggaacgccccttgcccccaggctgggagaagcgtactgatccccgtgggcgattttactacgtcgatcacaacaccagaacaacaacgtggcagaggcccaccgcagagtacgtgcgcaattatgagcaatggcagtcccaacgtaatcagctgcagggggccatgcagcacttctcccagcgtttcctctaccagagttcctcagccagtacagaccacgacccactggggcccctacccccaggctgggaaaagcgccaagataacggtcgcgtatactatgtgaaccacaacacgcggacaacccagtgggaggacccccggacccagggcatgattcaagagcctgcgcttccccccggatgggagatgaaatatacctctgagggcgttcgatacttcgtcgatcataatactaggaccaccacctttaaggaccctagaccagggtttgaaagtggtactaagcaggggtctcccggagcatatgatcggagcttcaggtggaagtaccaccagttccgattcctctgccactctaacgctctcccctcacacgtgaaaatctctgttagccgccagacgctgtttgaggactcctttcaacagattatgaacatgaaaccatacgaccttcggcgccgcttatacataatcatgaggggtgaggaaggtctggattacggagggatagcacgggaatggtttttcctccttagccacgaggtgcttaatcccatgtactgtctgttcgaatacgcggggaagaacaactactgcctgcagattaatcctgcctccagcattaacccggatcacctgacttactttaggttcatcggacgtttcattgccatggccctgtatcatggaaaattcatcgatactgggtttacccttcctttctacaagaggatgttgaataagaggcccactttgaaagatctggagagtatagaccctgaattctacaatagcattgtatggattaaggagaacaatctggaagagtgtggattagagctttactttattcaggacatggaaatcctggggaaggtgaccactcatgagctgaaggaggggggggaaagtattcgcgtgaccgaggagaataaggaagaatacataatgctgcttactgattggaggtttactcgcggagttgaggaacagaccaaggccttccttgacggctttaacgaggtcgcccctctggagtggcttagatattttgatgaaaaggagctggagctgatgctgtgcggaatgcaggagatcgacatgagcgattggcagaaatctaccatctatagacattatacgaagaatagcaagcagattcaatggttctggcaggtggtgaaagaaatggataacgaaaaacggatccgcttgctgcagttcgtaaccggaacgtgtcgtctgccagtggggggcttcgctgagctcatcgggagtaacggccctcaaaagttttgcatcgacaaggttgggaaggaaacatggttacctaggtcccacacatgcttcaatcgtctggatctccccccatataaaagctacgagcaactcagagagaaactattatatgccatcgaagagacagagggattcggacaagagtag

SEQ ID NO: 211576 - DNA, 2613 bp, synthetic construct
  misc_feature 1..2613: note = Description of Artificial Sequence: Synthetic coding sequence
  source 1..2613: mol_type = other DNA
atggccagcgccagcagcagccgggccggcgtggccctgcccttcgagaaaagtcagctgaccctgaaagtggtctcagctaaaccgaaagtccataatcgacagcctcgcattaattcttacgtggaggtagcagtcgacggtctgccatccgagacaaagaagacaggcaagcgcatcggctccagcgagcttctgtggaacgagataatcatactgaacgtcaccgctcagtcgcacctagacttgaaagtgtggagttgccataccctcaggaatgagctcctggggactgcctcagtgaacctgtcgaacgttcttaaaaacaacggaggtaagatggagaatatgcaactgacccttaatttacagaccgagaataaaggctccgttgtgtcaggcggggaattaaccatcttcttggatggacccaccgtggatcttgggaacgtgcccaacggaagtgctctgacagatggcagtcagctgccctcaagggactccagcggtactgcagtcgcaccagagaatcggcaccaacctcccagtacgaattgcttcggcggccggagtagaactcatagacactcaggagctagcgcaaggactacacccgctacaggcgaacagagcccaggtgccagatccaggcaccgacaaccagtgaagaattctggccatagtggcttagcgaacggcacggtgaatgatgaacctacgaccgccacagaccccgaagagcccagtgtggtgggagtgaccagtcctccagccgccccactctctgtcacaccaaatcctaataccacctcactacccgcacctgccaccccagccgaaggcgaggaaccaagcacctctgggacgcagcagctccctgccgccgcccaggcgcctgatgccctacctgctgggtgggagcaaagagagcttcccaacgggagagtttattacgttgatcacaataccaaaaccacgacctgggaacgcccactaccccccggatgggagaagcgtaccgatccaagagggaggttttactatgtcgatcataacaccagaaccaccacctggcagcggcccactgccgagtacgtacgaaactatgagcagtggcagagtcagcggaaccagcttcagggcgctatgcagcatttttcacagcggttcctttatcagtctagctccgcctccacagatcacgatccactggggccactccctccaggttgggagaaaagacaggacaacggtagagtgtattatgtgaaccataataccagaacaacacaatgggaagacccccgcacacaggggatgattcaggagcccgctctaccccctggatgggaaatgaagtacacttcagagggcgtcagatacttcgtcgaccataacactagaactaccactttcaaagatccccgccccggctttgaatcaggcacgaaacagggtagccccggcgcctacgataggtccttccggtggaagtaccaccaattcaggtttctctgccattctaatgccctcccatcacacgtaaaaatctcagtgagtcggcagactctttttgaagacagtttccaacagatcatgaacatgaaaccttacgatctccggaggcgattatacattataatgaggggggaagagggcctggactatggagggatcgcgcgagagtggttctttctgctgagtcatgaggtccttaatcccatgtactgtctctttgaatacgcaggaaaaaataattattgcttgcagatcaatcctgccagctctattaacccagatcacttaacttatttccgtttcataggtcggttcattgccatggccctgtaccatgggaagtttatagacacaggctttacactcccgttctacaagcgcatgctgaacaaaagacccaccctgaaagacctggagtcgatcgatcctgagttttacaactctatcgtgtggataaaggaaaacaatttggaagagtgtgggctcgagttgtacttcatccaggacatggaaatcctgggaaaggttactacccacgaactaaaagaagggggggaatccattagggtgactgaggagaataaggaggagtatattatgctcttaaccgactggagatttacgaggggtgtggaggaacagaccaaagccttcttagatgggtttaatgaagtggcgcctctcgagtggctgcgatactttgacgagaaagaactggagctcatgctatgcgggatgcaggagatcgatatgagtgattggcagaaatcaaccatctaccgtcactacacaaagaacagcaaacagattcagtggttctggcaggtcgtgaaagagatggataacgaaaagcggatacggttgcttcagttcgtgacaggcacctgcagacttcctgtaggtggcttcgcggaactcatcggcagcaatgggccacagaagttctgcatagacaaagttggcaaggaaacctggctgccaagaagtcacacctgctttaaccgtttggatttacccccgtataagtcttacgaacaactaagggagaaactgctctatgctatcgaagagacggagggcttcgggcaggaatag

SEQ ID NO: 211577 - DNA, 2265 bp, synthetic construct
  misc_feature 1..2265: note = Description of Artificial Sequence: Synthetic coding sequence
  source 1..2265: mol_type = other DNA
atgcagctgaccctgaacctgcagaccgagaacaagggcagcgtggtctcaggtggggagctgactatatttctggacggtcctactgtcgacctgggcaatgtcccgaacgggagcgcattgacagatggatcccagcttccctccagggactcttcaggaacggccgttgcgccagagaatcggcaccaaccccccagtaccaactgttttggcggtcggagccgcacacatcggcatagtggtgcttccgcccgaaccaccccagccacaggtgaacagagccccggagcaagatccaggcaccgacagccggtgaaaaacagtggacactcaggcttagccaacgggactgttaacgatgaacccaccacagccaccgacccggaggaaccgtctgtcgttggagtgacaagccctccagctgcacccctgtcggtgacccccaatccgaatacgacgagcctccccgctcccgccactccagccgaaggtgaagagccgtctacctcaggtacccagcagctacccgcagccgcccaggcgcctgacgccttgcccgcagggtgggaacagagggaattgcccaacggcagggtttattatgtggaccacaacactaagacgacaacttgggaacggccactgccccccggttgggagaagaggactgatccacgaggaagattctattatgttgaccataacacaaggacgactacttggcagagaccaactgcagagtacgtccggaactatgagcagtggcaaagtcagagaaatcagctgcagggggcgatgcaacattttagccagcgcttcctgtaccagagctcaagcgcatctactgaccacgaccccttgggacctctgcctcccggctgggaaaagcgacaagacaacgggagggtgtattacgttaatcacaacactaggacaacccagtgggaagatccaagaacccagggtatgatccaagaaccggctcttcctcccgggtgggaaatgaaatacacatcagagggggtacgatattttgtggatcataataccagaactactactttcaaggaccctcgacctggattcgagagcggtacgaagcagggttcgcctggggcgtacgatcggagctttagatggaagtaccaccaattcaggttcttatgccactcaaacgccctaccatcacatgtgaaaatcagcgtgtctaggcaaactctattcgaggattcctttcagcagattatgaatatgaagccttatgatctgaggcggagactgtacatcatcatgagaggagaggaggggctggactacggaggaatagcgagagagtggttttttcttctgagtcacgaggtactcaacccaatgtactgcctgttcgagtatgctggaaagaataattactgtctacagattaatccggcttccagcattaatcctgatcacctgacatactttagattcatcggacggtttatcgccatggcgctctatcacggcaaatttattgacacgggattcaccctgccattctacaagcgcatgctcaataaacggcctacactgaaagatctcgaatccattgacccggagttctacaattctatcgtgtggattaaggaaaacaatttggaagagtgtggcctggagttatatttcattcaagatatggagattctggggaaggtcactactcacgaattgaaagagggcggcgagagtattcgcgtcactgaagaaaataaagaagaatacataatgctgctgacggactggcgatttacccgcggcgtcgaggagcaaaccaaggcctttcttgatggtttcaacgaagtagcccctctcgaatggctgcgctattttgacgaaaaggagctagagctgatgttatgtggaatgcaagaaatcgacatgtccgactggcaaaaatcaacaatatatcggcattacaccaagaattccaagcagattcagtggttctggcaggtggtgaaggagatggacaatgagaagcgcatcagacttctccagttcgtaaccggcacatgtcgactgccagtgggggggtttgccgagctgatcggttcaaatggccctcaaaaattctgtatagacaaggtcgggaaagagacctggctgcctcgcagccatacatgcttcaacagattggatctccccccatacaagtcatatgaacagcttagggagaagctactctatgccattgaagagaccgaggggttcgggcaagagtag

SEQ ID NO: 211578 - DNA, 2274 bp, synthetic construct
  misc_feature 1..2274: note = Description of Artificial Sequence: Synthetic coding sequence
  source 1..2274: mol_type = other DNA
atggagaacatgcagctgaccctgaacctgcagaccgagaacaagggcagcgttgtatccggaggtgaactgacgatctttctggacggaccaacggtggatctgggaaatgttcctaacggctccgcgctcacagacggttcccagcttccctccagagactcatctggaaccgctgtggcacccgagaatcgccaccagccccccagcactaattgtttcggcggtcgctccagaacccatcggcacagtggcgcttccgccaggactactccagcgacaggcgagcagagccctggagcacggagtagacaccgccagccagtaaagaactcaggacactcaggcttggccaacggcactgtgaatgacgagcccaccacagcaaccgatcccgaagaaccatctgtcgtcggcgttacatcacctccagcagcaccactgagcgttacgcccaaccccaatactacttcccttcctgccccggctactccagccgagggtgaggagccaagcacctccggcacccagcagttgccggccgctgcgcaggcacccgatgcattaccagccgggtgggaacagcgtgagttacccaacggccgagtgtactatgttgaccataatactaagaccacgacatgggaacgacccctccccccaggatgggagaaaagaaccgatcctcgtgggcgattctactacgtcgaccacaacactcggaccaccacgtggcagaggcctaccgcagaatatgtccgaaactacgaacagtggcagtcccagagaaaccagcttcaaggtgctatgcagcatttctcacagaggtttctgtaccagagctccagcgcctccacagaccacgatccactcggcccactgccaccagggtgggagaaacgccaggataatggcagagtgtactatgtgaaccacaatacccgcaccacccagtgggaagatccaaggacacagggaatgatacaggaaccagcactcccccccggttgggaaatgaagtacacgagtgaaggggtgcgatactttgtcgaccacaatacgcgaactaccacctttaaggacccgcgtcccgggtttgagtccggaacgaaacaagggagccccggggcatatgatcgatccttccgatggaagtatcaccaattccggtttttgtgccatagcaatgccctcccctctcacgttaagatttctgtctctagacagacactgttcgaagactcatttcagcaaattatgaatatgaagccctatgatttaagaaggcgcctgtatatcataatgcggggtgaggagggcctggactatggaggaatcgcccgcgagtggttcttcctgttatctcatgaagtgttgaatcccatgtactgcttgttcgaatacgcgggcaagaataactattgcctgcagatcaaccctgcctcatcaattaaccctgatcaccttacatattttcggtttatagggagattcattgccatggccctgtaccacggtaaattcattgatactgggtttaccctccccttctacaagcgaatgctgaacaaacggcctacccttaaggacctggaatccatagaccccgaattttacaattcaatcgtctggattaaggagaacaacctggaagagtgtggccttgaattatacttcatacaggatatggaaatcctggggaaagtcaccacacatgagctgaaggagggcggcgagagtatcagagtgaccgaggaaaataaagaagagtacataatgctgctcaccgactggcggtttacgagaggcgtcgaggagcaaacaaaagctttcctagacggcttcaatgaagtggccccccttgagtggttaaggtattttgacgagaaggaattggagcttatgctgtgtggaatgcaggaaatagatatgagtgactggcagaagagtactatttaccgccactatacaaagaattccaagcagatccagtggttctggcaggtagtcaaagaaatggacaatgaaaaaaggatcaggcttctccagtttgtcactggcacttgccgcttgccagtgggtgggttcgccgaactgattggcagcaacggcccgcaaaaattctgtattgacaaggtcgggaaagagacttggctccctagaagtcacacctgcttcaacaggctggaccttcccccctacaagtcctatgagcagctgagagagaaactgctgtatgccatcgaggaaaccgagggcttcggccaggagtag

SEQ ID NO: 211579 - DNA, 1029 bp, synthetic construct
  misc_feature 1..1029: note = Description of Artificial Sequence: Synthetic coding sequence
  source 1..1029: mol_type = other DNA
atgatccaggagcccgccctgccccccggctgggagatgaagtacacctcagaaggtgttagatactttgtggaccacaacaccaggacaaccactttcaaggaccctcggcccggtttcgaatcggggaccaagcaggggtcacctggcgcgtacgaccggagtttccggtggaagtaccatcagtttagatttctgtgtcattccaacgctctcccatcccacgttaaaattagtgtcagtcgccagactctgtttgaggactcctttcagcaaatcatgaacatgaaaccctacgatctgagaaggcggctatacatcatcatgagaggagaggagggtttggactatggcggcattgcccgggaatggttctttctactgtcacacgaagtgcttaatcccatgtactgcctcttcgaatacgccggcaagaataactattgccttcagatcaaccccgcgagctctattaatccagaccacctgacttacttcaggttcatcgggcggttcatcgctatggcactctaccatggtaagttcattgacacaggattcactcttcctttttataaaagaatgctgaataaacggcctactctgaaggaccttgagtccatagatcccgagttctataatagcatcgtgtggattaaggagaataacctagaggaatgtggtctggaactttatttcattcaggatatggaaatcttaggtaaggtgacaacacatgagctcaaagaaggcggtgagtctataagagtgaccgaggagaataaggaagagtacataatgttgttaacagattggaggtttacgaggggtgtagaagagcaaacaaaggcattccttgacggcttcaacgaagtggctccgctggagtggctgcggtactttgatgaaaaagagctcgaactcatgttgtgcggtatgcaggaaatcgacgctacaggccggcgtgccccatccactggtacgacaccgcggactgccagcaggtcatccggttccggccggtggtag

SEQ ID NO: 211580 - DNA, 1296 bp, synthetic construct
  misc_feature 1..1296: note = Description of Artificial Sequence: Synthetic coding sequence
  source 1..1296: mol_type = other DNA
atgatccaggagcccgccctgccccccggctgggagatgaagtacacatcagagggtgtgagatattttgtggatcataacacaaggaccaccaccttcaaagatccacgccctgggttcgaatccggtacaaaacagggctctccaggtgcttacgatcgctccttcagatggaaatatcaccagttcagattcctgtgccactcaaatgcgctcccatcacatgttaaaatttccgttagccggcagaccctcttcgaagattccttccagcagatcatgaatatgaagccatacgatctgcgccgcaggctctacatcatcatgcgtggcgaggagggcctggactatggcggcattgctagggagtggtttttcctgctctctcacgaagtgctgaaccccatgtactgcctgtttgaatacgccggtaagaataactactgcttacagatcaaccctgcctctagcataaatcccgatcacctcacgtactttcgcttcataggccggttcatcgcaatggccctttaccacggaaagttcatagacacaggcttcactctgccattctataagaggatgctcaataaaaggcctactctcaaggatctagagtccattgatccagaattctataattccatcgtttggattaaggaaaataatctcgaggagtgtggacttgaattgtactttatccaggatatggagatcctgggaaaggtgacaacccacgaactgaaggagggtggcgagtcaataagggtaaccgaagaaaacaaagaagagtatatcatgctgctcacagattggcgattcacacggggagttgaagaacagacaaaggctttcttggacggcttcaatgaggtagcccccctcgaatggttacgttatttcgatgagaaggagttggaacttatgctgtgcgggatgcaggagatagatatgagtgattggcagaaaagtaccatctatcgccactacaccaagaactccaaacagattcaatggttctggcaggtcgttaaggagatggataacgaaaaacgcatccgcctgctccaatttgtaacaggcacctgccgactccccgtaggcgggttcgctgagctgattggctcaaacggtcctcagaagttttgtatcgataaagtcggaaaggaaacctggttgccaaggagccacacctgcttcaacagattagatctcccaccctataagagctacgagcaactgcgtgagaagctgttgtacgctatcgaggagactgaaggctttggccaagagtag

SEQ ID NO: 211581 - DNA, 1008 bp, synthetic construct
  misc_feature 1..1008: note = Description of Artificial Sequence: Synthetic coding sequence
  source 1..1008: mol_type = other DNA
atggccagcgccagcagcagccgggccggcgtggccctgcccttcgaaaagtcacagctcaccctgaaggtggtgtccgccaagccgaaggttcacaaccgccagccccggatcaattcgtatgtggaagtcgccgtggatgggctaccttctgagacaaaaaagactggaaaaaggattggcagctctgaattactgtggaacgaaatcatcattcttaacgtcacagcccagtcacacttggacctcaaggtgtggtcctgccacaccctacggaatgaattgcttgggaccgcgagtgtcaacctgagcaacgttctgaaaaataatggaggtaaaatggagaacatgcagttgactctcaatcttcagaccgagaataagggctccgtggttagcggaggggaactgactatttttcttgacggacccacagtggacctgggtaacgtccctaatggatctgcattgacagacggctcccaactgccctctagagattctagtgggacagctgtggcgcctgagaaccggcatcaacctccttctactaactgcttcggcggcaggtctagaacccatcgacactctggcgcgtcagccagaactactcccgctaccggagaacagtcccctggggctagatctcgccatcggcagcctgtaaaaaattctggccacagtgggctggcaaacgggacagtcaacgatgagcccaccaccgcgacagatcccgaggagccctcggtggtgggagtaacctccccccccgcagctcctctgagcgtcacccctaacccaaatactactagtctccccgccccagccacgccagctgaaggcgaggagcctagcacctctgggacccaacagctcccggcagccgcccaggcaccagacgccttgccagcggggtgggagcagcgtgagctgccaaacggcagggtctattacgtcgatcacaatacaaagaccaccacctgggaaaggcccctcccgccagggtag

SEQ ID NO: 211582 - DNA, 210 bp, synthetic construct
  misc_feature 1..210: note = Description of Artificial Sequence: Synthetic coding sequence
  source 1..210: mol_type = other DNA
atggagagccccaagaagaagaaccagcagctgaaggtgggcatcctacatctgggctctaggcagaagaagatccgcatacagctccgttcccaagtgctgggcagagagatgagggatatggagggggatcttcaggagttgcaccagtcaaacactggggataaaagcggttttggtttcagaagacagggcgaagataacacttag

SEQ ID NO: 211583 - DNA, 246 bp, synthetic construct
  misc_feature 1..246: note = Description of Artificial Sequence: Synthetic coding sequence
  source 1..246: mol_type = other DNA
atggagagccccaagaagaagaaccagcagctgaaggtgggcatcctgcacctcggatcacggcagaaaaagatacgtattcaacttaggtcgcagtgcgctacgtggaaggtgatttgtaagtcctgtatcagccagactccagggatcaacctcgacttggggtccggagttaaggtgaaaatcatcccgaaggaggagcattgcaaaatgcccgaggcaggagaagaacagccccaggtgtag

SEQ ID NO: 211584 - DNA, 441 bp, synthetic construct
  misc_feature 1..441: note = Description of Artificial Sequence: Synthetic coding sequence
  source 1..441: mol_type = other DNA
atgctgctgtggtgccccccccagtgcgcctgcagcctgggcgtgttcccttctgcaccttcacctgtctgggggacaagacggtcctgtgaacctgccactagggtgcccgaggtgtggatactgtcacccctcttaaggcacggggggcatacacagacccaaaaccacaccgcaagtccccggtcgcccgtgatggagagtcccaagaagaagaatcaacagcttaaagtcggtatactccacctggggtctaggcagaagaaaattcgaattcaacttaggtcccaatgcgccacgtggaaagtgatctgcaaatcctgcatatctcaaactcctggaattaacttggacctgggttccggcgttaaagtgaagattatccctaaagaggagcattgcaagatgcctgaagccggagaagaacaaccccaagtgtag

SEQ ID NO: 211585 - DNA, 210 bp, synthetic construct
  misc_feature 1..210: note = Description of Artificial Sequence: Synthetic coding sequence
  source 1..210: mol_type = other DNA
atggagagccccaagaagaagaaccagcagctgaaggtgggcatcctgcacctgggctctaggcagaagaaaataagaatacaactgagaagccaggtgctcggcagagagatgcgggatatggaaggtgaccttcaggaattgcaccagagcaacacaggagataaatcaggttttgggttcaggcggcaaggagaggataatacatag

SEQ ID NO: 211586 - DNA, 210 bp, synthetic construct
  misc_feature 1..210: note = Description of Artificial Sequence: Synthetic coding sequence
  source 1..210: mol_type = other DNA
atggagagccccaagaagaagaaccagcagctgaaggtgggcatccttcatctcggaagtcgccagaagaagatcaggatccaactgcggtctcaggttcttgggcgcgagatgcgggatatggagggcgatctgcaggagttgcatcaaagtaataccggagacaagagcggtttcggattccgccgccagggtgaggacaatacctag

SEQ ID NO: 211587 - DNA, 246 bp, synthetic construct
  misc_feature 1..246: note = Description of Artificial Sequence: Synthetic coding sequence
  source 1..246: mol_type = other DNA
atggagagccccaagaagaagaaccagcagctgaaggtgggcatcctgcatctgggcagcaggcagaaaaaaatcaggatccaattgaggtctcaatgtgccacctggaaggtaatttgcaagagctgcataagccaaactcctggaattaacctggaccttggaagcggggtgaaggtcaagattatccctaaagaggaacactgcaaaatgccggaagctggggaggagcagccgcaagtttag

SEQ ID NO: 211588 - DNA, 210 bp, synthetic construct
  misc_feature 1..210: note = Description of Artificial Sequence: Synthetic coding sequence
  source 1..210: mol_type = other DNA
atggagagccccaagaagaagaaccagcagctgaaggtgggcatcctacaccttggcagccgccagaagaagatcagaattcagctgagatctcaggtcttggggcgagaaatgcgagatatggagggagacttacaggaactgcaccagtcaaacacaggcgacaaatccggcttcggctttagacggcagggcgaagataatacatag

SEQ ID NO: 211589 - DNA, 441 bp, synthetic construct
  misc_feature 1..441: note = Description of Artificial Sequence: Synthetic coding sequence
  source 1..441: mol_type = other DNA
atgctgctgtggtgccccccccagtgcgcctgcagcctgggcgtgtttccttctgcaccctcacctgtgtgggggacaagacgaagttgcgagcccgctactcgggttccagaggtctggatcctgtcacctctgctgcgacacggaggacacacccagacccagaaccatacggcaagtccccgctcacccgttatggagtcccccaaaaaaaaaaaccagcagctgaaagtcggcatcctgcatttagggtccaggcagaagaagattcgcatacaactgcggtcgcagtgcgccacatggaaagttatctgcaaatcttgcatttcacagaccccagggattaacttggatctcggcagtggagtgaaggttaaaatcattccgaaggaagagcactgcaagatgccagaggcgggagaggagcagccccaggtgtag

SEQ ID NO: 211590 - DNA, 246 bp, synthetic construct
  misc_feature 1..246: note = Description of Artificial Sequence: Synthetic coding sequence
  source 1..246: mol_type = other DNA
atggagagccccaagaagaagaaccagcagctgaaggtgggcatcttacacctcggatcccgtcagaagaagattaggattcagttaagaagtcagtgtgctacctggaaagtgatttgcaagtcctgtatatcgcagactccgggcattaacctcgacttaggttccggcgtgaaggtgaagataatccccaaagaggagcactgtaaaatgcccgaggctggcgaggaacagccacaggtatag

SEQ ID NO: 211591 - DNA, 210 bp, synthetic construct
  misc_feature 1..210: note = Description of Artificial Sequence: Synthetic coding sequence
  source 1..210: mol_type = other DNA
atggagagccccaagaagaagaaccagcagctgaaggtgggcatccttcacttgggatccaggcagaaaaagatccgcatacagctcaggtcccaagttctcggccgggagatgagggatatggagggagatttacaggagttgcatcagagcaacacaggcgacaagtccggttttggatttaggagacaaggcgaagataatacatag

SEQ ID NO: 211592 - DNA, 246 bp, synthetic construct
  misc_feature 1..246: note = Description of Artificial Sequence: Synthetic coding sequence
  source 1..246: mol_type = other DNA
atggagagccccaagaagaagaaccagcagctgaaggtgggcatcctgcacctggggtctcggcagaaaaaaatccgaattcaattgcgctctcagtgcgccacctggaaagtcatctgtaagtcatgcatttcacagacccccgggattaatctcgacctaggatctggtgtgaaagtgaagatcatccctaaagaggaacactgtaagatgccagaagctggcgaagagcagcctcaagtgtag

SEQ ID NO: 211593 - DNA, 441 bp, synthetic construct
  misc_feature 1..441: note = Description of Artificial Sequence: Synthetic coding sequence
  source 1..441: mol_type = other DNA
atgctgctgtggtgccccccccagtgcgcctgcagcctgggcgtgttcccttcggccccaagtcctgtgtggggaactcgacgttcttgcgagcccgcgactagggtgcccgaggtatggatcctcagtcctctgttgcggcatggcgggcatactcagacacagaaccatacggcctctcccaggagccccgtcatggagagccctaagaagaagaaccagcagctaaaagtcgggattcttcatctcggttcacgtcagaaaaagattaggatccaattgcgcagccagtgcgccacctggaaggtgatttgcaaatcttgcatatctcagacgcccggaatcaatttagaccttggcagcggtgtgaaagttaagatcattcctaaagaagagcactgcaaaatgcccgaagctggcgaggaacagccgcaggtatag

SEQ ID NO: 211594 - DNA, 210 bp, synthetic construct
  misc_feature 1..210: note = Description of Artificial Sequence: Synthetic coding sequence
  source 1..210: mol_type = other DNA
atggagagccccaagaagaagaaccagcagctgaaggtgggcatcctccatctggggtcccgccagaagaagattcggatccagttgaggagccaggtcctgggacgggaaatgcgagacatggaaggggatctgcaggaactgcatcagtccaacactggcgataagtccggttttggcttccgcagacagggggaggacaacacctag

SEQ ID NO: 211595 - DNA, 210 bp, synthetic construct
  misc_feature 1..210: note = Description of Artificial Sequence: Synthetic coding sequence
  source 1..210: mol_type = other DNA
atggagagccccaagaagaagaaccagcagctgaaggtgggcatcttgcacctgggtagtaggcagaaaaaaatcaggattcagctgcgttcccaagtcctgggcagggagatgagggacatggaaggagacctgcaggagctgcaccagtccaataccggggacaagtctgggtttggtttcagacggcaaggtgaagataacacctag

SEQ ID NO: 211596 - DNA, 246 bp, synthetic construct
  misc_feature 1..246: note = Description of Artificial Sequence: Synthetic coding sequence
  source 1..246: mol_type = other DNA
atggagagccccaagaagaagaaccagcagctgaaggtgggcatcctccacctggggtcgagacagaaaaagatacgcatacagcttcgctcccagtgtgccacctggaaagtgatctgtaagtcttgcatatctcaaacacccggaatcaaccttgatctgggctccggcgtgaaggtcaagattatccctaaagaagagcattgcaagatgccggaggccggcgaagagcagcctcaagtgtag

SEQ ID NO: 211597 - DNA, 441 bp, synthetic construct
  misc_feature 1..441: note = Description of Artificial Sequence: Synthetic coding sequence
  source 1..441: mol_type = other DNA
atgctgctgtggtgccccccccagtgcgcctgcagcctgggcgtgttcccctcagcaccatccccagtttggggtacaagaagatcatgcgaaccagccaccagagttccagaagtatggatccttagccctctgctgagacatggaggacatactcaaacacagaatcataccgcctcgccaagaagtcccgtcatggaatccccaaagaagaaaaaccaacagctgaaggttggaattctccaccttggttcacggcagaaaaagatccggatccagctgcgctcacagtgcgccacctggaaggtgatttgcaagtcctgtataagtcagacccctggaattaacttggatttaggctccggcgtgaaggtaaaaattatacccaaagaggaacactgcaaaatgcccgaagctggagaggagcagcctcaggtgtag

SEQ ID NO: 211598 - DNA, 336 bp, synthetic construct
  misc_feature 1..336: note = Description of Artificial Sequence: Synthetic coding sequence
  source 1..336: mol_type = other DNA
atgatctggcggggccggagcacctaccggccccggccccggcggtctgtgccacctccagaacttatcggacccatgctagaacctggcgacgaagaacctcaacaagaagaacctcctacagagtccagagaccctgctcctggccaagagagagaggaagatcagggagcagccgaaacacaagtgcctgatctcgaggccgatctgcaggagctcagccagtccaagactgggggcgaatgtggcaatgggcctgatgaccaagggaaaatacttcccaagtcagaacaattcaaaatgccggaggggggggaccggcagcctcaggtatag

SEQ ID NO: 211599 - DNA, 336 bp, synthetic construct
  misc_feature 1..336: note = Description of Artificial Sequence: Synthetic coding sequence
  source 1..336: mol_type = other DNA
atgatctggcggggccggagcacctaccggccccggccccggcggtcagtccctcctccagagctaatcggcccaatgctcgagccaggcgacgaagagccacagcaagaggagccacccaccgaatccagggatcccgccccgggccaggaaagggaggaagatcagggcgctgccgagactcaggtaccggatcttgaagccgatctgcaggagctcagccaatccaagactgggggcgaatgcggtaatgggcctgatgaccagggcaagattctgcccaaatccgagcagtttaaaatgcctgaagggggcgaccgtcagccacaggtgtag

SEQ ID NO: 211600 - DNA, 4002 bp, synthetic construct
  misc_feature 1..4002: note = Description of Artificial Sequence: Synthetic coding sequence
  source 1..4002: mol_type = other DNA
atgaccgccgacaagctggtgttcttcgtgaacggccggaaggtggtcgaaaaaaacgcagacccggagacaacactcttggcgtacctgcgaaggaaactcggactctctgggaccaagctcggatgtggagagggggggtgtggggcctgcacagtgatgctaagcaagtacgatagactacagaacaagattgttcacttcagcgctaatgcatgcttggccccaatctgctctctgcaccacgtagccgttacgacagtcgagggcattggtagcacaaaaactagactgcatcctgtgcaggagcggatagccaaatctcacggctcccagtgcggtttctgcaccccgggaatcgtgatgagcatgtacaccctcctgcggaatcagcccgagccgactatggaggagattgagaacgcttttcaggggaatttgtgtcgatgcacgggctatcgtcctatcttgcagggcttccggacattcgcccgtgatggcggatgctgtggcggcgatggcaataacccgaattgctgtatgaatcaaaaaaaggaccacagcgtcagtctgtccccatccctgttcaagcccgaggagttcacccctttagatcctacccaggagcccatcttcccacccgaattgttacgcttgaaggacacccctcgcaagcagctgcgctttgaaggagaacgggtgacctggatacaagcaagtacactgaaagaactcttggacttaaaagcccagcaccccgatgccaaacttgttgttgggaataccgagattggtatcgagatgaaatttaaaaatatgctgtttcctatgattgtatgcccggcgtggattccagaattgaacagtgttgagcatggccccgatggcataagcttcggcgcagcatgccctttatcaatcgtcgagaaaacactggtcgatgccgtggccaagctgcccgcccagaagacagaggtcttcagaggggtcctggagcagcttaggtggtttgccggaaaacaggtgaagtccgtggcaagtgtaggtggcaatataatcacggccagtccgatcagtgacttaaatcctgttttcatggcgtcaggagccaagttaacacttgtcagtcggggcactaggcggaccgtccaaatggaccacaccttcttcccgggttatcggaaaaccctactatccccagaagagatcctcctgagcatagaaataccatactctcgggagggggaatatttttctgcctttaaacaggcatctcggcgcgaggacgacatcgcaaaagtaacatctggtatgcgtgtgctattcaagcctggaacgacagaggtccaagaactagccctttgctatggaggcatggctaaccggaccatcagtgctctgaagacgacacagcggcagctcagcaagctttggaaggaggaactgctccaggatgtatgtgccggattggccgaagaactgcatcttcccccggacgccccgggcggtatggttgatttccggtgcacacttacactctcttttttttttaaattttatctcaccgttttacagaaattagggcaggagaatctcgaggataaatgcggaaagcttgacccaacattcgctagcgcgacgctgctgtttcaaaaagatccgcccgccgacgttcaactgttccaggaggtgcctaaaggacagtcagaggaggacatggtggggcgcccgctgcctcatctggctgcagacatgcaggcatcaggcgaggccgtttactgtgatgacatacctcgatacgaaaatgaactgagtctgagactggtcacttcaacccgggcccacgcaaagattaagtcaatcgacactagtgaggcaaagaaggttccgggcttcgtttgcttcatttctgctgacgacgtgcccggctcgaacattacgggaatatgcaatgatgagacagtgttcgcaaaggataaagttacctgcgtgggacacattattggggctgtggtggccgatacaccagaacatacccaaagagccgcccaaggggtgaaaattacttatgaggagttgcccgctatcatcaccatcgaagacgcaattaagaacaacagtttctacggcccagaactcaagatagaaaagggcgacctcaagaaaggtttctccgaggccgacaacgtcgtgagcggcgagatttacataggcggccaggagcacttctacttggaaacccactgtacaattgctgtccctaaaggcgaggccggagaaatggagctgtttgtcagcacacagaataccatgaaaacgcagtccttcgtagcgaaaatgcttggagtgcccgctaaccgtattgtagtgagagtgaagaggatggggggcggtttcggtgggaaggagactcgcagcacagttgtttccacagcggtggcactggctgcgtacaagactggacgtccggtacgctgcatgttagatagggacgaggatatgttgattacaggtgggcgacatccctttctcgcacgctacaaagtgggattcatgaaaaccggaaccgtggtggctctggaagtcgatcatttttccaacgtaggcaacactcaggacctgtcgcagtctatcatggagagggcccttttccacatggacaattgctataagattcctaacattagagggacagggagactgtgcaaaaccaatctcccgagcaacacagctttccgtgggtttggggggcctcagggaatgctcatagctgaatgttggatgtccgaggtcgcagtaacttgcggcatgcctgctgaggaagtgagaaggaaaaacctctacaaggagggcgatctgacgcatttcaatcaaaagctcgaggggtttacgctgcccaggtgttgggaggagtgtctggcaagtagccaataccacgcaaggaaaagcgaagtggataagttcaataaggagaattgttggaagaaaagaggtttgtgcattattccaactaagttcgggatctcctttaccgttccgttcctcaaccaagccggcgctctgttgcacgtgtataccgacgggtccgtgctgctgacccatgggggtaccgagatgggccaaggacttcatacgaagatggttcaggtggcctcgcgggcactcaagatccctacaagcaagatctatatttccgaaacttcaaccaatacagtgcctaacactagcccaactgccgccagcgtgagtgccgatctcaacggacaggcagtctacgcagcttgtcaaaccatattgaaaagactggaaccctacaaaaaaaagaacccctccggttcttgggaagattgggttacggccgcctacatggatactgtaagcctgtccgctacaggattttatcggacgccgaacctgggatatagtttcgaaacaaactcaggcaatccttttcactacttttcttatggggtagcgtgtagtgaagttgaaattgactgccttacgggtgatcataagaatttacgtaccgatatcgtaatggacgtgggttccagtttgaaccccgctatcgacatcggccaggttgaaggagccttcgttcaggggttgggcttatttaccctagaggagttgcactactcccccgaaggcagtctgcacacacgaggcccgtcgacatacaaaattcccgcattcggttcaattccgatagaattcagagtgagcctactgcgagattgtcctaacaaaaaggccatatatgccagcaaagcagttggagaaccccctctcttcctcgctgcatcgatattttttgcaatcaaggacgccattagggcagcgagggctcagcacacagggaacaatgtgaaggagctgtttagactggattccccggcgaccccagaaaagattagaaacgcttgtgtggacaagttcacaacactgtgtgtgactggggtgcccgaaaattgtaaaccatggagcgtcagggtgtag

SEQ ID NO: 211601 - DNA, 1896 bp, synthetic construct
  misc_feature 1..1896: note = Description of Artificial Sequence: Synthetic coding sequence
  source 1..1896: mol_type = other DNA
atgaagttcgccgagcacctgagcgcccacatcacccccgagtggcggaaacagtatattcagtacgaggcgttcaaggatatgttatactccgcccaggaccaagcgcctagcgtggaggtgaccgacgaagatacggtgaagagatatttcgccaaatttgaagaaaagttcttccagacttgcgaaaaggaactggcgaagatcaacactttctacagcgagaaactggccgaggcgcaaagacggtttgccacgctccaaaatgaactgcagagtagcctcgatgctcagaaggagtctacaggagtgactacactccgtcaacgccgcaagccagtcttccacctgtctcatgaggaacgggtacagcaccgaaatattaaggatcttaagcttgctttttccgaattctatctctccctcatcttactgcagaactaccaaaacctgaatttcaccggtttccgtaagatcctgaaaaaacacgataaaatcttggaaacctcgagaggggcagattggcgcgtggctcacgtggaggtagcacccttctacacctgtaagaaaattaatcaactgatttccgagaccgaagccgttgtgacaaacgagctggaggacggggaccggcagaaagccatgaaacgcctgcgagtcccccctctcggggccgctcagcccgccccagcttggaccactttcagagttgggttgttttgtggtatcttcatagtgctaaacataacactggtcctcgctgctgtgtttaagctagagacagatcggtcgatctggcctctgatacgcatctacagaggtggatttcttcttattgagtttctgttcttattgggcatcaacacgtacggctggagacaagcgggagtcaatcacgtacttatctttgaactgaatccacgcagcaatttatcccaccaacatctgtttgaaatagcaggcttcttaggaatcttatggtgtctttctctcctggcatgcttcttcgcgccaatttctgtcattcccacctatgtgtaccctcttgcactgtacggcttcatggttttcttcctcataaatcctaccaagacgttttactacaaaagtcgcttctggctactcaagctgctctttagagtttttacagcaccctttcataaggtcggatttgctgacttctggctcgctgaccaactgaacagcctgtccgtcatcctgatggatctggaatatatgatctgtttctattctctggaactgaaatgggacgaatccaaaggactgctccccaataacagcgaagaacgggggcacagtgatacgatggtctttttctacctctggattgtcttctacatcatttccagctgctataccctaatctgggacttgaaaatggactgggggctgttcgacaagaacgctggcgaaaatactttcctgcgcgaagaaatagtctatccacaaaaggcctactactactgcgccatcattgaggatgttatactgagattcgcatggactatacagatttctatcacctcaacgactttgttgccacactctggcgatattatagcaacggtcttcgcgccgctcgaggttttccgtaggtttgtctggaatttctttcgtttggaaaatgaacacctgaacaactgcggggagttcagggccgttcgagacatctctgttgctcctctgaacgctgatgaccaaacactcctggagcaaatgatggatcaggacgacggcgtgcgaaaccggcagaagaaccgcagctggaaatataaccagagtattagcttgcgaagacctagactggcatcacagtccaaggcccgggatacgaaggtgctgatcgaagacaccgacgacgaggccaacacttag

SEQ ID NO: 211602 - DNA, 2091 bp, synthetic construct
  misc_feature 1..2091: note = Description of Artificial Sequence: Synthetic coding sequence
  source 1..2091: mol_type = other DNA
atgaagttcgccgagcacctgagcgcccacatcacccccgagtggagaaagcagtacatacaatacgaagctttcaaggatatgttgtacagcgcgcaggatcaggcaccttcggttgaggtgacagatgaggacacggtcaaacgatactttgcaaagttcgaggaaaagttcttccagacctgtgaaaaggaattggcaaagataaacacgttctacagcgagaagttagctgaggcccagcggaggttcgctaccctgcagaatgagctgcagagcagcctcgacgcccagaaggagtctaccggggttacgacactgaggcaaagacgtaaaccagtctttcacttgtctcatgaggagagggttcagcacagaaatataaaggacctgaaactggccttctccgagttttacctgtcgcttatcctgctgcagaactaccagaaccttaacttcaccggcttccgcaagatccttaagaagcatgataaaattctcgagacgagcaggggagcagactggagagtggcgcacgtagaagtagcaccattctacacatgcaaaaaaatcaaccagcttataagtgaaaccgaagctgtggtgaccaatgagctggaggatggcgaccgccagaaagcaatgaaacgactgcgcgtgccacccttgggtgcagctcagcctgcccctgcatggactacattccgcgtgggtcttttctgtgggatcttcatcgtcctgaatataaccttggtgctcgcggccgtttttaaacttgagactgaccgctcaatttggcccctcattcgaatctatcgaggaggctttctcctaatcgagttcctgttccttttgggtattaacacatacggatggaggcaggcaggggtcaaccatgtgctcatcttcgagctcaatccgcgttcaaatttatctcaccaacacttgtttgagatcgccggcttcctgggtattctctggtgcctctcgctcttagcgtgctttttcgcgcctatatctgtgatccccacctatgtctatccactcgccctttacggctttatggttttcttcttaattaatccgacaaagactttttactataaaagtaggttttggttactcaagctgttgttccgcgtgtttacagccccctttcacaaggttgggttcgctgacttttggttggcggatcagcttaactctctcagcgtgattttgatggacctggaatatatgatctgtttctattctttggagctaaagtgggatgaaagtaagggtttgctgcctaacaactctgaggaaagcggaatctgccacaagtacacatatggtgttagagcgattgtgcagtgtatcccagcttggcttcgttttatccaatgtttgcggaggtatcgtgacacgaaacgggcctttccacacttggtgaatgctggcaagtacagtactacattctttatggtcaccttcgccgccttatactccacccataaggagaggggacactcggatacaatggtcttcttttatttgtggattgttttctacatcatcagcagctgctacaccctaatctgggatctgaagatggattggggcctcttcgacaaaaacgccggggagaacacctttttgcgggaagagattgtgtacccccagaaagcatactactactgcgctatcatcgaagacgtgatcttacggttcgcctggaccatccagattagcatcacctccaccaccctgttgccccactcaggcgatatcatcgcgacagtcttcgcccccctcgaggtgtttaggcgtttcgtgtggaacttctttagattggagaacgagcatcttaataactgtggagagtttcgtgcagtgcgcgatatatctgtggcccccctgaatgccgatgatcagactctgttggaacagatgatggaccaggatgatggggtgcgaaatcgtcagaagaaccggtcttggaagtacaatcagtctatctccctgaggagacctcggctggcctcccagagtaaggccagggacacaaaagtactgattgaagacaccgatgatgaggcgaatacctag

SEQ ID NO: 211603 - DNA, 543 bp, synthetic construct
  misc_feature 1..543: note = Description of Artificial Sequence: Synthetic coding sequence
  source 1..543: mol_type = other DNA
atggagagctggtggggcctgccctgcctggccttcctgtgcttcctaatgcatgccagggggcagagagattttgatttagcggacgcgctcgatgatcccgagcctacgaaaaagcccaattctgacatataccctaagcctaaacctccatattatcctcagcctgagaatcccgatagcggggggaatatataccctagaccaaaaccccggccccagcctcaacctggaaacagcggaaacagcggcggatattttaatgatgttgacagagacgacggacggtacccgcccagaccgcgcccaagaccccccgcaggggggggaggcggcggctattcttcctacggaaactccgacaacactcatggtggcgaccatcacagcacctacggtaatccggagggtaatatggtcgccaaaatcgtgtccccaatcgtgtcggttgtggtggtcaccctgctgggtgcagcagcaagctatttcaagctgaacaatcgccgtaattgtttccggacccatgaacccgagaacgtgtag

SEQ ID NO: 211604 - DNA, 588 bp, synthetic construct
  misc_feature 1..588: note = Description of Artificial Sequence: Synthetic coding sequence
  source 1..588: mol_type = other DNA
atggagagctggtggggcctgccctgcctggccttcctgtgcttcctgatgcatgccagggggcagagagacttcgatctggcggatgctctcgatgatcccgagcctacaaagaagcccaacagcgacatatatcccaaacctaagcccccttattacccccagcccgaaaatccggattcagggggaaacatctatcccagaccaaagccgcgcccgcagcctcagcctggaaactcggggaattccggaggatatttcaacgatgtggacagggacgatgggcgttaccctcctcgccctcgtcctcgcccacctgcaggaggcggcggtggcgggtactccagttatggaaattcagataacacccacggtcggggtggctaccgactgaactccagatatggaaacacatacggcggcgatcaccacagcacctacggcaacccagagggtaatatggtcgcgaagattgtaagtcccatcgtcagcgtcgttgttgtgacactgctcggagccgccgcttcgtatttcaaattaaataatcgacgcaattgttttaggacacatgaacctgaaaatgtgtag

SEQ ID NO: 211605 - DNA, 546 bp, synthetic construct
  misc_feature 1..546: note = Description of Artificial Sequence: Synthetic coding sequence
  source 1..546: mol_type = other DNA
atggagagctggtggggcctgccctgcctggccttcctgtgcttcctgatgcacgcccggggccagagagattttgacctggcggacgcgctggacgatcccgagcccaccaaaaagcccaattcagatatctaccctaagccaaaacccccttactaccctcagccagaaaacccggactcaggggggaacatttatccaaggcctaagccaagaccgcagccacagcctggcaacagcggcaattccgggggatcttacttcaatgacgtcgatagggatgatggaagatacccacctcggcccaggcctcggccaccagcaggcggagggggtggcggttattcatcatacggcaacagcgacaatacgcacggaggtgatcatcattcaacttacggtaatcctgaggggaacatggtggcgaagatcgtttccccaatagtttcagtcgttgttgtcaccctgcttggagcagccgcctcttatttcaaactcaataatcgacggaattgctttcgcactcacgaacccgagaatgtctag

SEQ ID NO: 211606 - DNA, 129 bp, synthetic construct
  misc_feature 1..129: note = Description of Artificial Sequence: Synthetic coding sequence
  source 1..129: mol_type = other DNA
atggtggccaagatcgtgagccccatcgtgagcgtggtggtggtgacactgttaggagccgcagcatcctactttaaactgaataatagaagaaattgtttccgcacacacgaacccgaaaatgtgtag

SEQ ID NO: 211607 - DNA, 10650 bp, synthetic construct
  misc_feature 1..10650: note = Description of Artificial Sequence: Synthetic coding sequence
  source 1..10650: mol_type = other DNA
atgttccccatgcagaagggcagcctgaacctgctgcggcagaagtgggagtcttgcgactatcagaggtctgagtgccaccctcgcgattcccactgtacaatatttcaaccgcaggaaagcaagctgctagccccggagggtgaagtcgtgtctgctcctcagtccctggaccccaccagcctcccctattcgacaggagaggaaatgtggtcttcgaaacccgaggagaaagactccgtcgataaaagcaataacacacgggagtacgggaggcccgaagtcctcaaggaagactctctgtcttcccgaagaaggatcgaaagattttcaatcgccttagacgaactgaggtccgtgttcgaagcccctaaaagcgggaacaaaccagcggagtatggagggaaggaagttgagattgaacggtctctgtgcagtcccgccttcaaatcgcaccccggctcccagctcgaggactctgttaaggacagcgacaagaagggcaaagagacgagcttcgataaaatgtctccggaaagcggacactcccggatctttgaagccacagcagggccgaacaaaccggagtccggtttcgcagaggactcagccgctcgcggtgaaggcgtgagtgatcttcacgaagtagtgtccctgaaggagagaatggccagatatcaagcagccgtgtcacgaggagactgccgttctttcagtgctaatatgatggaggagtccgagatgtgcgcagtcccgggaggacttgctaaggttaaaaagcaattcgaggacgagatcacctcctccaggaacacatttgcccagtaccagtatcagcatcaaaatcggtctgagcaggaggccatccattcttcccaggttggaaccagcagaagcagccaggaaatggcccgcaacgagcaggagggcagcaaagtacaaaagattgacgttcacggaaccgagatggtgtcacatttagagaagcatacagaggaggtcaaccaggccagtcagtttcatcagtacgtgcaggaaactgtgatcgataccccggaggacgaggaaatccctaaggtgagcaccaagcttctaaaggagcagttcgagaaatcggcacaggagaagatcttgtattcagataaagaaatgacgacgcccgccaagcaaatcaagactgaatccgagtatgaagaaacatttaagccatcctccgttgtaagtacttccagcacatcctgcgtcagtacttcccagagaaaggaaacctccaccacgaggtactctgatcactctgttacctcctcaaccctggcccagatcaatgcgacgtccagtggaatgaccgaggagtttccacccccacctcccgatgtgctgcagacatctgtagatgttaccgcgttctctcaaagcccggagctccctagtcctcccaggcgcctgccagtccctaaggacgtgtactcaaagcagagaaatttatatgagctgaataggctttataagcacatccatccagagcttaggaagaacctggaaaaagattatatatccgaagtgtccgagatcgttagttcacagatgaacagtgggagttcagtgagtgccgacgtacagcaggccaggtatgtgtttgagaataccaacgacagcagccaaaaggacctcaactccgagcgcgagtacctggagtgggatgagatccttaaaggggaggtgcagtccattcgctggatatttgagaaccagccactggatagcattaataatggcagtcctgatgaaggcgacatttccagaggaattgcggaccaggaaattatcgctggcggagacgtcaagtacaccacttggatgtttgaaacacagcctatcgataccttgggagcctattcctccgacaccgtggagaacgctgaaaagatccccgaactggcccgaggggacgtgtgcaccgcaagatggatgtttgagactagacccctggatagcatgaacaaaatgcaccagtcccaagaagaatcagccgttacaataagtaaagacatcaccggtggtgacgtcaaaactgtaaggtacatgttcgagacacagcatttggaccagcttggacagctacactcggtcgatgaagtccatctgctacaactacgtagcgagcttaaagagatcaaagggaacgtcaagagatcaatcaagtgttttgagactcagccactgtacgtcatcagagatggaagcggccagatgctggaaatcaaaaccgtacaccgagaggatgtggagaaaggagatgtgcgcaccgcccggtggatgtttgaaacccaaccgttagacacaattaataaggacattacagagatcaaagttgttaggggaatcagcatggaagaaaacgtcaaggggggggtctctaaggccaagtggctcttcgagactcagcccttggagaaaatcaaggaaagtgaggaggttatcatcgaaaaggagaaaatcattggaactgacgtgagtcgaaagtgttggatgttcgaaacccagccgctagacattctgaaggaggtcccggacgctgactctctccagcgggaggagatcatcgggggggatgtacaaaccactaagcacctgttcgaaacacttccaatagaggctctgaaggattcccctgatattggcaaactccagaagataacagctagtgaggaagagaaaggcgatgtacgacaccagaaatggatctttgagacacagcccttggaggatataagaaaagataaaaaagagtacacacggacggttaagctcgaagaggttgatcgcggggacgtgaagaattatactcacatcttcgagtcaaataaccttattaagtttgacgccagtcacaaaattgaggtggaaggcgtgacaagaggagctgtggagttgaataaatcattattcgaaacaacacctctatacgccatccaggatcctctggggaagtaccaccaggttaagacagtccagcaggaagagatcgtcaggggagacgtgagatcttgtagatggctttttgaaacacgaccaatcgaccagtttgatgaaagcatacacaaatttcagatcatccgaggcatatcagcacaggagattcaaaccggcaacgtcaaatcagcgaaatggcttttcgaaactcaacctctggactcaattaagtacttctccgacgttgaggaaactgaaagtaagaccgagcaaactcgggatatcgtgaagggagacgtgaagacatgtaagtggctcttcgagactcagcctatggagagtctctatgagaaagtatccctcatgacctccagcgaggagatacacaaaggtgacgtcaaaacatgtacctggctgttcgaaacacagccactggacacgatcaaggatgacagtgagaccgcagtaaaactacaaactgtcaaacaagaggaaattcagggtggagacgtgagaactgcctgctttctcttcgaaacggaaaacttagattctatccaaggagaggaggtgaaagagatcaaacccgtcgagatggacatccaagccggagatgtttccagcatgcgttataagttcgagaatcagagtcttgattcaatctccagcagctctgaagaagtgctgaagaaaatcaagaccctcaaaaccgaagacatccagaaaggaaacgtgcttaattgccgctggcttttcgaaaaccaacctattgacaagatcaaggaaagccaagagggcgacgagtgcgtgaagaccgtgaccgacatccagggcggggacgtgaggaaaggatgcttcatctttgagacattctcactcgatgagatcaaggaagagagtgattacatcagcaccaagaagaccatcaccgaggaggttatccagggcgacgtgaaatcttacaggatgctgttcgagacacagcccctgtacgccatccaggatcgcgagggaagctaccacgaggtcacaacagtcaaaaaagaggaggtgatacacggagacgtgcggggcacccgatggctgtttgagacaaagcctctagattccattaataagagcgagactgtctacgttattaagagcgtgacacaggaggacatccagaaaggcgatgtgagctcagtccgataccgttttgagacacagccacttgaccagatctcagaggagtcccacaacataatgccgagtatcgatcatattcaaggtggcaatgttaagacatcacgacagtttttcgaaagcgagaactttgataaaaacaactacattagaaccgtgtcagtaaacgaaatccagaagggcaatgtcaaaacgtcaacctggctgttcgaaacacataccatggacgaattgcgcggcgaaggccttgagtacgagaacataaaaactgttactcaggaggatgtgcagaagggggacgtcaaacaggctgtctggctattcgaaaacagaacctttgatagcataatggaggcccacaagggcatcaccaaaatgaccaaggaagagattcccccctcagatgttaagactaccacctggctcttcgagacaacgcccctgcacgaatttaatgaaaccagggtggagaaaatagaaattatcggcaagtctattaaggaaacccttgaagatttgtactcccagaaagttattcaggctcctggaattatcatcgaagctgacgagattggagacgtgaggatggcgaagtacaaactgatgaaccaagccagtcctgaaatccagaaagaggagatcattcgggcagatcttagaaacatcatggtcaatctgctgtcgaaacgggattgcaccgagcgcgagatcctgatcagcgaagaagagaagggaaacgtgaatctgaccaaaacccagctcctgaacagatccaccgagttccacgctgagaaagaggaaattgttaaaggcgatgttcaacaggctatcaagaatcttttctcggaggagagatctgtcaagaagggaatcttgatacaagaggatgagaagggggacattaacatgacaatttactgccttctccatgagaacgacggcgacacaattgagagggaggaggtgattggaggggacgtaaaaagaacaatccacaacttgctgagctcaacatcaaataataaaatcagtgagcgcgccaagatagacgcttctgagcggggcaacgtacagtttttcacgacatgcatcgaggcgggcgctctggactatctgaaacagctgcacacagagtctaacgagaccttaactgcgaaaaagcaggaaggggaaaaagagataatcggtggcgatgtcgaagggacgaaactgttgctgaagaagaggcagtcattagtggagagaaccgtgtccgagacagatatcatccctggggatgtccataacactgtaaaagttttcatgactgagccccaaagcacttttggaaagattcctaaagaggaaatcatcaaaggggatctcacctctacactgaattcactatcccaggctgtgaaccaaaaaactgttactaaaaccgaggagatcatcaaagggaatatgttggccaccctgaaatccttaaaagagagctctcatcggtggaaagagagcaagcagcccgacgccatacccggagatatcgaaaaggccatcgaatgtctggagaaggcaaccaacaccaagacagaaatactgaaaaaggaacttctgaaggacgatcttgagacatccctacgcagtctgaaggaggcccagaggtcgttcaaagaggtgcacaaagagggtgtgatcaaaaaggacgcaaaggctgtgatggcgggatcttcaggagaacagaaaacagacatccaccaggtggcagtgcaacggaataagaattctctgctccagccaaaaccaggcccattcgagcctgccgctaaatggcaggggggagccgataccctgagtcagacgatgggcaaatcctgtcatggaaaccttgtggaggagcgaaccgaagtgaacttgccgaaggctcctaaaggcactgtgaagattgtaatcgatcgggaacagaacaacgacgctctggagaagagcctccggcggctgtctaactcccaccacaagagtaacgtactcgaaagcggagacaagaccggtgtgtggactgataccactggagagcagcatctgagggatgagtacatgtcccggcagctcacaagtacggtttccgtgaagaacaaccttaccaccaaagagagcgatagagcagttagagagttaaagaaggacgatgtgttcaactcaattcaatcagccgggaagacggtgggaaagcagcaaacttacgaactgcggaatgaccatcaaaaaatggaaggcttccacatcaaatccccgaagaagaccaaaaatatcaaaatcctgactgacacccagtcgtctaagccttccccaactcagcacccagtgtcaatgcctgtgggtggtacatacgatctgtccggcgacttccagaagcagactcttttaaagcaggagacaaagtactccaacaaggatatcaaaaagaagaacattaacttacaacccatgtggcagctcttgcccgtagagcaggacacgagtaatgtcacagagatgaaggtctcagagaaatcacacaacacattcaaggccactaacaaaaaaagggagacggatgtccacctgaaatcccaagactttttgatgaagacaaatacgagtaccggcctcaagatggctatggagagatctctaaaccctatcaatttcaaccctgagaacaatgtgaaggaatcagagtgtccactaccacccccgtccccacccccaccacccccgagtaacgccagctccgaaattgaatttcctctcccacctccacctccgcttatgatgttcccagaaaagaacgggtttcttccttccctgagcaccgaaaagatcaaggccgagtttgaatctttcccaggcctccctctcccccccccaccagtggacgagaagtcagaacgtgagagttcaagtatgtttcttcccccacctccacctcccaccccatcgcaaaagccggcccatctgctgtcatcttcggctcccgaaaaacacagtggagacttcatgcagcagtacagtcagaaagaggccagtaatagtcagaattcccaggccaagataataaccggaaagaccggagtgctcccaccacctactctcccaaagccgaagctgccaaaacacatcaaggacaacaagaacgatttttcacccaaagtggaattggcgacttccctgagcgatatggagtgcaagattactacaagcaaggaccagaagaaggtgatggtgatgacaagcagtgagcatacagaaactaaacagaacgtgattagcaagtcgctcgatgaaagaaaacaactttcaattgactccgccaactgtctgtcacacaccgttcctgggacctcggctcccaggaagaaacagatcgctcctctgatcaaatcacactcatttccggaatccagcgggcaacaaaatcccaagccttatatgcggaagttcaagacacccctgatgatcgctgaggaaaaatatcggcagcagaaagaggagatcgagaagcagaagcaggagtcatcttattacaacatcgttaagacccagtcccaaaaccagcatatcacagaggtggagaaggaaatgcctctgcaaaagaccaacgaagaagtcagcctcagtgggatcgattccgagtgcaccgtcgtgcagccctctccgggatctcagtccaacgcccggattctgggtgtgtgctccgataatcagttgagcacaacgagccctgagaccgtagctgccaagaggctccaccatgtcctggcagccagcgaagataaagacaaaatgaaaaaggaggtgctacagtcaagtcgggatattatgcaatctaagagtgcttgcgagataaaacagtcacaccaagagtgtagcacccaacagacgcagcagaaaaagtacctcgaacaactgcacttgccacagtccaaaccaatctcccccaacttcaaggttaagacaataaagctcccgactctcgaccacactctaaatgaaaccgatcacagctacgaatcccataagcaacagtccgaaatcgatgtacagacattcacgaagaaacaatatctcaaaacgaagaagacagaggcttctacagagtgttcacacaagcagagtctggcagagcggcactatcagttgccgaagaaggaaaagcgggtgacggtgcagttaccaaccgagtccatccagaagaaccaggaagacaagctgaagatggtgccgcgcaaacaacgcgagtttagcggctcagaccggggaaagcttcccggttcagaagaaaagaaccaaggcccctccatgatcggtaggaaagaagagcgtcttatcacggagcgcaagcacgaacacctgaaaaataagtccgcacctaaagtggtgaaacaaaaggttattgacgcacacctggattctcagacgcagaattttcaacagacccaaattcaaacagctgaatccaaagccgaacataaaaaactgccgcagccatataactcattgcaagaagaaaagtgcctggaggtgaaagggatccaggaaaagcaggtgttttcgaacacaaaggactctaagcaggaaatcacccagaataagtcatttttttcctcagtgaaagagagtcagcgcgatgatgggaaaggcgccctgaacatcgtggagtttctgcgtaagagagaagaacttcaacagatactctcaagagtaaagcagttcgaggctgagcccaacaagtccggattgaagactttccagacattactaaacaccattcctggatggttgattagcgaggataagcgcgaatatgcggttcacatcgcaatggagaataatctggaaaaggtaaaagaggaaataacccatatcaaaacacaggcagaggatatgctcgtgagttacgaaaatatcatacagaccgctatgatgtccagcaaaaccggcaaacctggaaataagccaacctctttggacgagacctcatctaaagtctctaatgtgcacgtaagcaacaataagaactcagagcagaaagagaataagatcgccaaagagaagactgtacagcatcaagtggccgcacatcatgaagctaccgtgagatcccacgttaaaacacaccaagagatcaagctggacgatagtaatattcctccgccatctctgaagactagacccccctcccctactttcatcaccatagagtctactgcacgaagaaccgaaaaccctacaaaaaatgagcttagccagagccctaagaaggactcttatgtcgaacctcctcctcgaagacccatgtcacagaaaagcgaaatccacagggccaacacatcaccaagcccacccaggtccaggagcgaacaactggtccgcctaaaagacactacggcaaagctgtcgaagggtgccattccttgtcctgcagccacgcccgtcccgatagtcgagaagcggtctgagattattatgtctccagcgactctgagaaggcagatcaagatcgagaccaggggtcgcgattccccccccactattactatcccggtgaacattaaccacgccgcctccgggagtttcagagagtctgtagatgctcaggaggaaatccgcaaggtggagaaacgtgcgacctacgtccacaaggacggcttgaacagtaccgatcacatggtgccagacacagaatcttacgatgctgtggaaattatccgcaaggtggctgttccaccccggctttccgaacatactcagagatacgaggctgctaatcgcacagtccagatggccgaaaacttcgtcaatgaccccgagaacgagattaatagatggttccgagagtttgaacatggccctgtcagtgaggccaagagtaatcgccgcgtgtacgctaagggtgagacaaatcacaacattcaacaggaaagccggacattctgcaaggaagagttcggccttacctctctgggcaacactagcttcaccgacttctcctgcaaacatccaagagagctccgggaaaaaatccctgtcaaacagccacggatatgcagcgaaacacgttccctgagcgaacacttttccggcatggatgctttcgaatcccaaattgtggaatcaaaaatgaaaacctcctcttcacatagctccgaagcagggaagtccggttgcgactttaaacacgcacctcccacctatgaggacgttattgctgggcatattctcgatatctctgacagtcctaaggaagtgagaaagaactttcagaagacatggcaggaatcaggccgggtgttcaaaggccttggatacgccactgccgacgccagtgccacggagatgcggacaaccttccaggaggaatccgcgttcatctctgaagcagcagccccgcgacagggcaacatgtacactctttcgaaagacagcctgagtaacggagtgccgtccgggcggcaggccgaattctcctag

SEQ ID NO: 211608 - DNA, 2817 bp, synthetic construct
  misc_feature 1..2817: note = Description of Artificial Sequence: Synthetic coding sequence
  source 1..2817: mol_type = other DNA
atgttccccatgcagaagggcagcctgaacctgctgcggcagaagtgggagtcgtgcgattaccagagaagcgaatgtcaccctagagacagccactgcactatctttcagcctcaggaatccaagctgctggcccctgagggagaggtggtttctgctccgcaatccctcgatccgaccagtttgccttatagcactggcgaagaaatgtggtcaagtaaacctgaggagaaggacagcgtcgacaaatcaaataacacccgagagtatggtaggccagaagtgctcaaagaggattcactgtcctccagacgccgaatagaaaggtttagcatagcattggacgaactacgatctgtatttgaagctccaaagagtggtaacaagcctgccgaatacggcgggaaggaagtagagatcgagagaagtttatgtagtccggccttcaaatcccatcccggctcgcagctggaggattccgtaaaagactcagataagaaagggaaagaaacctcctttgacaagatgagcccggagagtggtcattcgcgtatcttcgaagctaccgccggccccaataagccagagagcggcttcgccgaggacagtgccgcccgcggagagggagtaagcgatctgcacgaagtggtgtccctaaaagaaaggatggcaaggtaccaggctgccgttagtagaggcgattgtcgatccttctccgcgaatatgatggaagagtctgagatgtgcgccgttcctggaggcctggccaaagtgaagaaacagtttgaagacgagatcacctcatcacgcaacaccttcgcccagtaccagtatcagcaccagaatagatccgaacaggaagccatccactccagtcaagtcggaaccagcagaagttctcaggaaatggcccggaacgaacaggaagggagtaaggtgcaaaaaatcgacgtgcacggcactgagatggtgagtcatctggaaaaacataccgaggaggtcaatcaggccagccagttccaccagtatgtgcaggagaccgttatagacacacccgaggatgaggagattcccaaagttagtacaaagttgctgaaggaacagtttgagaagtccgcccaagagaaaatcttgtactccgataaggagatgacgacgcctgcaaagcagataaaaaagcttcttctccaagataaagagatctgtatcctttgccaaaaaaccgtatacccaatggagtgtcttgtggccgataaacaaaactttcacaaaagctgcttccggtgtcatcactgtaactcaaagttatctcttggcaattatgcctcacttcatggtcagatttattgcaagcctcattttaagcagcttttcaaatccaagggaaattatgacgaaggcttcggacacaaacaacacaaagacagatggaattgtaagaatcagtcaaggtcagtggatttcattccaaacgaggaacctaacatgtgtaagaacatcgcagagaatactctggtgcccggcgatcgtaacgagcacctggacgccgggaatagtgaaggccaacgaaacgaccttagaaaactgggcgagagaggcaagctaaaagtgatatggccccctagcaaagagattcctaagaaaactctgccattcgaggaggaacttaaaatgtcaaaacctaagtggccgcctgagatgaccacactcctgtctccggaattcaaaagcgaatcccttcttgaagacgtaagaacgccagaaaacaagggtcagagacaggatcactttcccttcctacaaccctatctccagagtacacacgtgtgtcaaaaagaggacgtgattgggattaaagagatgaagatgcctgagggccggaaagatgaaaagaaagaagggagaaaaaatgttcaggaccgacccagcgaagccgaggacaccaagagcaatagaaaaagcgcaatggaccttaacgataacaataatgtaattgtccagtctgctgaaaaggagaaaaatgaaaagaccaatcaaacaaacggggccgaggtgttgcaggtcacaaataccgacgacgaaatgatgccagaaaatcacaaggagaacttgaacaaaaacaacaataacaactatgtcgccgtctcttacctcaataattgtcgacagaaaacctcaatactggaatttctggaccttctgcctttatcgagcgaagcaaatgatactgccaatgagtacgagatcgaaaaactggagaacacttccaggataagtgaacttctgggcatcttcgaaagcgaaaagacatactcccgcaatgtgctggcaatggctctgaaaaaacagacagaccgagccgcagccgggtcacccgtgcagcccgctcctaagccaagtctcagcagaggcctcatggttaaaggaggctccagcatcataagcccagatacaaacctcctgaatatcaaaggaagccacagtaagagcaagaatctccacttttttttctcaaacaccgtcaagatcacagccttttcgaagaaaaatgagaacatcttcaattgcgatttaatcgactcagtagatcagatcaagaacatgccttgtctggacttgagagagttcggaaaggacgtcaaaccttggcatgtggagactacggaagccgcaaggaataatgaaaacaccgggtttgatgcactcagccatgagtgtaccgccaagccgctcttcccgagggttgaagttcagagtgaacaattaacagtcgaggagcaaatcaaacggaaccgatgttattccgatacagaatag

SEQ ID NO: 211609 - DNA, 10650 bp, synthetic construct
  misc_feature 1..10650: note = Description of Artificial Sequence: Synthetic coding sequence
  source 1..10650: mol_type = other DNA
atgttccccatgcagaagggcagcctgaacctgctgcggcagaagtgggagagctgcgactaccagagaagcgagtgccaccccagggacagccattgcactatcttccagccacaggagtccaagcttctcgcccctgaaggtgaggtggtgtctgccccacagtctctcgaccccactagtctgccgtactccacaggagaggagatgtggtcatcaaaaccagaggaaaaagattcggtggacaagtcgaataacactcgagaatatggtagacccgaggtgctcaaggaggattcgctgtcctctcgcaggcggattgagcggttttctatagcactggacgagctgagaagcgtatttgaggctccgaaatctggaaacaagccagctgagtacggaggaaaagaggttgagattgagcggagcctgtgcagcccggccttcaaatcacacccaggaagtcaacttgaagacagcgtcaaagactcagataagaagggtaaggagacctcgtttgataaaatgagtccagagtctggacatagcagaatcttcgaagccaccgcaggaccaaacaagccagagtccggattcgccgaagactccgctgcacgtggtgagggcgtgtcggatctgcacgaagtggtgtcgcttaaagagcgcatggcgagatatcaggcagcagttagccggggcgactgtaggagtttctcagccaacatgatggaagagtccgaaatgtgtgccgtgccaggcggcctggccaaagtgaagaaacaatttgaagacgagattacctcaagtcgcaacacctttgctcagtatcagtaccagcaccagaacaggtctgagcaggaagctattcactcctcacaggtcggcaccagcaggtccagtcaagagatggccagaaatgagcaggaggggagcaaggtccagaagatagatgtgcatggcacagaaatggtgagccatttggaaaagcacactgaagaggttaaccaagctagccagtttcaccagtacgtgcaggaaacggtgatcgacacaccagaagatgaagagatcccgaaggtttccaccaagctcctaaaagaacagttcgagaaaagcgcccaggagaagatcctttacagcgataaggagatgacaaccccggcaaaacaaatcaagacggaatccgagtacgaagaaacttttaagccctcctccgtcgtgtccacctcttctaccagttgtgtgagcacctcccagcgcaaagaaacttcaactactcggtattccgaccacagcgttacgtcgtcaacgctggcccagatcaacgctacctcatccggcatgaccgaagagtttcccccaccccccccagatgtgcttcagacatctgtggacgtcacagcattctcccagagccctgaacttccaagccctcctagacgtctcccagtccccaaggatgtgtattccaaacagaggaacctgtatgagctgaacagactgtacaagcacattcaccctgagcttaggaagaacctggagaaggattatatttctgaggtgagtgaaattgtgtcctcccagatgaatagtggcagcagtgtcagcgcagatgtgcagcaagcacggtacgtgttcgaaaacaccaatgactcttcacagaaagaccttaacagtgagcgggagtacctcgagtgggatgaaatacttaaaggcgaggttcagtccatccgctggatattcgaaaatcagcccctagatagtatcaacaacggatctcccgacgagggagacattagtcgcgggatcgccgatcaggagatcatcgctgggggcgacgtgaagtataccacctggatgtttgagactcaaccaatcgatactcttggggcctattccagcgacaccgtcgagaatgccgagaaaattcccgagctggccagaggtgacgtgtgtaccgcccggtggatgttcgagactcgtcctttagactcaatgaacaaaatgcatcagagccaggaggaatcagctgtgacaatctccaaagatatcaccggaggagatgtaaaaacggtcagatatatgttcgagacacagcacttggaccagctgggccagctccactcggtggacgaggtgcacttgcttcaattaaggagcgaacttaaagagatcaaagggaacgttaaacggagtatcaagtgcttcgagacccaacctctctacgttatacgtgacggctcaggacagatgctggaaattaaaacggtccacagggaggacgtggagaaaggggacgttagaacggcccggtggatgtttgagacacagcctttagacactatcaacaaggacattactgagatcaaagtggtccgcggaatatctatggaagagaatgtgaaggggggcgtcagcaaagccaaatggctttttgaaacacagcccctcgagaagatcaaggagtccgaagaagttatcatcgagaaagaaaaaatcatagggacagacgtgagcagaaaatgttggatgttcgaaactcaacctttagatattctaaaagaggtgcctgatgccgacagccttcagcgtgaagagattatcggaggggatgtacagacaactaaacatttgtttgaaactttacccattgaagcactgaaagactccccagacattggtaagctacagaagatcactgcttcagaggaagaaaaaggtgatgtacgccatcagaagtggatattcgagacccagcctctcgaagacatacgcaaggataagaaagagtatacccggaccgtgaagctcgaggaagttgatcgcggtgatgtgaagaattacactcatatcttcgaatcaaataaccttatcaagttcgacgcttcccataagatcgaggtcgagggcgtgacgcgaggggccgttgaattgaataaatcacttttcgagaccacgcccttatacgctatccaggaccctttgggaaaatatcatcaggtgaagaccgtccagcaggaggagattgtccgaggcgatgtgcggtcctgtagatggctttttgagacaagacccattgaccagttcgatgaaagcattcacaagtttcagatcatcagagggattagtgctcaggagattcaaactgggaacgtgaaatccgccaagtggctgtttgaaacccagcccctggattccatcaagtatttttccgacgtcgaggagacagaatcaaaaaccgaacagacgcgcgacattgtcaaaggagacgtgaagacctgtaaatggctgttcgagacacagcccatggagtcgctgtatgagaaggtgtccctgatgacctcgtccgaagagattcacaaaggggacgtgaagacatgcacctggctgtttgaaacgcagccacttgacaccataaaagatgactcggaaactgctgtgaagctgcaaaccgttaagcaggaggaaatacagggcggggatgtcagaactgcatgtttcctgtttgaaactgaaaatctggatagtattcagggagaagaggttaaagaaatcaaacccgtcgaaatggacattcaggcgggggacgtttcaagcatgcgatacaaattcgaaaaccaaagcctcgatagcatatcctcttcaagcgaagaggtgctcaaaaaaataaagacgttaaagacagaggacatccaaaagggcaatgttctgaactgcaggtggctcttcgaaaatcagccaatagacaagattaaggagagtcaggagggagacgagtgcgtgaagaccgtgaccgatattcagggcggtgatgttagaaagggatgtttcatttttgaaacattttccttggatgaaatcaaagaggagtctgactacatttctactaaaaaaactattaccgaggaggttatacaaggggacgtaaagagctatcgcatgctgtttgagacacagcctctgtacgctattcaggatagggagggctcttatcacgaggtgacaactgtcaagaaggaagaggtgatccacggagacgttcgtggcactcggtggctcttcgagactaagcccctggactctattaacaagtcagagactgtgtacgttattaagtcggtcacacaggaggacattcagaagggcgatgtgtcttctgtgaggtaccggttcgaaacacagcccctcgatcagatctccgaggagagccataatatcatgccatctatcgaccatatccagggcggcaacgtgaaaacctcaaggcagttcttcgagagtgagaatttcgacaagaataattatatccggactgtctctgtcaacgagatccagaagggcaacgtaaagacctccacttggttgtttgagacgcacaccatggatgaacttaggggggagggactagaatacgagaacatcaagactgtgacgcaggaggacgttcagaaaggcgatgtcaaacaagctgtctggctgttcgagaaccggacctttgatagcattatggaggcccacaagggaataaccaaaatgaccaaggaggagattcctccctcagacgttaaaacaaccacatggctgttcgaaactacacccctccacgagtttaacgaaacacgggtggagaagatcgagatcattggaaagtctattaaagagaccctggaagacttatactcccagaaagtcattcaagcccccgggatcataatagaggctgacgagataggagatgtcagaatggctaaatacaaactcatgaatcaggccagccctgaaatccagaaggaggaaatcataagagcagacctgcggaacatcatggtcaacctgctgtccaagcgtgactgcaccgaaagagagatcctgatctcggaagaagagaaaggcaacgtgaacctgacaaaaacacagctgctgaatcgcagtacagagtttcacgcagaaaaagaagagatcgtgaaaggtgatgttcagcaagcaataaaaaatctattttcagaggagaggtcggtcaagaagggaatactgatccaggaagatgaaaagggtgatattaatatgacaatctattgtcttctgcatgagaacgacggggacacgatcgaaagagaggaggtgattgggggggacgtgaagcggactattcataatctactctcctctaccagcaacaacaagataagcgaacgcgctaagatagacgcatctgagcgaggcaatgtgcaattctttactacttgcatcgaggcaggagctctcgactatctcaagcaactccacactgagtcaaacgaaactctcaccgccaaaaaacaggaaggagaaaaggagatcattggcggagatgtggagggcacaaagttgctgctcaagaagagacagtctctggtggagaggacggtcagcgaaacagatataattccaggggacgttcataataccgtaaaagtctttatgaccgaaccccaatcaactttcggcaagattcctaaagaggaaatcataaagggtgatctgacctccacactcaacagcctctcccaagctgttaatcagaaaaccgtcacaaagaccgaagaaatcatcaaaggaaatatgttggcgactctgaagtctcttaaggagagttctcaccgatggaaggaatcaaaacagccagacgcaatccctggagacatagagaaagccattgagtgtctggaaaaagccacaaacacaaagaccgaaattcttaaaaaggaacttctcaaagacgatctcgagacatctctaaggagcctgaaggaggcacagagatccttcaaagaggttcataaagaaggcgtgattaagaaagacgccaaagctgtaatggctggctccagcggggaacagaaaacagacatacaccaagtggcggtgcaaagaaataagaacagcctgctccagcctaaacccggaccctttgaacctgctgccaagtggcaggggggtgccgacactctgagtcaaaccatgggaaagagctgtcatgggaatttggtcgaggagaggaccgaagtgaatctgccaaaagccccaaagggaactgtgaagatcgtgatcgatcgggaacagaacaacgacgccctggagaagtctctgagaagactgtccaattcacatcataagtcaaatgtgctcgagtccggcgataagacgggcgtgtggactgacaccacgggcgagcaacatctgcgcgatgagtacatgagtagacaactcacctcaaccgtgtcagttaaaaataatctcaccaccaaagaatctgacagagctgtcagagaattaaaaaaggacgacgtattcaattctatacagtccgctggtaaaactgtaggaaagcagcagacctacgagttgagaaacgatcaccagaagatggaggggttccacataaagtctccaaaaaagacgaaaaatatcaagattctgaccgatactcagagctcaaaaccttcacccacccagcaccccgtgagcatgcccgtcggtggcacttatgacttgagcggtgatttccaaaaacagactttgttaaagcaagaaactaaatattcaaataaggatattaagaagaaaaacattaatttgcagcccatgtggcagctgttgcctgtcgagcaggatactagtaatgtgacagagatgaaggtatccgaaaagtctcacaatactttcaaagccaccaataaaaaacgggagaccgatgttcacctgaaatctcaggatttcttgatgaagaccaacacttccactgggctgaaaatggccatggaacgtagtttgaatccgatcaatttcaacccagagaacaatgtgaaagaaagcgagtgtccccttccccctccaagtccgccaccaccccctccgtctaatgcttcttcggagatcgagtttccactcccaccaccccctcctctcatgatgttccccgagaaaaacgggttcctgccgagtctgtctaccgagaagataaaagccgagttcgagtctttccctgggctgccactgccgccgcccccggtggatgagaaaagtgaaagggaatctagttcaatgtttctccctccacccccaccccctacgccatctcagaaacctgcacaccttctttctagctccgctccagagaaacattctggggatttcatgcagcagtactcccagaaagaagcaagcaattcacagaattcccaggcaaagatcattacggggaaaacaggcgtcctgccacctccaactctccctaagccaaaactacctaagcacattaaggacaacaaaaatgattttagtcccaaggttgaactcgctacaagccttagcgatatggagtgtaagatcactacaagcaaggaccagaagaaggtgatggtgatgacaagttcggagcataccgaaactaaacaaaatgtaatcagcaagtcgctggacgagcggaagcaactgagcattgattcagccaactgcctgtcacatacagtgcccggtacatccgctcccagaaaaaagcagatagccccgctgattaaatctcactcattccctgagtccagcggccagcagaatccaaagccatacatgagaaaatttaaaacacccttaatgattgctgaggaaaagtataggcagcagaaggaggaaatcgagaaacagaaacaggagtccagttattataacattgtgaagacccagagccaaaatcagcatatcacagaggtggagaaagagatgcccctgcagaagaccaatgaggaggtaagcctatctggtatcgattccgagtgtactgtcgtccagccatcccccgggagccagagtaatgcacgcatccttggcgtttgttccgataatcaattatccacaacaagccctgagactgtggctgccaagcgtctccaccacgtgctggctgcatctgaggacaaggacaagatgaagaaggaagtgctgcagtcatcccgcgatatcatgcaaagcaaatctgcttgcgaaataaagcagtcacaccaggagtgctcaacccagcagacgcagcagaagaaatacctcgaacaactgcatctgccacagagcaaacctatatcacccaatttcaaggttaagaccatcaagctgcctacactggaccacacactgaacgagaccgaccactcctacgaaagccataaacagcaatcagagattgatgttcagactttcacgaagaagcagtatctgaaaacaaagaaaaccgaagccagtaccgagtgtagtcataaacagtccttagccgagagacactaccaattgccaaaaaaagagaaacgtgtcactgtgcagctgccaaccgagtctattcaaaagaaccaagaggataagctgaagatggttcctaggaaacaaagagaatttagcggttccgataggggcaaactgcccggatcagaggagaaaaatcaggggcctagtatgatcggcagaaaggaggaacggttgatcacagagcgaaagcatgagcacctaaagaataagtcagcccctaaagttgtcaagcaaaaggttatcgacgcgcatttggattcgcaaacccaaaattttcagcaaacccaaatacaaaccgcagaatccaaggccgagcataagaaactccctcaaccctataatagcctgcaggaagaaaagtgcctcgaggtgaaggggatacaggaaaagcaagttttctccaacaccaaggactccaaacaggagatcacccagaataaatcctttttctctagtgttaaggagagtcagagggacgatgggaaaggcgccctcaacatcgttgagtttctcagaaagagggaggaattacagcaaatcctctcacgtgtgaagcagttcgaggctgaaccaaacaagtcagggcttaagacctttcagaccctcctgaataccatccctggatggcttataagtgaggacaaacgtgagtacgccgtgcacatagctatggagaacaatctggagaaggttaaggaggaaatcactcatattaaaacacaagccgaagatatgctcgtgagttatgagaacattatccagacagccatgatgtcaagcaagaccgggaaaccaggaaataagccaaccagcctcgacgaaacctccagcaaggtctctaatgtgcacgtgagcaacaacaaaaactctgagcagaaggagaacaaaatagccaaggaaaaaacggtccagcatcaggtggcagctcatcatgaggccacagtgcgctcccacgttaagacgcaccaggagataaagctcgatgattccaacatcccccctcctagcctgaaaaccaggccaccgtctcccacattcattaccatcgagtcaacagcaagaagaacagagaatcctacaaaaaacgaattgtcccaatccccaaagaaagacagctacgttgaaccgccacctagaagacccatgagccagaaaagtgaaattcatagggctaacacttcaccctcacccccgagaagccggtccgaacagctcgtcaggctgaaggacactaccgccaagcttagcaagggcgccattccgtgccccgccgcaacacccgtgcccatcgtggaaaaacgctctgagattattatgtcgcccgcaaccctgcggcggcagataaagattgagacgcggggtcgggactcccctcccactatcacaatcccagtgaatattaaccacgctgcatccggctcgttccgcgaaagtgtggacgcgcaagaggaaattaggaaagtggagaagcgcgctacctatgttcacaaagatggactgaattccactgaccacatggtcccagacaccgagtcttacgacgctgttgagatcatacgaaaagtagctgttcctcccagactctctgaacatacccagcgctacgaagccgcaaaccgtaccgtgcagatggcggagaactttgtcaacgaccccgagaacgaaattaacagatggtttagagagttcgagcatgggcctgtcagcgaagcaaagagcaatcgcagagtatatgcaaaaggcgaaacaaatcataatatccagcaggaaagtcgcacattctgcaaagaggagttcggacttactagcctgggcaacacatctttcaccgactttagctgcaaacacccacgagaactgcgtgagaaaatcccagtcaaacagcctcggatttgttcagagactcgatccttgtctgagcacttcagtgggatggatgcatttgaatcccagatcgtggagtccaagatgaagacttcgtcctctcatagctcagaagctggtaaatccggttgtgattttaaacacgctccccccacatacgaggacgtgatcgctggccacattctggacatcagtgattctccaaaggaggttagaaaaaacttccagaaaacctggcaggagagtgggcgagtctttaaaggacttggatatgccactgcagatgccagcgccaccgaaatgaggacgacattccaggaagaaagtgcttttattagcgaagctgccgctcctcgacaaggaaacatgtacacactgagtaaggatagtctctctaatggtgtgccatctgggcgccaggcagagttcagctag

SEQ ID NO: 211610 - DNA, 9984 bp, synthetic construct
  misc_feature 1..9984: note = Description of Artificial Sequence: Synthetic coding sequence
  source 1..9984: mol_type = other DNA
atggcccggtaccaggccgccgtgagccggggcgactgccggagcttttcagcaaatatgatggaggaaagcgaaatgtgcgcggtccccggcggactggcaaaggtgaaaaagcagttcgaagacgagatcaccagcagcaggaacaccttcgcacagtaccaataccagcaccagaatcgctccgagcaggaggctatccactcgtcccaggtgggtactagtaggtcttctcaggaaatggcccgcaacgagcaagaggggtccaaggttcagaagattgatgtgcatgggaccgaaatggtgagccacctggaaaagcatacagaggaagtgaaccaggctagtcagtttcaccagtatgttcaggagacggttattgatacacccgaagacgaggagatcccaaaggttagcacgaaactgctgaaagagcaatttgaaaaatcggctcaggagaaaattctctattcggacaaggagatgaccacacccgccaaacagatcaagacagaatcagagtatgaggaaacatttaaaccatcatccgtggtctccactagcagcacatcttgcgtgagcacaagccagcgaaaggaaacatcaactacaagatattcagaccactcagtaacatcctcaaccttagcgcagattaatgccacttcatcgggcatgacggaagaatttcctccacctccccctgatgtcctgcagacgtccgtcgacgtcactgcctttagtcagagtcccgaattacctagcccaccacgcagactccctgtccccaaagatgtttatagtaaacaacgcaatctgtacgaactgaatagactgtacaagcacatccacccggagctgcgcaagaacctggaaaaggactatatcagtgaggtgtctgaaattgtgagctctcagatgaactcaggcagctctgtgtcggccgacgtgcagcaggctcggtatgtctttgaaaatacgaatgattcctcccagaaggatcttaacagtgaacgcgaatacctcgaatgggacgaaattctaaaaggcgaggtccagagcatccgatggattttcgaaaatcagccacttgactctattaataacggctcacccgacgaaggcgacatcagtaggggaatagcggaccaggaaatcatcgcaggcggggatgtgaagtatacgacctggatgttcgaaactcaacccattgacacactcggcgcatatagcagcgataccgttgaaaacgcagagaagatccctgagctggcaagaggcgacgtctgcaccgcacgatggatgtttgaaacacgccctctggattcaatgaataagatgcaccagtcccaggaagagtccgctgtgacaatctctaaggatatcacgggcggggacgtgaaaacggtccggtacatgttcgaaacacagcatttggaccagctggggcagctgcacagcgtagacgaggtgcaccttttgcagctcagatcagagctgaaagagataaaggggaatgttaagcgctctatcaaatgttttgagacacagccgttatacgtcatcagagatggcagtggccagatgctcgaaataaaaactgtgcaccgtgaagatgtcgaaaagggcgacgtacggaccgccagatggatgtttgagacccaacccctggataccatcaataaggatatcaccgagatcaaagtcgtgagaggcatctcgatggaggagaatgttaagggaggcgtcagcaaggcaaagtggctctttgagacccaacccctggaaaaaataaaagagtcagaagaggttataatcgagaaagagaaaatcatcggcacagatgttagcaggaagtgctggatgtttgagacccagccactcgatattttgaaagaagtgcccgacgccgactcactccaaagagaagagatcatcggaggcgatgtgcagactactaagcatctgtttgagaccctccccatcgaggccttgaaggacagcccagatatagggaagctccagaaaattactgcatccgaggaggaaaagggcgacgtgcgtcatcagaagtggatttttgagactcagccgctcgaagacattagaaaggacaaaaaggagtacacgcgaacagtgaaactcgaggaggtggatagaggcgacgtcaaaaactatacgcatatttttgagtccaataacctcataaaattcgatgcatcgcacaaaattgaagtggagggcgttacaaggggcgccgtggaactgaacaagtccctatttgaaacaacgcctctgtacgcaatccaagaccccttaggaaagtaccaccaagtcaaaacagtgcagcaggaagaaatcgtgcggggagatgtgcgctcctgtcgttggctgttcgagacccgtcccatcgaccagttcgacgagtccatccataagtttcagataattcgcggaatatctgctcaggagatacagaccggcaacgtgaaatcagcaaagtggctctttgaaacccaaccgctggattccattaagtacttttcggatgtcgaggagactgagtctaaaaccgagcagacccgggatatcgtgaagggcgacgttaagacatgcaagtggctgtttgagacccagccaatggaatcactctacgaaaaagtgagcctgatgactagctccgaggaaattcacaaaggcgacgtaaagacatgcacatggctcttcgaaactcagccccttgatacaattaaagacgactctgagactgcggtgaagctgcagaccgtcaagcaggaggagatacagggtggggacgtccgcaccgcatgtttcctgtttgagaccgagaatctggacagtattcagggtgaggaggttaaagagattaagcctgtggagatggatattcaggcgggagacgtgagttccatgaggtataaattcgagaatcaaagccttgattccatctccagttcttccgaggaggtgctgaagaaaataaagaccctgaaaactgaagacattcaaaaaggaaatgttttaaactgcaggtggctgtttgaaaaccagcccatcgacaaaatcaaggagtctcaggagggcgatgagtgtgttaaaactgttacagacatccagggtggtgacgtccgcaagggctgctttatatttgaaactttttctctggacgaaattaaggaagagagtgattacatttccaccaagaagaccattactgaagaggtaatccagggtgacgtgaaaagctatcgaatgctcttcgaaacccagcccctgtacgctattcaggatagggaagggtcttatcacgaggtgacaacagtgaaaaaagaggaagtgatccacggggacgtaagaggcacccgctggctgtttgagactaagcctctggactccatcaacaagagcgagacagtgtatgtgataaagtccgttactcaggaggacatccagaagggcgatgtttccagcgtcaggtaccggtttgagactcagccactcgaccagattagcgaagagtcccataacataatgccatcaatcgatcatatccaggggggaaacgtgaagacctcaagacagtttttcgagagcgaaaacttcgacaagaataactacatccgaactgtctccgtgaatgaaattcagaagggcaatgtgaagacaagcacctggctgtttgaaacgcacacgatggatgaactgcgtggcgagggactagaatatgagaacattaagacggtcactcaggaggatgtgcagaagggggacgttaagcaagctgtgtggctgttcgagaacaggacatttgattccatcatggaggctcataagggtatcacaaagatgaccaaggaagagattcctccttctgatgtcaagaccactacttggctgtttgaaaccacgccccttcatgagttcaacgaaacaagggtagaaaaaatcgagattattgggaaaagtattaaggagacgctcgaagacctgtactctcagaaagtaatacaggcgcctgggatcatcatcgaagctgatgagatcggagatgttcgaatggctaagtacaaactgatgaaccaggctagccccgagattcagaaagaggaaatcatccgcgcagacctgcgcaatatcatggtgaatctgctgtccaagcgcgactgcacggagagagagattcttataagcgaggaggagaagggaaatgtgaatctgacaaaaacgcagctgctcaacaggtcaacagagtttcatgcggagaaagaggagatcgtgaaaggcgatgtccagcaagcaataaagaacctgttctctgaggagcggtccgtgaaaaagggaattctgattcaggaagatgagaaaggggatatcaatatgactatctactgtctgctgcacgagaatgacggagacaccattgagcgagaggaagtgattgggggtgatgttaaacggactatccacaatttgctgagttcgacctctaataataagatttccgagcgggccaagatcgatgccagcgagcgaggcaatgtgcaattttttacaacatgcatagaggccggtgctctagactacctaaagcagctccacactgagagtaatgaaactctcacggcaaaaaagcaggagggcgagaaggaaatcataggcggagatgtggaaggaaccaaactccttctcaaaaagcgacagtcactggtagagagaacggtgtcagaaacggacatcatccccggcgatgtccataatactgtaaaagttttcatgactgagccacagagcacttttgggaaaattcccaaggaagagattattaagggcgatttgacatccaccctgaacagtctctcccaggctgtgaaccagaagactgtgaccaaaacagaagaaataattaaaggaaatatgctggcgacgttaaaaagcctcaaagagagctcccataggtggaaagaatctaagcagcccgacgccatcccaggggacattgaaaaggctatcgagtgtcttgagaaagccactaataccaagacagaaatcttgaaaaaagaactgctgaaagacgatcttgaaacctcgctccggagtctcaaagaggctcaacggtcattcaaggaggtgcataaagaaggggttataaaaaaggacgctaaggctgtaatggcaggctccagcggtgagcagaaaactgacatccatcaagtggccgtgcagagaaataaaaacagcctgctccagccaaaacctggtccatttgagccggccgccaaatggcaggggggcgctgatacactgtcccagacaatggggaaaagctgccacggaaatctcgtggaggaaagaacagaggtgaacctgccaaaagcccccaaagggacagtaaaaatcgtcattgaccgggaacagaacaatgatgcattggaaaaaagcctgaggagattatccaactcacaccacaaatctaatgtcttagaatcaggggacaaaaccggagtgtggactgatacaacaggggaacagcacctgagggacgaatatatgtcccgccagttgacttcgactgtcagcgtgaagaataatcttaccaccaaagaatccgatagggcggtgcgcgagttgaagaaggacgacgtcttcaactccatacagtccgctggtaagaccgtgggcaagcagcaaacctatgagctgaggaatgaccatcaaaagatggaggggttccacataaaaagcccaaaaaaaactaaaaacatcaaaatcctcacggatacacagtcttccaagccctcccccacccagcaccccgtgagtatgccagtcggagggacatatgatctgagtggtgatttccaaaagcaaacattgcttaagcaggaaactaagtactccaataaggacataaagaaaaaaaatataaacctgcaaccaatgtggcagctgctgcccgtggagcaggatactagcaacgtgaccgaaatgaaggtcagcgaaaagtcccataatacctttaaagctaccaataagaagcgcgagactgatgtccaccttaaatcacaagattttctgatgaagacaaacacctcaacgggactcaagatggccatggagagatcgcttaatcctatcaatttcaaccccgagaacaacgttaaagaaagtgagtgcccattgccacctccttcacccccccctcctcctccgtccaacgcgagttccgaaattgagttcccactacctccccctcctcccctcatgatgttcccagaaaaaaacgggtttttgccaagcctgtctaccgagaagatcaaggcagagttcgagtcattccccgggctgccactgccaccacctcccgtggacgagaagagcgagcgtgaaagctcctccatgttcctcccacctccaccgccacctacaccttcccagaagccagcccatctattaagttcttcggcgccagagaagcattcaggcgactttatgcagcagtattctcagaaggaagcttcaaatagtcagaactcccaggccaagattatcacggggaaaaccggagtcctcccgccgcccaccttgccaaaacccaaactgccaaagcacataaaggacaacaaaaacgactttagtcctaaagtggaattggccaccagtcttagtgatatggagtgcaagatcactaccagcaaggaccagaaaaaggtcatggtcatgactagttctgagcatacagagacaaagcagaatgtaatttccaaaagccttgatgagcgcaagcagctgagcatcgactctgccaattgcttatcacacactgttcccggtacctccgcccctcgcaaaaagcagatagccccactgataaagtcgcattccttcccggagagctccggccagcagaacccaaagccctacatgcgcaagttcaaaaccccactgatgatcgccgaggaaaaatataggcagcagaaggaggaaatagagaaacagaagcaggagtccagctactataatatcgttaagacccaatcgcagaaccagcatattacggaggtagaaaaagaaatgccattgcagaaaactaacgaggaggtgtccctttctggtattgatagtgagtgtacggtggtccagccatcacctgggtcacaatcaaacgcgaggatcctgggcgtttgtagcgataaccagctgagtactacatctcccgagacagttgcggctaagcgactgcatcacgtgttagctgccagtgaggataaggacaagatgaaaaaagaggtcttgcagtcttcacgggacattatgcagagcaagagcgcttgtgaaattaaacagtcccatcaggaatgcagcacccagcaaacgcaacagaagaaatacctggaacagttgcacctgccccagagtaaacccatctctcctaatttcaaggtgaagacaatcaaactccccaccctggatcacacgctgaatgagaccgatcattcatacgagagccataagcaacagagcgaaattgatgtccagactttcactaagaaacaatatctgaaaacgaagaaaaccgaggcctccaccgagtgtagtcacaaacaaagtcttgccgaacgacactatcaactgcccaagaaggagaagcgcgtgacagtgcagcttccaaccgagtcaatccagaagaatcaagaagacaagttgaagatggttccacgcaagcagcgtgagttctctggctcagatcgcggaaaacttcccggttcagaagaaaagaaccaggggccctccatgattggccggaaagaggaacgactgatcactgagagaaagcacgaacacttaaaaaacaaaagcgcccccaaagtggtcaaacagaaggtcattgatgcgcacctggactctcagacgcagaacttccagcagacacagatccaaactgcggagagtaaggcggaacacaagaagctgccgcagccctacaactctttgcaggaagagaagtgtttggaggttaagggcattcaagaaaagcaggtattcagcaacaccaaggactcgaagcaggaaattacccaaaataagtctttcttctcatcagtgaaagaaagccaaagagatgatggtaagggtgctctcaatatagttgagtttctccgaaagcgggaagaacttcaacagattctgtcacgagtcaagcagttcgaggcagaaccaaataagtcaggtctcaaaacattccagaccttgttaaatacaatccccggatggctgatatctgaagataagcgggagtacgctgtacatattgccatggagaataacctggagaaggtgaaggaggaaatcacccatataaaaacgcaggccgaggatatgttagtctcatatgagaatattatccagactgccatgatgtcttcaaagacaggcaagccaggcaacaaacccaccagcctcgatgagacaagctccaaggtgagcaatgtacacgtcagtaacaataagaacagcgagcagaaggaaaataagattgccaaagaaaagaccgtgcagcaccaggttgccgcccaccatgaagctaccgtacggtcccacgtgaaaactcatcaggagatcaaactggatgactctaatatacctccccccagcttgaagactcgacctccttcccccacattcattactatcgaatcgactgcacgccgtactgagaaccccacaaagaatgagctcagtcagagcccaaaaaaagactcctatgtggaacctccgcccaggcggccgatgtcccagaagagcgagatccaccgggcaaacacttccccctctcctcccagatctagatcagagcagctggtgcgcctaaaggacacaaccgcgaagctgtctaaaggcgccataccctgtcccgccgcaacgcccgttccaatcgtggaaaaacggagcgagatcattatgtcacctgcaacactgcgacggcagattaagatagaaactaggggccgcgattccccaccaactattaccatcccagtaaacataaaccacgcagcttctgggagctttcgggagagtgtcgatgctcaggaggaaatacgaaaagtggagaagcgggcaacttacgtacacaaggacgggctgaacagcactgatcacatggtgccggataccgagtcctacgatgccgtggaaattatcaggaaggttgctgtcccaccccgcctcagtgaacacacgcaacggtatgaggctgctaatagaactgttcagatggcagagaatttcgttaatgaccctgaaaacgaaattaacaggtggtttcgcgaattcgaacacgggccggtctcagaggcaaaatcaaataggcgggtgtatgctaaaggggagaccaaccacaacatacagcaggaatcgcgaacattctgcaaggaggagtttggacttacgtccctggggaacacaagcttcacagatttctcctgtaagcacccaagagaacttcgggaaaaaatccccgtaaagcagcccagaatctgttctgaaacccggtccctgagcgaacatttcagtggaatggacgcatttgagtcccagatcgtggagagtaagatgaagacgagctcaagccactcttccgaggcaggtaagtcgggctgcgatttcaagcatgcaccaccaacctatgaggacgttatcgcgggccatatcctcgacatttcagactctcccaaggaggtccgcaagaattttcagaaaacctggcaagagtcagggcgcgtctttaagggcctcggctatgccaccgccgatgcctccgcaaccgaaatgcgcaccacttttcaggaagagagtgctttcatctcagaggcagctgcaccccggcagggaaacatgtacacgctgagcaaagatagtttgagcaatggcgtaccatctggccgtcaagcggagttctcgtag

SEQ ID NO: 211611 - DNA, 2151 bp, synthetic construct
  misc_feature 1..2151: note = Description of Artificial Sequence: Synthetic coding sequence
  source 1..2151: mol_type = other DNA
atggcccggtaccaggccgccgtgagccggggcgactgccggagctttagtgccaatatgatggaggaaagcgagatgtgtgcagtccctggggggcttgctaaggtgaagaaacaattcgaagacgaaatcacctcatcaagaaacaccttcgcccagtatcaatatcagcaccaaaaccgcagcgagcaggaagctatccactcgtcacaggtggggacgtccaggagcagccaggaaatggctcgtaacgagcaggaaggttccaaagtgcaaaagatagatgtccatggcaccgaaatggtctcccatctggagaaacatactgaggaggtcaatcaggcctctcagttccaccagtacgtgcaggagactgtcattgacacgccagaagatgaagagattcccaaagtgtcaaccaagcttctgaaggaacaattcgagaagtcagcccaagagaagatcctctattcggacaaagaaatgaccacgccggcaaaacagatcaagaaactccttctgcaggataaggaaatatgtatcctatgccaaaagactgtttatcccatggagtgtctcgtcgccgacaaacagaatttccacaagtcctgtttccgatgccatcactgcaacagcaagctgtctctgggaaattacgcatccttgcacggtcagatctactgtaaaccacactttaaacaactgtttaagagtaagggaaactacgacgagggttttggtcataagcagcacaaagaccggtggaattgcaaaaaccagagcaggtccgtagacttcattcctaatgaggaacccaacatgtgcaaaaacattgctgagaacacgcttgtgccgggcgatcgaaacgagcatctggacgccggcaactccgaaggacaaaggaacgatctccggaagcttggcgagcggggaaagctgaaagtcatatggcccccctccaaagagattcctaaaaagaccctcccttttgaagaagagctcaagatgtccaagccgaagtggcctcccgagatgactacgcttctgtccccagaattcaagagtgaaagtctgctagaggacgtgagaaccccagagaataaggggcagcgtcaagaccactttcctttccttcaaccctacctccagtccactcatgtgtgccagaaagaagatgtcattggaattaaagagatgaagatgcccgagggcagaaaagatgaaaagaaagagggcagaaaaaatgtacaggaccgcccgtccgaagcagaagacaccaaatctaaccgtaaaagcgctatggacctgaatgataacaacaacgtgattgtgcagtcggccgaaaaggaaaagaacgagaaaactaatcagacaaatggcgctgaagtgctccaggtaaccaacacagacgacgaaatgatgccagagaaccataaagaaaacctgaataaaaataacaataacaactatgtggccgtctcatatcttaacaactgtcgccagaagactagtattttggagtttttagatctcctgcctcttagctcagaagctaatgatacggccaatgaatacgagattgagaaactcgaaaacacaagcagaataagtgaactgttgggaattttcgaaagcgagaaaacttatagccggaacgttctcgccatggctctaaaaaagcagacagatagagccgccgccgggtctcccgtacaacccgccccaaaaccttccctgagccggggcttgatggtaaaggggggaagctccatcataagccccgataccaatctcctgaacatcaagggatcacactccaaatcaaagaatttgcacttctttttttctaataccgttaaaatcacggcatttagcaagaaaaatgagaatatttttaactgcgatctgatcgatagtgtcgatcagatcaaaaacatgccctgcctcgatctgcgagagtttggcaaagacgtgaagccctggcatgtggagactactgaagctgcacgcaacaacgaaaacacaggatttgatgccctctctcacgagtgcacagcgaaacctctatttccccgagtggaagtccagagtgaacagcttacagtggaagagcagatcaaaagaaaccgttgctattctgacaccgaatag

SEQ ID NO: 211612 - DNA, 2817 bp, synthetic construct
  misc_feature 1..2817: note = Description of Artificial Sequence: Synthetic coding sequence
  source 1..2817: mol_type = other DNA
atgttccccatgcagaagggcagcctgaacctgctgcggcagaagtgggagtcttgcgactaccagcgaagcgaatgccacccccgggacagccactgtacgattttccaaccacaggagtctaaactgctggcccccgagggtgaggtggtgtccgcaccacagagtttagacccaacatccctgccgtactcaacaggcgaggaaatgtggagttccaaacctgaagagaaagactccgttgacaagagcaacaacacccgtgagtatgggagacccgaagtgcttaaggaggactcccttagtagcaggaggcggattgaacggttttctattgctctggacgagttgcgttccgtcttcgaagcccccaaatctggaaacaagcccgccgagtacggaggcaaggaagtggaaatcgagcgcagcctatgttcccctgccttcaagtctcaccccggatcccaactcgaggattccgtcaaggactcagataaaaaaggaaaggaaacaagcttcgataagatgtcacctgagagcggccacagccggatcttcgaagccactgcagggcccaacaagccagagtcagggttcgcagaggactctgccgctcggggggaaggcgtgtctgatttacacgaggtcgtatccctgaaagaacgtatggctagatatcaggctgcggtctcacggggcgattgtcgtagtttttccgccaatatgatggaagaaagtgaaatgtgtgctgtgccgggggggttggctaaagtgaaaaagcaattcgaggatgagatcacgtcttcccgcaacacatttgcccagtaccaatatcaacaccaaaaccgctctgaacaagaagctatccacagctcccaagtgggcacaagtcgctcttcccaagaaatggcgcggaacgagcaggaaggatcaaaagttcaaaagattgatgtccatggaacagagatggtatctcatctggagaagcacactgaggaggtgaaccaggccagtcagtttcatcagtacgtacaagagacagttatagatactcctgaggatgaagagatacccaaggtgtcaacaaagctcctgaaggagcagttcgaaaaatctgcgcaggagaagattctgtattccgacaaggagatgacaacccctgccaaacaaatcaaaaagctattactccaagataaagagatttgtatattgtgccagaagactgtttaccctatggagtgcttagtggctgataagcagaactttcacaagtcttgctttagatgtcatcattgtaatagtaaactctcactcggcaattatgccagcttgcatggacaaatctactgtaaaccacactttaagcaattgtttaaaagcaaggggaactacgatgagggatttggccataagcagcataaagatcgatggaattgcaaaaaccaaagccgtagtgtcgacttcattccgaatgaggagccaaatatgtgcaagaatattgccgaaaacactctggtacctggggataggaatgaacaccttgacgccgggaattccgagggacagcgcaacgatctccggaagttaggagaacgtggcaagctgaaagttatttggccccccagcaaggagatacctaaaaagaccctcccattcgaggaagagctcaaaatgagcaagccaaaatggcccccggaaatgaccaccctccttagccctgaatttaagtctgagtccctgcttgaggatgtcaggacacccgagaacaaaggccagaggcaggaccacttcccattcctgcagccgtacttgcagagtacacacgtatgtcagaaggaggacgttattggaatcaaggagatgaaaatgcctgaaggtcgaaaagacgagaagaaggaaggtcgaaaaaatgtgcaagatcgtcccagtgaggctgaagacaccaagtctaatcggaagagcgctatggatttaaatgacaacaataatgtcatcgttcagtccgctgagaaagagaaaaatgaaaagactaaccaaacaaacggggctgaggttctccaggtgacgaacaccgacgacgagatgatgcccgagaaccacaaagaaaacttgaataaaaacaataacaacaattatgtggcggtctcctatttgaataactgtcggcagaaaacgtcgatcctggaattccttgacctcctgccgcttagcagcgaggctaacgatacagctaacgagtacgaaattgaaaaactcgaaaacacctctcgcattagcgagctactggggatcttcgaaagtgagaagacatatagccgcaacgtgctggcaatggcactgaagaaacagacggaccgcgctgctgcaggctctcctgtgcagccagcacccaagccctcgctgagtcgaggcctgatggtgaaaggtggaagcagtattatttccccagacacgaacctgctcaatataaaaggctcccattccaagtctaagaatctgcacttttttttcagcaacaccgtcaagatcaccgccttcagtaagaagaacgaaaatatcttcaattgcgatctgatagactccgttgaccagattaaaaacatgccgtgcctggacctccgcgagtttgggaaagacgtgaagccctggcatgtagagactactgaggctgccaggaacaatgaaaatacagggtttgacgccttgtcacacgagtgtacggcgaagccactcttccctcgagtagaggttcaatcagaacagctcaccgtggaggagcagatcaagcggaatcggtgctattcagatactgaatag

SEQ ID NO: 211613 - DNA, 2892 bp, synthetic construct
  misc_feature 1..2892: note = Description of Artificial Sequence: Synthetic coding sequence
  source 1..2892: mol_type = other DNA
atgcccctgcagaagaccaacgaggaggtgagcctgagcggcatcgactcggagtgtaccgtggtccagccatcacctgggagccaatctaatgctagaatcctgggtgtctgctccgataatcaactcagtacgacctcaccagagacggtcgccgctaaaagactccatcatgtgctggccgcaagcgaggacaaggataagatgaaaaaggaggtcctgcagagttccagagacatcatgcaatccaaaagtgcatgtgagataaagcagtctcatcaggagtgcagtacgcagcagacccagcagaagaagtacctggaacaacttcacctcccccagtcgaagcccatctccccaaattttaaagtgaagaccatcaaacttccgacactggatcacactcttaatgaaacagatcacagttacgaatcccataagcaacagtctgaaattgacgtgcagacctttaccaaaaagcagtatctgaaaacaaaaaaaaccgaggccagtaccgaatgcagtcacaagcagtccctggcggagcggcactaccagctgcccaagaaggagaagcgggttacggtccagttgccaaccgaatccattcaaaagaatcaagaggacaaactcaaaatggtgcctcgcaagcagagggagttctctggctctgacagagggaagctccctggaagcgaggaaaaaaaccagggcccatccatgattggacgaaaggaggagcgactgattactgagcggaagcacgagcacctcaagaacaagtcagctcccaaagttgtcaaacaaaaagtgatcgatgcccatctcgacagccagacccagaacttccagcagacgcaaatacagacagccgagtccaaagcagaacacaaaaagctgccacagccctacaattctctgcaggaagagaagtgcctagaagtcaagggaattcaagaaaaacaagtgttcagcaacacgaaagacagcaagcaggagataactcagaataagtccttcttcagttctgtgaaagagagccagagagacgacggcaaaggggctctgaatattgttgaattcctaaggaagcgggaagaactccagcagattttatccagagtcaagcagtttgaggcagaaccaaataaatcagggctgaagactttccagacactgctgaataccattccagggtggctgatcagcgaggataagcgcgaatacgctgttcatatcgccatggagaacaatttggaaaaagtcaaggaggaaatcactcatattaaaacccaggcggaagacatgttggtgtcttatgaaaatatcattcagaccgcaatgatgagctcaaaaacaggaaagccgggaaataaacctacttcgttagacgaaacttcctccaaagtatccaatgtccatgtttccaataataagaacagcgaacagaaggagaataaaattgctaaagaaaagacagtgcagcaccaggtcgcagctcaccatgaagccaccgtgaggagccacgtcaagactcaccaggaaatcaaactagatgactccaacatcccccctccatctcttaagacacggccgccttcgcctactttcattaccattgagtcaaccgccaggagaacagaaaacccaaccaagaacgagttgagtcagtctccgaagaaggacagctatgtagaaccccctcctcgccgtcccatgtcacagaaatccgagatccatagggcaaatacaagcccctctcctccacgatcaaggtccgagcagctagtgaggttgaaggatacgaccgctaaactgtctaaaggagctatcccttgccctgctgccacacctgtgccaattgtggaaaaaaggagtgaaattatcatgagccctgcaacactccgcagacaaatcaagatcgagacaaggggccgggactcacctcctactatcaccattcctgttaacatcaaccacgcggcatctgggtcatttcgtgagtcagtggatgcccaggaagagatccgcaaggtggagaaacgggctacatatgtgcataaggatggcctgaactcaaccgaccacatggtgcctgatacggagagttatgacgccgtcgagattatccgtaaggttgccgttccaccaaggttgtccgaacacacacagcggtatgaggcagcgaataggaccgtgcagatggccgagaactttgtcaatgaccctgagaatgaaatcaatagatggtttcgcgaattcgagcacggcccggttagcgaagccaaatccaaccggcgagtgtacgccaagggcgagactaatcacaatattcagcaagagagccgtacattctgtaaagaagagtttggtctaaccagcctcggaaacactagttttaccgacttttcctgcaaacacccccgagaactccgcgaaaagattcccgtaaagcagcctaggatctgtagtgaaaccaggtccctgtccgagcactttagcggaatggacgcgtttgagagtcagatcgttgagtcgaagatgaagacgtccagcagccatagttccgaggcaggaaagtctgggtgtgacttcaagcatgcccccccaacatacgaagacgtaatcgccggtcatatcctggacatatcagattccccaaaggaagttagaaagaacttccagaagacctggcaggagtctgggcgtgtcttcaaggggctcgggtatgccactgccgacgcttccgcaacggaaatgcgcaccacttttcaagaggaatccgcctttattagcgaagctgcggctcctcgccagggcaatatgtatactctcagtaaagattcgctctcaaacggcgttccctccggcagacaggccgaattctcatag

SEQ ID NO: 211614 - DNA, 2916 bp, synthetic construct
  misc_feature 1..2916: note = Description of Artificial Sequence: Synthetic coding sequence
  source 1..2916: mol_type = other DNA
atgttccccatgcagaagggcagcctgaacctgctgcggcagaagtgggagagctgtgactatcagcgaagcgaatgccacccccgagattcgcactgcaccattttccagcctcaagagtctaagctgctggcccctgagggggaagtggttagcgccccacagagtcttgatcctacatcccttccatacagtacgggcgaagagatgtggtcgagcaagccagaagagaaagactccgtggataaatctaacaatacgcgagaatacggacggccagaagtactaaaagaagactcattgagctccaggaggagaattgaaagatttagtatcgccttggacgagctccgtagcgtgttcgaagctcccaaatctggaaacaaacctgctgaatacggaggaaaggaggtggagattgagagatccctgtgctctccagcctttaaaagtcatcccgggtctcagctcgaagactcagtgaaagactctgacaagaagggtaaggagactagcttcgacaaaatgtcacccgagtctggccatagcagaatattcgaggctgtgttctcaacagaccaggcccagatacttagattgcatttgcaccccaaactcaccaaaacaccgaagaatagtctcaagagctccacttacatatctacagctggacccaacaagccagagagtgggtttgcagaagactcggccgcgcggggggagggtgtctccgatctacacgaggtagtgagcctgaaagagcgcatggccaggtatcaggctgccgtctcccggggtgactgccgaagcttcagcgccaatatgatggaagaaagtgaaatgtgcgccgttcccggcggcctggcaaaggttaaaaagcagttcgaagacgagatcaccagctctcgtaacactttcgcacaatatcagtatcagcatcagaaccggagtgagcaggaagccatccattcttcccaggttgggaccagccggtcgagtcaagagatggctcggaatgaacaagaaggatctaaggtccaaaagatagatgtgcatggcaccgaaatggtttcgcacctggaaaagcacacagaagaagtcaatcaggcctctcaatttcaccagtacgtgcaggaaacagtcattgacacaccagaggatgaagagattcctaaagtcagcacaaagctactgaaggagcaattcgaaaaaagtgcacaggagaagatactctacagcgacaaggaaatgacgactccagcaaaacaaattaagaagctgctcctccaggacaaagaaatctgtatattgtgccaaaaaacagtataccctatggaatgcctggtggccgataaacagaatttccataaatcctgctttcggtgtcatcactgtaacagcaaactgtccctaggaaactacgctagtctgcatggccagatctactgcaaacctcactttaaacagctgtttaagtctaaaggtaactacgatgaagggtttggtcacaagcagcacaaggacaggtggaactgcaaaaaccagagtcgaagcgtggacttcataccaaatgaagagcctaacatgtgtaagaacatagccgaaaacaccttggttccaggcgatcgcaatgagcacctggatgcaggtaattctgaaggccagagaaacgatctgaggaaactgggcgagcgtggcaagttgaaggtgatttggccacctagcaaggaaattcctaagaaaacacttcctttcgaggaggagctgaagatgtcgaaacctaaatggccccctgagatgacaaccctgctgtctcccgaattcaaaagcgaatctctcctggaagacgtgcgtactcccgaaaataaggggcagcgccaggatcacttccccttcttgcagccctacctgcaatccactcacgtttgtcagaaagaagatgtgattggcattaaggaaatgaaaatgcccgagggccgaaaggatgaaaagaaggagggccgtaagaacgtgcaggatagaccgtcggaagcagaagataccaagagcaacaggaagtctgccatggatctcaatgataacaacaatgttatagtgcagtccgctgagaaagagaaaaatgaaaaaacaaaccaaaccaacggcgccgaggtcctacaggtcacgaacaccgatgacgaaatgatgcctgagaatcacaaagaaaacttaaataagaataacaacaataattatgtcgccgtgtcttacctgaacaactgcagacagaaaacctctatcctggaatttctggatctgctccctctgtcttctgaggccaacgatactgccaacgaatatgagattgagaagcttgaaaatacgagtcgtatatcagaactgcttggcatcttcgaatctgaaaaaacctatagccgtaatgtgcttgctatggccctgaagaaacaaactgatcgggctgctgccggatctcccgtccaacccgcgcctaaaccgagccttagtcgagggttaatggtaaaaggaggcagctcaatcatttcacctgacaccaacctcttaaacattaaaggatcgcattccaagtctaagaacctgcatttctttttttcaaatacagtgaagattactgcctttagcaagaagaatgagaacattttcaattgcgacctcattgattccgtcgaccagattaaaaacatgccctgtctggatctgagggagtttggaaaagatgtgaaaccatggcatgtagagaccactgaggccgcgcgaaacaacgaaaacacgggatttgatgcactgagccatgaatgcactgccaaaccattattccctagagtcgaagtgcaatccgaacagcttaccgtcgaggagcagatcaagaggaaccggtgctacagtgacactgaatag

SEQ ID NO: 211615 - DNA, 2916 bp, synthetic construct
  misc_feature 1..2916: note = Description of Artificial Sequence: Synthetic coding sequence
  source 1..2916: mol_type = other DNA
atgttccccatgcagaagggcagcctgaacctgctgcggcagaagtgggagtcctgtgattatcaaagatcggagtgtcaccccagggattcccactgcaccatcttccaaccacaggagtcaaaactgctggcgcctgagggcgaagtggtgtctgccccacagagcttggacccaaccagcctcccctactcaaccggggaagagatgtggagtagtaagccagaggaaaaagattctgtagataagagcaataacacgcgcgaatatggtcgcccggaggtgctcaaggaagatagtctctcctctcgacggagaattgaaaggtttagtatcgcccttgatgagctgaggtccgtgtttgaggctcccaagtctgggaataaacctgcagaatacgggggtaaagaagtcgagatcgaacgaagcctatgttcgcccgcctttaaatcacaccctggtagccaattggaggactcggtgaaggactcagataaaaaaggtaaggagacaagctttgataaaatgtctcccgagagtggacatagtcgcatctttgaggctgtgttttccacagaccaagcgcaaatcctgcggctccaccttcatccgaaattaaccaaaacccctaaaaactccctgaaatctagtacatatattagcaccgccggacctaacaaacctgaatcaggcttcgcggaagattccgctgcccggggcgaaggagtgtctgatctccacgaggtggtctcacttaaggaacgcatggcccggtatcaagcagccgtaagtaggggcgactgtagaagtttcagtgctaatatgatggaagagtctgaaatgtgcgctgtgccgggcgggctggctaaagtgaagaaacagtttgaggacgaaattacatcctcacggaacacctttgcgcagtaccagtaccaacaccagaaccgaagcgaacaggaagccatacattccagccaggtggggacatccaggagttcccaagaaatggctcggaatgagcaagaaggtagtaaggtgcagaagatagatgtgcacggtacagagatggtgtcccatctggaaaagcacacagaagaggttaatcaggcctcacagtttcatcagtacgtgcaagaaacggtgatcgatacgccagaggatgaggaaatccctaaggtttccaccaagctactcaaggagcagtttgagaaaagtgcccaggaaaagatactgtacagcgacaaggagatgacaaccccagctaaacaaatcaaaaaactgctgctgcaggacaaggaaatctgtatcttatgccagaagacagtttacccgatggagtgcctcgtggcagataaacagaacttccataagtcctgttttcggtgccaccattgcaacagtaaactctctctcggaaactatgctagcctgcacgggcagatctattgcaaaccacattttaagcagctgtttaagtctaaagggaactacgatgagggctttggccacaaacaacataaggaccgctggaattgtaaaaatcaaagccgatccgtcgacttcatcccaaatgaggagccaaatatgtgtaaaaatatcgcagagaacacactggtcccgggcgatagaaatgagcacctagatgctggaaacagcgagggacagaggaacgatctcaggaaactgggagagagaggtaaactcaaggttatctggcccccatcaaaggaaattcccaagaagaccttgccatttgaggaggagctgaaaatgagtaaacctaagtggcccccagaaatgactaccctgttgtcgccagagttcaagtctgaatctctactggaagacgtgcgcacacccgagaataaaggccagcggcaagatcatttcccttttctgcagccctatcttcagagcacccatgtttgtcaaaaggaggatgtaatcggaatcaaggagatgaaaatgcctgaagggcgcaaggatgaaaaaaaggagggacggaagaacgtacaggacagaccaagcgaagcggaggataccaagtcaaaccgtaaatcagcaatggacctgaacgataataataatgtgattgtacagagcgccgagaaagagaaaaatgagaagactaatcagactaatggagccgaggttctccaggtgactaacactgacgacgaaatgatgcccgagaaccataaagagaatctcaataagaataataacaataattatgtggcagttagttatctgaacaactgcaggcaaaagacatcaatcctagagttcctcgacctgctgccactcagcagcgaagcgaatgacactgccaatgaatacgaaattgagaagttggaaaataccagcaggattagcgaactcctgggcatctttgaatcagaaaaaacgtatagtcgcaatgtgcttgccatggccctgaagaaacaaactgatcgcgctgcagctggatctcccgtccagccggcacccaagccatcgctctcacgggggctgatggttaagggggggagcagcattataagccctgatacaaatctgctgaacattaaggggagccactctaagtctaagaatctgcacttcttcttcagtaatactgtgaagatcactgccttctccaaaaagaatgaaaacatctttaattgcgatctgattgacagcgtggaccaaatcaagaacatgccctgcctggaccttagggaattcgggaaggatgttaaaccgtggcacgttgagaccactgaggctgcgagaaataacgagaatacaggctttgatgcattgagtcacgaatgcacggcgaagcccttgtttccaagagttgaggttcaatccgagcaactcaccgtcgaggagcaaattaagcgaaatagatgttactccgacactgagtag

SEQ ID NO: 211616 - DNA, 1380 bp, synthetic construct
  misc_feature 1..1380: note = Description of Artificial Sequence: Synthetic coding sequence
  source 1..1380: mol_type = other DNA
atggagaccgtgttcgaggagatggacgaggagagcaccggcggcgtatcctccagcaaagaggaaatcgtgttagggcaacggttgcatctgtcttttcccttctcaattatttttagcacagtcctgtactgcggcgaggttgcattcggcctctatatgttcgagatttaccggaaggcaaatgacaccttttggatgagtttcacaatttctttcataattgttggtgcgatcctcgaccagatcatcttaatgtttttcaataaggatcttaggcgaaataaggcagccctccttttttggcacattctgcttctgggccccattgttagatgcctgcacacgatccgaaactaccacaagtggctcaagaacctcaagcaggagaaagaagagactcaggtttcgattaccaagcgcaataccatgttagaaagagaaatagcttttagtatacgcgacaacttcatgcagcagaaggccttcaagtacatgagtgtgattcaagcattcctggggagcgtaccccagcttatcctccagatgtacatttccctgaccattcgtgagtggcccctcaaccgggctctgctgatgacattttctctcctctccgtgacatacggcgccattaggtgtaatatcctggccatacagatctctaacgacgatacaactattaaactccccccaatcgaatttttctgcgtggtcatgtggaggttcctggaggtgatttccagggtagtgaccctggcctttttcatcgcttctctgaagttgaagtcactacccgtactactgataatatattttgtgtccctgttagcaccatggctggaattctggaaatctggggctcatctccctggcaacaaagaaaataatagcaacatggtcgggaccgtgctgatgctctttttgataacactgctgtacgccgccattaactttagctgctggtcagccgtgaaattgcagctctccgacgacaaaatcatcgacggccggcagaggtgggggcataggattcttcattatagtttccagtttctggagaacgttattatgatactggtctttcggtttttcggtgggaagacactgctcaattgttgcgatagcctcatagctgtacaacttatcatctcttacctgctcgccacaggcttcatgctgctcttctatcagtacctatatccttggcagtcaggcaaggtcctgcccgggcgaaccgaaaaccagcccgaagccccgtattactacgtgaacattgaaaaaacggagaaaaataagaataaacagctccgcaattactgtcattcctgtaatagagtcggctacttctctatccggaagtctatgacctgtagttag

SEQ ID NO: 211617 - DNA, 1389 bp, synthetic construct
  misc_feature 1..1389: note = Description of Artificial Sequence: Synthetic coding sequence
  source 1..1389: mol_type = other DNA
atgaacacccggccccagcacagcgagcggaccagcaccatggacagagtgtatgagatccccgaagaacccaatgtggacccagtgtccagccttgaggaagatgtaattaggggtgccaatccacggtttacattccctttctctattctgttttctacttttttatactgcggcgaagccgcaagtgctctctatatggtcagaatttacaggaaaaacagcgaaacatattggatgacatatacattttcctttttcatgttctcaagtatcatggtgcagctgaccttaatctttgtgcatcgagacctcgcaaaggacaagcctttaagcctcttcatgcacctgatcctgctcggtcctgttatccggtgcctagaggccatgatcaagtacctcaccctgtggaagaaagaagagcaagaagagccatatgtatctctcaccagaaaaaagatgctaatagatggcgaagaggtactgatcgagtgggaggttgggcacagcattcgcaccctggctatgcataggaatgcatacaaaaggatgtcccagattcaggcattcctcgggtctgtgcctcagcttacctatcaactttacgtttcgctaatttcagccgaggtgcctctcggaagagtggttctcatggtgttcagtctggtaagcgtgacttatggcgcaaccctgtgcaatatgctggccattcagataaagtacgacgactacaagatacggctgggcccattagaggtcctttgtattaccatctggcgaacattagagatcacttcacggttacttatactagtgctgttctccgccactctgaagctgaaagcggtaccgtttctcgtgttgaattttctaattattctctttgagccctggattaagttttggcgaagtggtgcacagatgcctaacaatatcgaaaaaaacttcagcagagtggggacgctcgttgtgcttatatcagttacaatcctgtacgccggaattaacttttcttgctggtcagctctgcagttaagactcgccgaccgagatctggtggataaaggacaaaactggggccacatgggcctccactactcagttcggctcgtggagaatgtgattatggtactggtctttaagttcttcggtgtgaaagtgctgctaaactactgccactcgctgattgccttgcagttaatcatcgcttatcttattagtatagggtttatgttgttgttctttcaatacctgcatcccctgaggtctctgttcacccacaatgttgtcgattacctgcactgcgtctgttgccaccaacatccacgtacgcgggtagaaaactctgaaccccccttcgaaactgaagctcgccagagcgtcgtttag

SEQ ID NO: 211618 - DNA, 1350 bp, synthetic construct
  misc_feature 1..1350: note = Description of Artificial Sequence: Synthetic coding sequence
  source 1..1350: mol_type = other DNA
atggaccgggtgtacgagatccccgaggagcccaacgtggaccccgtttcttcattggaggaagacgttattagaggagctaaccctagatttactttccccttcagtattctcttctcaacttttttgtattgcggagaggcggctagcgcactgtatatggtgcgcatttacaggaagaactccgaaacgtactggatgacgtataccttctccttcttcatgttctcctctatcatggtccagttaacactgattttcgtgcaccgagatctggccaaggataagccactgtcactgttcatgcacctcattcttctcgggcctgttatccggtgcctggaagccatgattaagtatctcacgttgtggaagaaggaggaacaggaggagccatacgtgtcactgacgaggaaaaaaatgctcatcgatggtgaagaagtgctgatcgagtgggaggtagggcatagtattcgcactctcgcaatgcacaggaacgcgtataaaaggatgagtcagattcaggccttcttggggagcgtgcctcagcttacttatcaactgtacgtcagcctgatttccgcagaggtgcccctagggcgggtggtattgatggtattcagtctggtctcagtgacctatggggctacgttatgcaatatgctggcaatccagataaaatacgacgattataagatacgactggggcctctcgaggttttgtgcatcactatctggcgcactctggaaattacttctcggctactcattctcgtcctcttctccgcaaccttgaaactgaaggccgttccctttctggtgctgaacttcctgatcatcttattcgaaccctggataaagttttggagatctggcgcgcagatgcctaataatatcgagaaaaattttagccgggtggggaccttagtagttctaatcagtgtaactatcctctatgccgggatcaatttcagctgctggtcagctcttcaactccggctggctgatcgggacctggtggataaaggacagaactgggggcacatgggcctccattactccgtgaggttagtcgagaatgtgatcatggtactcgtgttcaagttctttggcgtgaaagtgctgctcaactattgtcacagcttgatcgcactgcaactcattatcgcatatttgatcagtattgggttcatgctccttttttttcagtacctgcacccactgcgttctctgtttactcacaatgttgtggactatcttcactgtgtgtgctgccatcagcacccacgcaccagagtggagaatagcgaacccccgtttgagacagaggccagacaatctgttgtgtag

SEQ ID NO: 211619 - DNA, 1335 bp, synthetic construct
  misc_feature 1..1335: note = Description of Artificial Sequence: Synthetic coding sequence
  source 1..1335: mol_type = other DNA
atgaagttccccgccagcgtgctggccagcgtgttcctgttcgtggccgagactaccgccgccctgtcattgtcatcaacttaccgatctgggggggaccgaatgtggcaggctctcaccctgctcttcagccttcttccatgcgccctggtccaactgactcttctgtttgtccatagagatttaagtcgtgatcgcccactggtgctgctgctgcacctcctccagctgggccctctttttcgatgcttcgaggtgttttgcatctacttccagtcggggaacaacgaagaaccgtacgtttccataaccaagaagcgacaaatgccgaaaaatggcctctctgaggaaatagagaaagaagttggtcaggctgagggcaaactcatcactcacaggtctgctttctcacgtgcatcagtaatccaggcctttctgggaagcgccccccagttgacactgcagctctacatctcggtgatgcagcaggacgtcactgttggccggagcctactcatgacaatctccctgctgagtatagtctacggtgccctgcgatgcaatatcttggcaattaaaattaaatacgacgagtacgaagtgaaagtaaagccacttgcatacgtgtgtatctttctgtggagaagtttcgagattgctacacgcgtagttgtcctcgtgctttttacatcagtgctgaaaacatgggttgttgttattattttgattaattttttcagtttttttctatacccctggattcttttctggtgttctggctcccccttccctgaaaacattgagaaggctctgtcaagggtaggcactaccatcgtcctttgcttccttactctcttgtacactggcataaacatgttttgctggtccgctgtccagctgaaaattgatagcccagacctgatcagtaaatcacacaattggtatcagttgctcgtgtattatatgatccgctttatagagaatgctatcctcctgttactttggtatctcttcaaaactgatatttatatgtacgtgtgtgcacccctgcttgttctacagttgctaatagggtactgcacagcaattctgtttatgttggtgttttaccaattctttcatccgtgcaaaaaactgttttcttcgtctgttagtgagggatttcagcgctggctgagatgtttttgctgggcctgtaggcagcagaaaccatgcgagcctattggaaaggaagatttacagtcttcaagggaccgggacgagactccttccagcagcaagacctcaccggagccaggccaatttctgaacgccgaagacctgtgctccgcctag

SEQ ID NO: 211620 - DNA, 1929 bp, synthetic construct
  misc_feature 1..1929: note = Description of Artificial Sequence: Synthetic coding sequence
  source 1..1929: mol_type = other DNA
atggccgccagccggaagcccccccgggtgcgggtgaaccaccaggacttccagctcagaaacctcaggattatagaaccaaacgaagtgactcatagcggcgatactggtgtggagactgacggacggatgccccccaaggttacttccgaattgctgaggcagttacggcaggccatgcggaattccgagtatgttaccgagcccattcaggcctatattattccatctggcgatgcgcaccagagcgaatacatagcaccatgcgactgtagacgagctttcgtgtccggttttgatggttcggctgggaccgctatcatcactgaagagcacgccgctatgtggactgatgggaggtacttcctgcaggccgctaagcagatggactccaattggacactgatgaaaatggggcttaaagatacccctacccaggaggattggctggtgagcgtattacctgaaggatctcgcgttggggttgatcctttaattattcccacagattattggaagaaaatggccaaggtgctgcgcagcgcgggtcaccatctcatccccgtcaaagagaatttggtcgacaaaatttggaccgatcggcccgagcgcccctgtaaaccgctgcttacactgggactggattatacaggtatcagctggaaagataaggtcgccgacctacgcctgaagatggcagagagaaacgtaatgtggtttgtagtgactgccctggatgaaatagcttggctgttcaatctgaggggttctgacgtggagcacaacccagtgttcttcagctatgcgatcattgggctcgagaccataatgctcttcatagacggagatcggatcgacgccccttctgttaaagagcaccttcttctggatctgggtttggaagccgaatacaggatacaagtgcacccctataagagtattctctccgaactgaaggccctgtgcgcggatctgtctcctcgggagaaggtctgggtctcagacaaggccagctatgccgtctccgagaccattcctaaggaccaccgttgttgtatgccctatacacccatctgcatcgcaaaggctgttaagaattccgccgagtccgagggaatgaggcgcgcgcatattaaggacgcagtcgcactctgcgaactgttcaactggctcgagaaggaagtcccaaagggtggtgtaaccgaaattagcgcggctgacaaggccgaggaattcagacggcaacaagccgattttgtggaccttagttttcctaccatcagttccacaggccctaatggcgccatcattcactacgccgacgggaccaccgatgttacacgcacaatgcacttcgggacacctaccgcttacgaaaaggagtgtttcacgtatgtgctcaagggacacatcgccgtctcggctgctgtttttccaactgggaccaaaggacatttacttgacagcttcgctaggtccgccctttgggatagcgggttggactatctccacggaaccgggcatggggtgggaagctttttgaacgttcacgagggcccctgtggtatcagctacaagaccttcagcgacgagcccctcgaagccgggatgattgtaaccgacgaaccagggtactacgaagatggagctttcggtatcaggatagagaatgtggtgctggtggtgcctgtgaagacaaagtacaattttaataacagaggctccctgacattcgaaccactgacgttggtgcctattcagactaagatgatcgatgtcgactcgctgaccgataaagaatgcgactggttgaacaattaccacctcacatgcagggacgtcataggcaaggagcttcagaagcaggggcgacaagaagcactcgagtggcttatcagggagactcaacctatctcaaagcagcactag

SEQ ID NO: 211621 - DNA, 1872 bp, synthetic construct
  misc_feature 1..1872: note = Description of Artificial Sequence: Synthetic coding sequence
  source 1..1872: mol_type = other DNA
atgccccccaaggtgaccagcgagctgctgcggcagctgcggcaggctatgaggaactctgagtacgttacggagccaattcaagcttatattatcccgagcggagacgcccatcagagcgaatacatcgcaccatgcgattgtaggcgagcctttgtgtcggggtttgatggctcagcgggaactgcgataataactgaggagcacgccgccatgtggacggacggccgttatttccttcaagcagccaaacagatggattctaattggactttgatgaagatgggtttgaaggatacccccactcaggaggactggttggtctctgttcttcctgaggggtcacgtgttggagtagaccccctgattatccccacggattactggaaaaagatggccaaggtgcttcgatcagcggggcaccacttaatacccgtgaaggagaacctggtggataagatctggactgaccggccagagagaccctgtaaaccgttacttaccctcgggctcgactatacagggatttcctggaaagacaaagtggcggacctaagattgaagatggcagagcggaatgtgatgtggttcgtggtgactgctctagacgagattgcctggctctttaaccttcggggcagcgacgtcgaacacaaccccgtattcttttcttatgccattattggtttggaaactattatgctgtttattgacggggaccgcattgacgctccatccgtgaaggagcatctgctgctcgacctcggtcttgaagccgaatataggatccaggtacatccctacaaatccattctgtccgaattgaaggccttgtgcgccgacctcagcccaagggagaaggtgtgggtgtccgataaggccagctacgcagtgtcagaaaccattcctaaagatcaccgttgttgcatgccgtacactcccatatgtatcgccaaagctgttaagaatagtgctgaaagcgagggaatgcgcagggcacacattaaagacgctgtggctctgtgtgaactttttaattggctggagaaagaagtgccgaagggaggggtcacggagataagcgccgccgacaaggctgaagaatttcgacgacaacaagccgattttgtcgatctctcatttcccactattagcagcacgggtccaaacggagccattatccactatgctccagtaccggaaactaaccgaacgttgtctctcgacgaagtgtacctgatagattccggggctcagtacaaggatggtacgacagatgtcacccggaccatgcacttcggcacccccaccgcctacgaaaaggaatgcttcacttacgtgctgaaggggcacatagcagtcagtgccgccgtgttccccacggggacaaagggccatctgctggattctttcgccaggtctgcattatgggattcaggcctggattaccttcatggtaccggacacggggtgggcagtttcctcaatgtacacgaaggtccttgtgggatttcctacaaaaccttcagtgacgaaccgctggaggccgggatgatcgttacagacgagcctggctactatgaagatggcgccttcggaattcgcatcgagaacgtggttctggtggtgccagtaaagacaaagtataactttaacaacaggggcagtttgacgttcgagcccctaacgctcgtgcctatccagactaagatgattgatgtggactctttaacggataaagagtgcgactggcttaataactatcatctgacctgccgcgacgtgatcgggaaggagctccagaaacagggaaggcaggaagcgctggaatggctgatcagagagactcagccaatctctaagcagcactag

SEQ ID NO: 211622 - DNA, 1659 bp, synthetic construct
  misc_feature 1..1659: note = Description of Artificial Sequence: Synthetic coding sequence
  source 1..1659: mol_type = other DNA
atgtggaccgacggccggtacttcctgcaggccgccaagcagatggattcaaattggaccctgatgaagatgggcctgaaggatacaccaactcaggaggattggcttgtttcagtgctccccgagggaagtagagtcggagtggaccccctgatcatccccaccgactactggaagaaaatggctaaggttctccggtccgcaggccatcatttaattcccgtgaaggaaaatctagtggacaaaatctggacagatcggccagagcggccatgtaagccgctgctaaccctcggtctggactacaccgggattagctggaaggacaaggtcgctgaccttcgcctcaagatggccgagcggaacgtgatgtggttcgtggtaactgcccttgatgagattgcctggttgttcaatctgaggggtagtgatgtcgaacataacccagttttcttttcgtacgccattataggtctcgagacaatcatgctcttcattgacggcgatcgcattgatgcccctagcgtgaaggaacacctgttgctggatctcggcctcgaggccgaatacagaatccaggtccacccttataagtctatattgtctgagcttaaggcactgtgcgctgacctctctcccagagagaaggtgtgggtttccgacaaggcaagttacgcagtgtcagagaccattcctaaggaccaccgatgctgcatgccctacactccaatttgcatcgcaaaagccgtcaagaattcggccgaaagcgagggcatgcgccgggcacacatcaaggacgctgtggctctctgtgagcttttcaattggctggagaaggaagtgccaaaggggggtgtgacagagatcagcgcagctgataaagctgaagagtttcgaaggcagcaggccgactttgtcgacctctcctttcctaccattagtagcacggggcccaatggagctatcatccattacgcccccgtgcctgagacaaatcgcactctgtctctagatgaggtatatcttatagattccggggcccaatacaaagacggaacaacagacgtcaccaggaccatgcatttcggcactcctaccgcctatgagaaggagtgttttacatacgtgctgaagggccatattgccgtgtctgccgcagtatttcccactggtaccaaggggcacttactggacagttttgctagatcagccctttgggactcaggcctggactacctgcacggaacgggacacggggttggctcttttctgaacgttcatgaagggccctgcggaatttcttacaagacattctccgatgagccacttgaagccggaatgattgtgaccgacgagcccggctattacgaagatggcgcctttggcattcggatcgagaacgtggtgcttgtggttccagtgaaaacaaagtacaactttaacaacagagggtcccttacctttgagcccctgacactcgtgcccattcagaccaagatgatcgatgtagactctctgactgacaaggaatgcgattggctgaataactatcacttgacgtgcagggatgtgataggcaaagagcttcaaaagcagggaaggcaggaggcccttgaatggctgatacgggagacacagcctattagtaagcagcattag

SEQ ID NO: 211623 - DNA, 912 bp, synthetic construct
  misc_feature 1..912: note = Description of Artificial Sequence: Synthetic coding sequence
  source 1..912: mol_type = other DNA
atgccccccaaggtgaccagcgagctgctgcggcagctgcggcaggctatgagaaatagtgagtacgtgactgagccaattcaagcctacatcatcccctcaggagatgcacatcagtctgagtacatcgcaccctgtgactgtcgccgcgcgttcgtttctggctttgatggcagtgctgggaccgctataatcacggaggagcatgcagctatgtggactgacgggcgttatttcttacaggccgccaagcagatggatagtaactggaccttgatgaaaatggggctgaaggatacccccacacaggaagactggctcgttagtgtgctccccgaaggtagtcgtgttggggtcgacccactgatcatcccaactgactattggaaaaaaatggccaaagtcctgcgttctgctggacatcacttaatacctgtcaaggagaatcttgttgacaagatctggaccgatcgtccagagcggccttgtaagcctcttctcactctcggcctggattacaccggtatctcctggaaagacaaggtagccgacctccggctcaaaatggccgaaagaaatgtgatgtggttcgtggtgaccgccctggacgagatcgcctggctattcaatttgaggggcagcgacgtggagcacaacccagtgttttttagttacgccataattgggctggaaacaattatgctattcatagatggggacagaatcgatgccccatccgtgaaggagcaccttctgttggacctcggcttggaggccgagtatagaattcaagttcacccatataagagcatcttgtccgaactaaaagcgctatgtgccgatctgagtcctagggagaaggtgtgggtcagcgataaagctagttatgccgtgtcggagacaattccttag

SEQ ID NO: 211624 - DNA, 2001 bp, synthetic construct
  misc_feature 1..2001: note = Description of Artificial Sequence: Synthetic coding sequence
  source 1..2001: mol_type = other DNA
atggccgccagccggaagcccccccgggtgcgggtgaaccaccaggatttccaactgagaaatctgcgcattatagaacctaatgaagtcacgcactcaggagacacaggggtcgagacagacggtcgcatgccccccaaggttacttctgagctactgcgacaacttagacaggccatgcgtaattcagagtacgtgacagaacctattcaagcttacataatcccatcaggagatgcacatcaatccgaatatattgctccctgtgactgcaggcgcgcctttgtgagtgggttcgacggaagcgcgggtacggccattatcaccgaggagcatgctgctatgtggaccgacggccgttacttcctgcaggcggccaaacagatggattcaaactggacactgatgaaaatggggctcaaggacacacctacccaagaagactggctggtcagcgttctccccgaggggtcgagagtgggtgtggatcccctcattattccgacagattactggaagaagatggccaaggtactcagatctgcagggcaccacctgatccccgtcaaagagaacctggtggataaaatctggaccgacaggcctgaaagaccctgcaaacctctgctcaccctgggacttgattacaccggcataagctggaaggataaagtggccgacctccgccttaagatggccgaaagaaatgttatgtggttcgtggtcaccgcgctcgacgaaattgcctggctctttaaccttcggggtagcgacgtggaacacaaccccgtgtttttttcttacgccattatcggactggagaccatcatgctattcatagatggagaccgtattgatgccccatctgtgaaggagcatctactgctggatctagggctcgaggccgagtataggattcaagtgcacccctacaagtccatactatccgaactcaaggccctgtgcgctgacctcagtccgcgggagaaagtatgggtgagcgataaagcctcatacgcggtttccgaaaccattcccaaggatcataggtgctgcatgccttataccccaatatgcatagccaaagctgtcaagaattcagccgaatccgaggggatgcgacgcgcgcatattaaagatgccgttgccctgtgcgaactgtttaactggcttgaaaaggaggtgccgaagggtggagtgactgaaatatccgccgcagacaaagcagaagagttccggcggcaacaggcggatttcgttgatctaagttttcccaccatttccagcacaggaccaaacggggccataattcattacgcgcccgttcccgagacaaataggacgttgtctctggatgaggtttacctgattgactccggggcccagtataaagacggcacaaccgatgtgaccagaaccatgcacttcgggaccccaaccgcctacgagaaggagtgttttacatatgtactgaaaggtcacatagctgtaagcgccgcagtgttcccaacgggcacaaagggtcacctgcttgacagcttcgccagatcggccctgtgggattcaggtctcgactacctccacggcaccggtcacggggtaggcagcttcttaaatgtgcatgaggggccctgtgggatctcatataagacattttccgacgaaccgttagaggcagggatgatagtaaccgatgagccagggtattacgaagatggcgcgtttggcattcggattgagaatgtggttctcgtcgtgccagtgaaaaccaagtacaattttaataacagaggctctttgacattcgagcccctgacattggtccccatccagaccaagatgatagacgtcgactccttgactgataaggaatgtgattggctaaataattatcatctcacatgccgcgacgtgattgggaaagaactccagaagcagggtcgacaggaagcgcttgaatggttgatccgtgaaactcaacctatcagcaagcaacattag

SEQ ID NO: 211625 - DNA, 552 bp, synthetic construct
  misc_feature 1..552: note = Description of Artificial Sequence: Synthetic coding sequence
  source 1..552: mol_type = other DNA
atggcccgggcccactggggctgctgcccctggctggtgctgctgtgtgcctgcgcctggggccatacaaagcctgtcgacctcggtggacaagatgtaagaaattgttcaacaaaccccccctatcttcccgtaacagtggttaacactacaatgagcttgacggcactacgccagcaaatgcagacacagaatctgtccgcatacataattcctggcacagatgcacacatgaatgaatatataggtcagcatgacgagcggagggcgtggatcacaggcttcacgggctcagccgggaccgccgtagttaccatgaagaaagccgccgtgtggacggactctagatactggacacaggcagagaggcagatggattgcaattgggagttgcataaagaggtggggacaacgcctatcgttacctggttgctaaccgagatccctgccggtggaagagtggggtttgaccccttcctgctcagcatcgggatgctgtttctgcagagtctgaacctgagcatgctgacaagggttactcagctcccatag

SEQ ID NO: 211626 - DNA, 2025 bp, synthetic construct
  misc_feature 1..2025: note = Description of Artificial Sequence: Synthetic coding sequence
  source 1..2025: mol_type = other DNA
atggcccgggcccactggggctgctgcccctggctggtgctgctgtgtgcatgtgcgtgggggcatactaagcctgtcgacctggggggccaagatgtaaggaactgtagcaccaaccccccataccttcccgtgaccgttgtgaatacaacaatgagcctgaccgccttgagacagcaaatgcagacacagaacttatctgcttacatcattccagggactgatgcacacatgaatgaatatatcggccagcatgatgaaagacgcgcctggatcacaggctttactggttccgcagggacagccgtcgtgactatgaaaaaggcagccgtttggaccgattcacggtattggacacaagcagagcggcagatggactgcaactgggaactccacaaggaggtggggaccactcccatagttacatggctgcttaccgaaatcccagccggtggtcgcgtgggcttcgacccattcctcctgtcaattgacacgtgggaatcttacgacttggcgctccaaggttcaaaccgccaattggtctccattaccactaacctggtcgaccttgtctgggggagtgagaggccacctgttccgaaccagcctatttatgccctacaggaagcctttacaggcagtacatggcaggagaaagtctccggggtgcgttctcagatgcagaaacaccaaaaggtgcctacagctgttcttctatctgcactcgaggaaaccgcctggttattcaacctcagagctagcgacatcccatacaacccgttcttctattcttacaccctcctgactgatagctctatcaggctcttcgcaaataagtctcgcttttcctccgagactctgtcatatctgaattcctcttgcacaggccctatgtgcgtccagatcgaagactactcccaggttcgggattccattcaggcttacagtctgggtgatgttcgtatctggatcggaacgagttatactatgtacgggatctacgagatgatacccaaggagaagctggtgaccgacacctacagccccgtcatgatgacgaaggccgttaagaatagtaaagagcaggccctgctaaaagccagtcatgtaagggacgctgtggccgtaattcggtacctcgtctggctcgagaaaaatgtgccgaaaggaaccgtagacgaattttcgggggcagagattgtagataagtttcggggagaagagcagtttagctccggtccatcctttgagaccatttcagcctcaggcctgaacgctgcactggcccattatagccctactaaggaacttaataggaagctaagctccgacgagatgtacttactggactcaggcggtcagtattgggatggtaccactgacattacacgcactgtgcattgggggacaccaagcgcttttcagaaggaggcatatacccgggtgctgatcgggaatatcgacctaagcaggctcattttccccgcagccactagtggtcgaatggtggaggccttcgctaggagagccttgtgggatgccggacttaactacggccatgggacagggcacggaattggcaacttcctttgcgtgcatgaatggcccgtcggctttcaatcgaataatatcgcaatggctaagggcatgtttacatcgatagaacctggctactacaaagacggtgagtttgggatcaggttggaggacgtggctctggttgtcgaggccaaaacaaagtacccggggagctacctgactttcgaagtggtgtcattcgtgccatacgaccgaaatctgatcgatgtgagccttctgtcacccgagcatctccaatatctcaaccggtactaccagacgattagggaaaaagtcggcccagagttacagcggagacagctgctagaagagttcgagtggctgcagcagcatactgagcccctggctgcccgggccccggataccgcatcctgggccagcgtgttggtggtgtctacgctggcaatcctcggctggtcagtttag

SEQ ID NO: 211627 - DNA, 1524 bp, synthetic construct
  misc_feature 1..1524: note = Description of Artificial Sequence: Synthetic coding sequence
  source 1..1524: mol_type = other DNA
atgccctggctgctgagcgcccccaagctggtgcccgccgtggccaatgtcagaggactttctggttgcatgctgtgctcccagcgccgctactccctccagccggttcctgagagaagaattcctaatagatatctgggccagccctcacccttcactcatccccatctgttgcgaccgggtgaggtgacccccgggctatcccaggtggagtacgctcttcgacggcacaagctaatgtcactcatccaaaaggaggcgcaggggcagtccggaaccgatcaaacagtcgtggtgctctcgaatcctacttattacatgtctaacgatatcccatacacatttcatcaggataataatttcttgtatctgtgtggatttcaggagccagactctatcctggtcctgcagtccctgcccggaaaacagctccctagtcataaggccatcttatttgtgccacggcgggatccgtccagagaactttgggatggcccaaggtccggaacagacggcgccattgcattgacgggtgtcgatgaggcatacactctcgaggaatttcagcatcttctccctaagatgaaggctgagactaacatggtgtggtatgattggatgagaccatcccatgcacagctacattccgattacatgcagccgcttacagaagctaaggccaaatccaagaataaagttcggggcgttcagcagctcatacagagactgcgcttgatcaaatcaccagcggagattgaacgcatgcagatcgcaggaaagctcacgtctcaagctttcatagagaccatgttcacctctaaagcacctgtcgaggaggcctttttgtatgccaagttcgagttcgagtgtcgggcccgaggagctgatatcctggcctatccaccagtggtagcaggaggtaaccgctccaataccctacactacgtgaagaacaatcagcttatcaaggacggggagatggtcttgctcgacggcggttgtgaaagcagctgctatgtttcagatataacacgtacttggcccgttaatggaaggttcaccgctccccaggctgagctgtacgaggcagtcctggagatccagcgcgattgcctcgccctgtgttttcccggcactagcctggagaatatctatagcatgatgctgactctgatcggtcagaaactgaaagatctgggcattatgaagaacatcaaggagaataacgctttcaaagcggctagaaagtactgcccccatcacgttggtcactacctggggatggacgtgcacgatactcccgacatgccccgttccctgccacttcagccaggaatggtcatcaccatagagcctggcatatatatccccgaagatgataaagatgcgcccgaaaagtttaggggtctcggcgtgagaattgaggacgacgttgtcgtaacacaggattcccctctgatattaagtgcagattgtcctaaagaaatgaacgacattgaacagatctgcagtcaggcatcttag

SEQ ID NO: 211628 - DNA, 837 bp, synthetic construct
  misc_feature 1..837: note = Description of Artificial Sequence: Synthetic coding sequence
  source 1..837: mol_type = other DNA
atgccctggctgctgagcgcccccaagctggtgcccgccgtggccaacgtgagggggctcagcggctgcatgctgtgtagccagcggaggtattcactccagcctgtgcctgagcgaagaatccccaatcggtacctcggccagccctctccttttacacaccctcatttattaagaccaggcgaggtaactcctggcctttctcaggttgagtacgccctgaggcggcataaactgatgtccctgattcagaaggaggcacaggggcagagcgggaccgatcagacggtagtggttctaagtaacccaacgtattatatgagcaatgacatcccttacacatttcaccaagacaataactttctctacctttgcggattccaggaacctgactctattctcgttcttcagtccctgcccggcaaacagcttccttcccataaagcaatcctgttcgtgcccagacgagatccaagcagagagctgtgggacggtccccgtagcgggaccgatggtgccatcgcgttaaccggtgtcgacgaggcctacacactggaggagttccaacatttgctgcctaagatgaaagccgagaccaacatggtatggtatgattggatgaggccctcacacgcccagttgcacagcgattatatgcagccactgaccgaagcaaaggccaaatctaagaacaaagtgcgcggggtgcagcagttgatccagcgacttaggctgattaagtcaccagcggagattgaaagaatgcagatcgcaggaaagttgacgtcacagagacagggctttagcgtgttgtcgcggctggtgtcaaactcatag

SEQ ID NO: 211629 - DNA, 867 bp, synthetic construct
  misc_feature 1..867: note = Description of Artificial Sequence: Synthetic coding sequence
  source 1..867: mol_type = other DNA
atgccctggctgctgagcgcccccaagctggtgcccgccgtggccaatgtgcggggattgtccggatgcatgctgtgctctcagaggcgatacagcctgcagcccgtgccggagcgtagaatcccaaaccgttacctcgggcagccttctccctttacacatcctcacctgttgcgccccggcgaggtcactcccggtttgagccaggttgaatacgcacttcggcgtcataagcttatgagcttgattcaaaaagaagctcaaggccaatccgggacagatcagactgtggtggtgctgagcaaccctacatactacatgtccaatgatatcccctacacgttccaccaggataacaattttctgtatttgtgtgggtttcaagagcctgattcgatcctggttttgcagtctcttccaggcaagcagcttccaagccacaaggcaatcctgtttgttccacgtcgcgacccatctcgcgagctgtgggacgggcctaggtcgggtaccgatggagccattgccctcactggggtggacgaggcctacaccctagaagagtttcagcacctactacctaaaatgaaggccgagacgaacatggtgtggtacgactggatgcggcccagccacgcccagttacatagcgactacatgcagcccctgacggaagcaaaggctaaatctaagaacaaagtccggggcgtccaacagttgattcaaaggttgcgcctgataaagagtcctgcagagattgagcggatgcagattgctggcaaactcacctcccagaagtccgtccttctggctcgccatggcggatccagactctactcacatcattttggccggccaaggctcagttag

SEQ ID NO: 211630 - DNA, 1455 bp, synthetic construct
  misc_feature 1..1455: note = Description of Artificial Sequence: Synthetic coding sequence
  source 1..1455: mol_type = other DNA
atgctgtgcagccagcggcggtacagcctgcagcccgtgcccgagcggcgaattccaaaccgatacttgggccagccatcacccttcacgcaccctcacttattacggcctggggaagtcactcccggcctcagccaggttgagtatgcacttaggcggcacaagctcatgtccctcatccagaaggaggcacagggccagagtggcaccgatcagaccgttgtagtcttgtccaatcccacatattatatgagcaacgacataccatataccttccaccaggataacaacttcctgtacctgtgcggctttcaggagcccgattctatcctagttcttcagagtttacctggcaagcagcttccctctcataaagcgattctgttcgtcccacggcgggatccttctcgcgagttgtgggatggaccgcgcagcggcactgacggtgctatcgcgctaacaggagtagatgaagcatataccttagaggagttccagcatttattgcccaagatgaaggccgaaaccaatatggtttggtatgattggatgagaccatctcacgcacaactccactctgattacatgcagcccctcaccgaggctaaggctaaaagcaaaaacaaggttcggggagttcagcagctgattcagaggcttcgactgattaagtctcctgcagagattgaaagaatgcaaatcgcaggaaagctgacatcacaggcattcattgagactatgtttaccagcaaggctcctgtggaggaggctttcttatacgcaaagtttgaattcgagtgtcgtgcaaggggagcagacatccttgcttaccctcctgtggtcgctggaggaaatcggtctaacactttgcattacgtgaaaaacaaccaactcatcaaggatggagaaatggtcctgttagacgggggatgcgagtccagctgttatgttagtgacattaccagaacctggccagtgaatggccggttcactgctccacaggcagaattgtatgaagctgtactggagatccagcgagattgcctcgcactgtgctttcctggtacttccctggaaaacatctactccatgatgctcacgttgatagggcagaaactgaaggacctgggaattatgaagaacattaaagagaacaacgcctttaaggccgcgagaaagtattgcccccatcacgtcggccactacctgggtatggacgtccatgatacccccgatatgccacgtagtcttcctctacaacccggaatggtgatcacaatcgagcctgggatatacataccagaggacgataaagacgcccccgaaaaattcagagggctaggagtgagaatcgaagacgatgttgtcgttactcaggactcgccactgatcctctcagcggattgtcccaaggagatgaacgacattgagcagatatgcagccaggcttcgtag

SEQ ID NO: 211631 - DNA, 2379 bp, synthetic construct
  misc_feature 1..2379: note = Description of Artificial Sequence: Synthetic coding sequence
  source 1..2379: mol_type = other DNA
atggccttcagcggcatctacaagctggacgacggcaagccctacctgaacaactgttttcccgcccgaaacctgttaagggttccagaggaggggcaggggcactggctggtggtgcagaaaggcaatctcaagaagaagcctaaaggcctcgttggtgcccaggccgaaaggcgtgagtctcttaaagctaccagtttcgaattcaagggaaaaaaagaatcaaggagagaaaatcaggttgatctgcccggacacattttggatcaagcctttctgctcaagcatcactgcgtcaggaagcctagtgacctctgtaccatcaatgcaaaggaaaatgacttcaagcacttccactccgttatatatataaatgctagcgaaaacctgttgcccttagaagcatttcatacgttcccagccctgaaggaactagacctggcattcaacggcatcaaaactatctacgttaagtacggagacttcaagcttttggagtttctagatctttcgttcaatagtcttactgttgaggccatatgcgacctcggaatccttcctcatcttagggttttgctgctaacgggcaatgggttgactagcctccctcccaatctggcagtagctgaacaggaggctagcgtgacgtctttaacatctaaacgatacattttaaggttcccggctcttgaaactctgatgctcgacgacaatcggcttagtaacccctcttgtttcgcttccctggctggcttaagacgcctcaagaaactgagcctggacgaaaataggatcatacgtatcccctatctgcaacaagttcagctatacgatgaatccgtcgactggaatggcggccgcggctctccccacaaagaaccccaattcatgcttcagtctaagccacgaatgttggaagacagtgacgaacagctcgactacacagtgctcccaatgaagaaagatgtcgatcgcactgaggtagtgttttcttcatatccagggtttagtacaagtgagacaaccaaaatctgcagcttgccaccaatttttgagatactccccgtaaagtccctcaaggctagaaaccagaccctggccccacctttcccggagctgagatatttgtccctggcttataacaagatagcaaaagaagacgccgtcctgccagttgctctgtttcccagcctgtgtgagtttgtcttccataacaatcctttagtggcacacacaaggggtgtgcctcccctactgaagtctttcctgcaggaaaggttggggatccatttgataaggagaaagatcgtcaaacctaaacatcacgtgctcatgtccaggaaagagtcttggaaggtgaaatctgagattccgaaggtgccaaaacagccacttgttctgcaccatccacgcatgactactacgaagagtccttccaaagacatgctggagcctgaagctgagctggccgaggatcttccgaccactaagagcacctctgttgaaagtgaaatgccgacagagaacctggagggtcattcgccatcttgccggacatttgtcccacttccaccaatttgtagtaacagcaccgtgcattcggaagagactttgtctcacttaagtgacacaaccgtgaggttatcccctgaacgcccaagtgatgaggattcaaaaagcaccgaaagcatcttcctgacccaggtgtccgagcttcctagttccgtcatacacaaggatgacctggagctgaaagaaaaggaccagaagaaaccccccacagctccgagagaggtgaaaggcactcgcagaaagctgcccactgccttcttgcccagcaaataccacggatacgaggagttacttactgccaagcccgatcctgcctttatcgagcctaaagggattcagaagaatgcacaggctctgcagcaaatgctgaaacatccactgctttgtcactctagtaaacctaagcttgacaccctgcagaagccttacgttcataaggaaaagagggctcaacgaatacccatccctccccccaaaaaaacccgcgctcaactgctggacgacatctttattcgcctgcgagatcctaggaacatcaccgaagcgcccctaggagcagtcctccaccagtggacagaacgcaggcttgtgaatcataaacagtatctggaggctaaacggctcctaaaagagtttcaagctaggtatcgccagctggtctcgggcagtttaagaacggtttttggtaccacgccactaccaatggcttgtccggcgctcagcgagagtcagccaaagtttggacactttttagaattcatggatgaattctgccaagagcctactgcgagcgacagccagggatag

SEQ ID NO: 211632 - DNA, 2337 bp, synthetic construct
  misc_feature 1..2337: note = Description of Artificial Sequence: Synthetic coding sequence
  source 1..2337: mol_type = other DNA
atggccttcagcggcatctacaagctggacgacggcaagccctacttaaataattgtttcccggctaggaacctcctccgtgtaccggaagagggacaggggcactggttagtggtccaaaaggggaacctgaaaaagaagcctaaaggattagtgggcgcacaggccgagcgtcgcgaaagtctgaaagccacatccttcgagttcaagggaaagaaggagagccgacgggagaaccaagtcgatctgcccgggcacattctggaccaggcctttctgctgaagcaccattgtgtgcggaaacccagcgacctctgcacaatcaacgcaaaggaaaatgatttcaagcattttcacagcgtgatttatattaacgcatcggagaatctgctccctttagaagccttccacacctttccagctctgaaggagctcgatcttgcttttaacggcattaagactatctatgtgaaatacggagactttaagctcctggagtttctggacttatcctttaacagcctcaccgtggaagcaatctgtgacctgggtatccttccccacctccgggtgctgcttctcactggaaacggtctaacaagcctcccccctaatctggccgtggccgaacaagaagcctctgtgactagtctaacttcaaagagatatatcttgcggttcccagccctggagacactgatgctggacgataacagactctcaaatcctagctgtttcgcttcattggctggacttcgtaggctcaagaagttatctttggacgagaaccgtattatccggatcccatatctgcaacaggtccaactgtatgatgagtccgtagattggaacgggggacggggatccccacacaaggagccccagtttatgttacagagcaaaccgcgtatgcttgaggactctgacgagcagttggactacactgtgttgcctatgaaaaaggacgtcgaccgcaccactaccaaaatttgctctctgccacccatctttgaaatcctgcctgtgaaatcgctaaaggctcggaaccagacactggctccacccttccctgaacttcggtacctgtccctggcgtataataaaattgcaaaagaagacgccgtccttcccgtcgcgctgttccccagcctgtgcgaatttgtgttccacaacaaccccttggtcgcgcatacacggggtgtgccaccgctgctgaagagcttcctgcaggagaggctggggatacatctgattaggcgtaaaatcgtgaaacccaagcatcacgtactcatgtccagaaaggagtcctggaaggtgaagagtgaaattcctaaagtcccaaagcagccactggtgctgcatcatcctcggatgaccaccaccaagagcccttcgaaagacatgctcgagccggaagcagaattggcggaggaccttccgactacaaaatcaacatccgttgagtccgaaatgccaacggagaatcttgaaggacattctccgtcctgtcgcacatttgtccccctccctccaatatgtagcaattccacggttcattctgaggaaaccctatctcatctgtccgacaccacagtcaggctcagccctgagaggccttccgacgaggattccaagtcaacagaatcgatcttcctgacccaggtgagcgagctcccttcaagcgtgattcacaaggacgatctggaactgaaggagaaggaccagaaaaagcctcccactgcgcctagggaggtgaaaggcacaagaagaaagttgcctacagcattcctcccctccaagtaccatgggtacgaggaactgttgactgctaaacccgaccccgcttttattgagccaaaaggtattcagaagaacgcacaggccctgcagcagatgctcaaacatccactactgtgtcatagcagcaagcccaagcttgacactttacagaagccctatgtacacaaggagaagagagcgcaacgcatccctatccctccccctaaaaagactcgggctcagttgttggatgacatcttcataagactacgcgaccctaggaatatcactgaggcgcccctgggagccgtgctccaccagtggacagagcgtcgactggtaaatcataagcaatacttggaagcaaagcggttactaaaggaatttcaggcgaggtacagacagctggtgtccggtagccttcggactgtctttggcaccacccctctccctatggcctgccctgcgctctccgaaagccagccaaagttcgggcattttttagagtttatggacgagttttgtcaagaacccacagcaagtgattcgcagggctag

SEQ ID NO: 211633 - DNA, 2211 bp, synthetic construct
  misc_feature 1..2211: note = Description of Artificial Sequence: Synthetic coding sequence
  source 1..2211: mol_type = other DNA
atggccttcagcggcatctacaagctggacgacggcaagccctaccttaacaactgctttccagctaggaatctgctgcgcgtcccggaggaaggccaagggcactggctagtcgtgcagaaagggaacctgaaaaaaaagcccaaagggttggtgggagcccaggcagagcgcagagaaagtctaaaggctacgtccttcgaatttaagggaaagaaggagagtcgacgtgaaaatcaggtagatcttcctggccacatcctagatcaggcctttctgctcaaacatcactgcgtgcggaagccctcagacctttgcactatcaatgccaaagagaatgatttcaagcacttccacagtgtcatctacatcaacgcttcggaaaatttgctgcccctcgaggctttccacacattccctgcattgaaagaacttgatcttgcctttaatggcattaaaacaatttacgttaagtatggcgactttaagttgcttgaatttctggacctgtcttttaactccctgacggtcgaggctatctgcgatctaggcattctcccccacctgcgcgtgctcctgctaacaggcaatggcctgacttccctaccccccaacttagccgtagcggagcaggaggcatcagtaacctccttgacatcaaaaagatacattctgcgttttcccgctctggagacgctgatgctggatgataaccgtctgagtaacccttcttgctttgccagcctcgctggcctccggagactgaagaagttaagcctcgacgagaacagaatcatcagaataccctatctccagcaggtgcagctgtatgatgagagcgtggattggaatggggggcggggaagcccccacaaagaaccccaattcatgctgcagtccaaaccccggatgctcgaggattcggacgagcagctggactacactgtgctgccgatgaaaaaggacgtggaccgaacaattgcgaaggaagacgcagtgctgcctgtggctctgtttccttccctgtgcgaattcgtgtttcataacaatcctcttgtggctcataccagaggggttcctccattgctgaagtccttcctgcaggagaggttaggcatacatttgattagaagaaagattgtgaagcccaaacatcatgtcctgatgagccggaaggaaagctggaaagtaaagagtgagatcccaaaagtgccaaagcagcccctggtgctgcatcatcctagaatgacaacaacgaagagccccagcaaagacatgctcgaacccgaggctgagctggctgaagatctgcctacaacgaagtctactagtgtggaatccgaaatgcccacggagaatctcgaaggtcatagtccctcctgtagaacctttgtaccgcttccaccaatctgttccaactcaacggttcattccgaagaaacactctcccatttatccgatacaacggtgcgcctcagccccgagaggccctccgacgaagatagcaaaagcacggagagtatttttctgacccaggtgagtgagctgccctcttccgtgatccataaagacgacctggaactgaaagagaaggatcagaagaaacctccaaccgcaccaagggaggtgaagggaaccaggcggaaattgccgaccgcatttctgccgtcaaaatatcacggctatgaagagctgttgactgccaagccggaccctgcctttattgagcccaaagggatccagaaaaacgcccaggctctccagcagatgctgaaacatccgttgctgtgtcactcaagcaagccaaagctggatacgcttcagaagccttacgtccataaggagaaacgggcacagcgaattcctataccaccaccaaaaaaaacacgcgcgcagctgctggatgacatctttatccgccttagggaccctagaaacatcacagaagcccccctgggtgccgtactccaccaatggacagaacgaaggctcgtgaaccacaagcagtaccttgaggctaaacgcctgctgaaggagtttcaggcaagatatcgccagctggtttctggcagcctgaggaccgtcttcgggacaacgccattaccaatggcctgcccggcactgagcgagagccaaccaaaattcgggcactttctggaatttatggacgagttctgccaggagcctaccgccagtgactctcaaggttag

SEQ ID NO: 211634 - DNA, 891 bp, synthetic construct
  misc_feature 1..891: note = Description of Artificial Sequence: Synthetic coding sequence
  source 1..891: mol_type = other DNA
atggccttcagcggcatctacaagctggacgacggcaagccctacctgaacaactgctttcctgctagaaatcttctgcgagtgcctgaggagggccaaggtcactggcttgtcgtccagaaaggaaatctgaagaagaagccaaagggcctcgtcggtgcccaggccgagcgacgggagtcactgaaggctaccagttttgagttcaagggaaagaaggaaagtcgtagggagaatcaggtggacctgcccggccacatactcgatcaggcatttctgttgaaacatcactgcgtgcggaaaccttccgacctatgtacaatcaatgtgtctggactcaaattctcaaaggctaaagaaaacgatttcaagcacttccactccgtgatctacattaacgcatctgagaacctcttacctctagaggcattccacacatttcccgccctgaaagagctggacttagcattcaacggcattaagacgatctacgtcaaatatggcgactttaagttattagagttcctggatctgagcttcaatagtctaactgtcgaagcgatctgtgacctggggatcctaccccatctgagagtgctcctgctaacggggaacggtctgacttcattaccacctaacctagctgtagcagagcaggaggctagtgtaactagcctcacgtcgaaacggtacatccttcgcttcccagccttggagacacttatgctggacgacaaccggctttctaaccctagttgctttgcttcactcgccggactcaggcgccttaaaaaactgtctctagacgaaaataggatcatcaggattccatacctgcaacaggtccaactgtatgacgagtcagtggattggaatggaggccgcgggtag

SEQ ID NO: 211635 - DNA, 1797 bp, synthetic construct
  misc_feature 1..1797: note = Description of Artificial Sequence: Synthetic coding sequence
  source 1..1797: mol_type = other DNA
atggccttcagcggcatctacaagctggacgacggcaagccctacttgaacaattgcttccccgccagaaacctgctgcgggtaccggaggaggggcagggccactggctcgtggttcagaaaggcaatttgaaaaagaaacctaaggggctggttggggcccaggcggaacgccgagaatcactgaaagcaacgagcttcgaatttaaagggaagaaggaatctcgcagggagaatcaggtggacctccccggtcatattctcgatcaggctttcctgttgaagcatcattgcgtccgcaaaccatccgacttatgcaccatcaacgccaaggagaacgacttcaagcactttcacagcgtgatctatatcaacgccagcgaaaacctcctgcctctcgaggcctttcacacctttcccgctctcaaggaactagacctcgccttcaacgggatcaaaactatatatgtcaaatatggagactttaaactgctggagtttctagacctcagttttaatagtctgacagtggaagccatctgcgatttgggaatcctgccgcacttaagggtgctgctgttgactggtaatggtctcacgtccctaccacctaacttggctgtcgccgagcaagaggcttccgtcacctctttgacaagcaagcgttatattctccgattcccggcactggaaacgttgatgctcgacgataaccgtttgagcaaccccagctgttttgcgagcctggctggcctccgacggctgaagaagttatcactcgatgagaacaggataatccgcattccttacctgcagcaggtgcaattgtatgacgaatccgtcgactggaacggcggacgcgggagcccccataaggagccccagttcatgctgcagtctaagccccgcatgctcgaagatagcgacgaacaattggactataccgtgctgcctatgaaaaaagacgttgatcgcaccggagtgccgccacttttgaagtcatttcttcaagaaagacttggaattcacctcattcggcgaaagatcgtcaaacctaagcaccatgtccttatgtcccgaaaggaatcgtggaaagtcaaaagcgaaattcctaaggtcccaaagcagccccttgtgctgcaccatccaaggatgaccacaactaagtccccaagtaaggatatgctcgaacccgaagcggagctcgcggaggatctgccaacgacgaagagcacttcggtggaatcagagatgcccactgaaaacctagaaggacacagcccctcatgcaggactttcgtccccctcccaccaatttgtagcaatagcacagtgcactccgaagaaaccctgagccacctgtccgataccaccgtgagactctcccccgagcggccatccgacgaggatagtaaaagcacagagtctatattcctgacgcaggtcagcgaactgccctcctccgtgattcacaaagatgatctggagctgaaagaaaaggaccagaagaagccaccaacagctcctcgggaggtcaaaggcacaaggcgcaagttgcccaccgcgtttctgccaagtaaataccacggctacgaagaacttctgactgccaaacctgatcctgcattcattgagcctaagggcatacagaagaatgctcaggcattgcagcaaatgctcaaacaccccttgttgtgtcactcttcgaaacccaagcttgacaccctgcaaaaaccatacgtccacaaagaaaagcgagtgttgagctgcacgtctggacagaatggaggatggtag

SEQ ID NO: 211636 - DNA, 1554 bp, synthetic construct
  misc_feature 1..1554: note = Description of Artificial Sequence: Synthetic coding sequence
  source 1..1554: mol_type = other DNA
atgctggacgacaaccggctgagcaaccccagctgcttcgccagcctcgctgggctaaggaggctgaagaaactgtcacttgacgaaaatcggataatccggataccatacctgcagcaggttcagctatacgatgaatcagtagactggaatggaggtcggggctccccacacaaagagccccagtttatgctgcagtctaagccacgcatgttggaagattctgacgaacaactggactacacggtgcttccaatgaagaaagacgtagaccggacagaggtggtgttttccagctatcctggcttttcgacctcggagattgctaaggaggacgccgtgcttcctgtggctttatttccgtctctgtgtgagttcgtctttcacaacaatcctctggtggcacacacgcgcggagtgccacccctcctgaagtcttttctgcaggagcggttgggcattcacctgatccggaggaagatcgttaaacctaagcaccacgtgctgatgtctcgtaaggagtcctggaaggtgaagagtgagatacccaaggtgccgaaacagccactggttctgcaccacccacggatgacgactaccaagtcaccttctaaggatatgcttgaacctgaggctgagctcgccgaggatctgcccaccaccaaatccacctctgttgaatccgagatgcccacagaaaacctggaagggcactctccctcctgccggacgttcgttcccctcccccccatttgttccaattccacagtgcacagtgaggaaactctcagccatttgagtgacacaacagtgaggctgtctcctgaacgcccaagcgatgaagactctaaatctactgaatcaatcttcctcactcaagtgagcgagctgccctcctccgtgatacataaggatgatttggagcttaaggaaaaagatcaaaagaagcctccgacggcgcctcgcgaggtcaaaggaacgcgtagaaagctccctacggctttcctgccttccaagtaccatgggtatgaggagctcctcactgccaaacccgatccagccttcattgaacccaagggaattcagaaaaatgcccaggccttacagcaaatgctgaaacaccccctgctgtgccactccagtaaacccaaactggacacacttcagaagccttacgtgcataaggaaaagagagcccagcgtatccctataccgcctcccaagaagactcgggcacagctgttggacgacatattcatacgcttaagggatcctcgcaacattactgaggctccgctaggggcagtcctccaccagtggactgagagaaggctcgttaatcataaacaatatcttgaggccaaaaggttgctgaaagagttccaggccagatatcggcagctcgtctccggttccctgcggaccgtcttcggaacaacccccctgcccatggcctgcccagccctgtcggaatcgcaacccaagtttggacattttctcgagttcatggatgagttctgccaggagcccacagctagtgactcacaggggtag

SEQ ID NO: 211637 - DNA, 984 bp, synthetic construct
  misc_feature 1..984: note = Description of Artificial Sequence: Synthetic coding sequence
  source 1..984: mol_type = other DNA
atgttccccagccggcggaaggccgcccagctgccctgggaggacggcagatccgggctgcttagcggcggcctcccaagaaagtgctcagtgtttcaccttttcgtggcctgcctgtctttggggttcttcagcctgctgtggctccaactcagttgcagcggagatgtcgctcgcgccgtcagaggacaggggcaggaaaccagcggcccccctcgagcctgcccacccgaaccaccgcccgagcactgggaggaggacgctagctgggggccccatcgtttagctgtgcttgtcccgtttcgcgagcgattcgaagagctgctcgtgttcgtcccgcacatgcgccgatttctcagtcgcaaaaaaattcggcatcacatctacgtgcttaaccaagttgaccacttccggtttaacagggctgccctgattaacgtgggatttctcgagtcctccaatagcacagattatatagccatgcatgacgtggatctcctgccactgaatgaggaactggattatggcttccctgaggctgggccctttcacgtcgcttcccctgagttgcatccactttaccactataagacctatgtggggggcatactgctcctgtccaaacagcactacagattgtgcaatggcatgtcaaaccgtttctggggatgggggcgcgaagacgacgaattttatcggagaatcaaaggcgccggactacaactgttccggccttcaggaatcaccacaggctacaagacttttcgccacttgcacgatcccgcatggaggaaacgtgaccagaaacgtatagccgctcaaaagcaggagcagttcaaggtcgaccgtgagggcgggctgaatactgtaaaataccacgtggcttctagaacagccctctcagtgggcggcgccccatgcaccgtactgaacatcatgctggattgcgataaaactgccactccctggtgtactttcagctag

SEQ ID NO: 211638 - DNA, 642 bp, synthetic construct
  misc_feature 1..642: note = Description of Artificial Sequence: Synthetic coding sequence
  source 1..642: mol_type = other DNA
atgcggcggttcctgagccggaagaagatccggcaccacatctacgtgttgaaccaggtggaccacttcagatttaatcgcgccgccctgatcaacgtaggcttcctcgagagctctaactccacggactacattgccatgcatgatgttgacttgctgcccctgaatgaagagttggactacggcttccccgaggccggcccatttcatgtggcatctcccgagctgcatccactatatcattacaagacttatgtggggggtattctcctcttatcaaaacaacactaccggctgtgcaacggaatgagcaacagattttggggatggggaagggaggacgacgagttttatcggagaatcaaaggcgccggacttcagctctttcgaccgtcagggatcaccactggctacaagacatttcgccaccttcatgaccccgcctggcgcaaacgggatcagaaacgtatcgctgcccagaagcaggaacagtttaaagtggatagagaaggcgggttaaacaccgtgaaataccatgtcgcttccaggacagccctgtccgtggggggagctccttgcacagtgctcaatataatgctggactgtgacaagacggcaaccccttggtgcactttcagctag

SEQ ID NO: 211639 - DNA, 2880 bp, synthetic construct
  misc_feature 1..2880: note = Description of Artificial Sequence: Synthetic coding sequence
  source 1..2880: mol_type = other DNA
atggtggccgccccctgcgcccggcggctggcccggcggagccactcagctcttttggctgccctgactgtgctgctgctgcaaaccctggtggtgtggaactttagctccctggatagcggagcgggtgaacggaggggcggtgccgcagttggtggaggcgaacaaccccccccagctccagcacctcgacgtgagagaagagatctccccgccgaacctgccgcggcaagaggtggtgggggtggcggcggagggggtgggggcggaaggggccctcaggcccgagcaaggggcgggggaccgggtgagcctcgaggtcagcagccagcctctcgtggcgctttgcccgctagggctctggacccccacccatccccgctgataacccttgaaacacaagatggctatttcagccaccggccgaaggagaaagtgagaacagattccaacaatgagaactccgtgccaaaggactttgagaacgtcgacaactcaaacttcgctccccgcacgcagaagcaaaaacaccagcctgagctagccaaaaagccaccgagccggcaaaaggagctgctgaaaagaaagctggagcaacaagaaaagggcaagggccacactttccccggcaaaggtcctggagaggtccttccaccgggagaccgtgctgccgcaaacagctctcacgggaaagacgtcagccgaccaccccacgcccgtaagaccgggggatcttcgccagagaccaagtacgaccagcctccaaagtgcgatatttcaggcaaggaggccatcagtgccctgtcaagagccaagtccaagcattgccgccaggaaataggagagacatactgtaggcataagctaggcctactgatgccagaaaaggtcacacgcttttgccctctggaggggaaggctaataaaaatgtgcagtgggacgaggacagcgtagaatatatgcccgcaaatccagtgaggatcgcgttcgtgctagttgttcacggacgcgctagcaggcagctgcagagaatgttcaaggctatctaccataaagaccatttttattacatccatgtggacaaacgaagtaattatcttcatcggcaggtgctgcaggtcagtaggcaatattccaatgtgagggtgaccccatggcgcatggcaaccatctggggaggcgcttctttgcttagtacatatcttcagtcaatgagagatttgctagagatgaccgactggccatgggatttttttataaatctctcagccgccgattacccaatcagaaccaacgaccagctagtggcgtttctcagccggtatcgggacatgaattttctgaaatcacatgggagagataatgcaaggtttataaggaaacagggccttgatcggctctttttagaatgcgatgctcatatgtggcggctaggggaccgccgcattccagagggaatagcggtggacggcggctctgactggtttcttctgaaccgtcggtttgtggaatatgtgaccttctccacagacgacctggttactaagatgaagcagttctattcttacaccctactgcctgcggaatccttcttccatactgtgttggagaactccccacactgtgacactatggtggataataacctacgcattacgaactggaataggaagcttggctgtaaatgccaatataaacacattgtcgactggtgtggttgtagcccaaatgactttaagcctcaggattttcacaggttccagcagaccgctaggccgacattctttgccaggaaattcgaagccgttgtgaatcaggagattatcggtcagctcgactattacctgtacggcaactacccagccggcactccaggtctgcggagctactgggaaaatgtctatgacgagcctgatggcatacacagcctgagcgatgttactctcacactatatcattccttcgctagactggggctgagacgggccgagacctcactgcatactgacggtgagaattcctgtcggtactatcctatgggccaccctgccagcgtccatctctattttttggccgacaggtttcagggtttcctcatcaagcaccacgcgacaaatttggccgtgtccaagcttgaaaccctcgagacatgggttatgcctaagaaggtgtttaaaatcgcttcccccccatcagactttgggcgcctacagttttccgaggtgggcacggattgggatgccaaggagagacttttccggaactttgggggattgctaggccccatggacgaaccggtaggaatgcagaaatggggaaaaggccctaatgtaacggtcactgtcatttgggtggacccagttaatgtgatcgccgccacatatgacatcctgattgaaagcaccgcagaatttacacactacaagcctccacttaaccttcccctgaggcctggcgtgtggaccgttaagattcttcaccactgggtgcccgtcgctgagactaagttcctggtcgcaccgctcacattcagtaaccggcagcccattaagcctgaggaagcactgaaactgcataacggcccactgagaaacgcctacatggagcagtccttccagtcactaaatccagtgttatctctcccgatcaatcctgcccaggtcgaacaggcgcgccggaacgccgcatccacaggaaccgctctcgagggctggttagattccctggtagggggcatgtggaccgccatggatatttgtgccactgggcccactgcctgtcccgtcatgcagacctgttctcagaccgcatggagctccttttcccccgatccgaaatcagagctgggcgccgtcaagcccgatggccgtctgaggtag

SEQ ID NO: 211640 - DNA, 2598 bp, synthetic construct
  misc_feature 1..2598: note = Description of Artificial Sequence: Synthetic coding sequence
  source 1..2598: mol_type = other DNA
atggtggccagcgcccgggtgcagaagctggtgcggcggtacaagctagccatcgctacagccttagcgatcctgctattgcaaggtctggtggtctggtctttttccgggctggaggaagatgaggcaggcgagaaggggcgacagcggaaacccagacccctggatccgggagagggctcaaaagataccgactcatccgcggggcgcaggggctccacagggcgtcgacatgggagatggcgcggtcgggctgaaagccccggcgtgcctgtcgccaaagtggtgcgggctgtgaccagcaggcagagggcgtctaggcgggtgccgcccgccccacccccagaggcccctggacggcagaacctctccggggctgccgctggcgaggcacttgtgggcgccgcagggtttccccctcacggggacacaggtagcgtcgaaggagccccccagcccaccgataacgggtttactccaaagtgtgaaattgtgggaaaggatgccctgagcgctctggcccgagcaagtacaaaacagtgccagcaagaaatagccaacgtcgtctgcctgcatcaagcaggatctctcatgcctaaagctgttccaagacactgtcagcttacagggaagatgagtcctggcatccagtgggacgagtcacaggcccagcagcccatggatggcccacccgtacggattgcctatatgctggttgttcacggaagagctatacggcagttgaagagactcttgaaagccgtttaccacgaacagcattttttttatattcacgtggacaagcggagtgattacctccatcgcgaggtcgtggaactggcccaaggctacgataacgttcgagtgaccccatggcgaatggtgacgatctggggcggcgcatctttgctccggatgtacttacgctccatgagggatctgttagaggtgcctggatgggcatgggacttttttattaatctgtcagccacagattacccgacgcgcaccaatgaggagttagttgcgttcctttcaaagaatagagacaaaaactttctgaaatctcatggcagggacaacagccgattcatcaaaaaacagggactcgacaggttgtttcacgaatgtgactcccatatgtggcggctgggtgaaaggcaaattccagccgggattgtggttgatgggggctccgattggtttgtactgacacggagtttcgttgagtacgtggtctacaccgatgaccctttggtggctcagctgcgccagttctatacgtataccctcctgcctgctgagtccttttttcatactgtgttagaaaactcgctggcatgcgaaacgctggtcgataacaacctgcgggtcacaaactggaataggaagttagggtgcaagtgccaatacaaacacatagtagactggtgcggttgtagcccgaatgactttaaaccacaggactttttacggctgcagcaggtgtcaagacctacttttttcgcaagaaaattcgagtccactgtgaaccaggaagtactagaaattctggatttccacttgtacggatcatacccgccagggacgccagccctgaaggcgtattgggaaaacacctatgacgccgctgatggaccatccggactcagcgatgtgatgctgacagcttatacagctttcgctcgcctttcactgcatcacgcagcgacggcagccccccctatgggaacccctctttgccggttcgaaccacgaggcctgccaagtagcgtccacctgtatttttacgacgaccacttccagggatacctcgttacccaggccgtgcaaccatctgctcaaggccctgctgagactctcgaaatgtggctcatgccgcaaggttcccttaagttattgggtagatctgaccaagcttctcgcctgcagtcactggaggttggaactgactgggacccaaaggaacgcctgttccggaattttggcgggctgctcggtcccttggatgaacccgtggcggtgcagagatgggcacgcgggcccaacttgacagcgaccgtggtgtggatcgaccctacctacgtcgttgccacctcttacgacattaccgtggacacggagactgaggtgacacagtataaacctccactaagccgacccctgcggcccggaccttggactgtaaggttactacaattctgggaacctcttggtgagactaggtttcttgtgctcccccttaccttcaatcggaagttgcccttgcgaaaagacgacgcctcttggctgcatgctggcccaccccacaatgaatacatggagcagagctttcagggacttagctcaatcttgaatctccctcagcccgagctagccgaagaggccgcccagagacacacccagcttacagggcccgccttggaggcatggacagaccgcgagctatcgtccttttggtccgtggctggactgtgcgcaatcggccctagcccctgtccaagcctggaaccctgcagacttacttcttggtcttcgctgtctccagaccccaaatcagaactcggtccagttaaagctgatggtcggctgcggtag

SEQ ID NO: 211641 - DNA, 2031 bp, synthetic construct
  misc_feature 1..2031: note = Description of Artificial Sequence: Synthetic coding sequence
  source 1..2031: mol_type = other DNA
atggtggccagcgcccgggtgcagaagctggtgcggcggtacaagcttgcaattgcaaccgccctcgctatcctgctgctgcaagggctggtcgtctggagcttctccggcctagaggaggatgaggcaggcgaaaaaggccgacagcgaaagcccagacctctggacccgggcgaagggtctaaggacactgacagtagtgcaggccggaggggttctactggccgcagacacgggcggtggaggggccgagccgagtcgccaggcgtgccagttgcaaaagtggtgcgcgctgtgacatcccggcagcgtgcgagccgacgcgtgcccccagcccctccaccagaggctcccggtcgccagaacctctccggtgctgccgcaggtgaggccctggtgggagccgcaggctttcctcctcacggcgacactggaagtgtggagggcgcaccacagcccacagacaatggcttcaccccgaagtgcgagattgtaggcaaagacgctctctcagccctggcaagggccagcaccaagcaatgccagcaggaaattgcgaatgtggtgtgcctgcatcaagctgggagcttgatgccaaaggctgttcccaggcattgtcagcttacgggaaagatgtcacccgggattcagtgggatgagagtcaggctcagcaaccaatggacggacccccagtcagaatcgcttacatgcttgtggtgcacggcagggccatccgacagctgaagagactcttgaaggctgtatatcacgaacagcactttttctacattcacgtcgacaagcgctcggattatctacatcgagaggtagtcgaactcgctcagggctatgataacgtgcgcgtgaccccctggagaatggtgacaatttggggcggcgctagtttgttaagaatgtacctgcgcagtatgcgggacctgctggaagtgcctggctgggcatgggactttttcattaatttatccgctacagactaccccacacgaactaatgaggagttggtcgcctttctgagcaaaaaccgcgacaaaaatttcctgaagtcgcacggacgggacaacagtcgattcataaagaaacaggggctagatcggttgttccatgagtgtgactcgcatatgtggaggctcggcgagaggcagattccggcagggatcgtcgtggacggtgggtcagactggtttgtcctcacaagatccttcgtggaatacgtggtctacaccgatgatcccttagtggcacagctgcgccagttctatacttacacacttctgccggctgagtcttttttccacacagtgctcgagaattctctagcctgtgaaaccctcgttgacaacaatttacgcgtgacgaattggaatagaaaacttgggtgcaaatgtcagtacaaacatatcgtcgactggtgtggctgctctcctaatgatttcaagcctcaagactttctcagactgcaacaggtgagtcgcccgacatttttcgccaggaagtttgagtccaccgtaaatcaagaggtcctggagatcctggactttcacctctatggttcatacccacctggaactcccgcgttaaaggcttattgggagaatacgtatgatgctgccgacggtccatcaggtctttccgacgtgatgttaaccgcttatacagcattcgctagattatccttgcaccacgccgccacagcggcgccccctatgggaactccattgtgcaggtttgaaccacgaggacttccttctagcgtgcacctgtatttttatgatgatcacttccaggggtatcttgtgacacaggccgtgcagccttccgcacagggcccagccgaaaccctcgaaatgtggctgatgccgcaggggagcttgaaacttctgggccgcagcgatcaggcaagccgtttgcagagcctggagaacaggggactgagtatgctgccacgcttagtgagcaacagttggccacaggccgtgctgcctttgcagccacccaaagcactcggctag

SEQ ID NO: 211642 - DNA, 1503 bp, synthetic construct
  misc_feature 1..1503: note = Description of Artificial Sequence: Synthetic coding sequence
  source 1..1503: mol_type = other DNA
atgatcatcagccacttccccaagtgcgtggccgtgttcgccctgctggctttatcggttggagccctggacaccttcatcgcagcggtatacgagcacgcggtaatcttacctaacagaaccgagacccctgtcagcaaagaagaagcattactgttaatgaataagaacattgatgtactggagaaagctgtgaaactggccgctaaacagggggcgcacataatcgttacaccggaggacggcatctatggctggatcttcactcgcgagtctatatatccgtacctggaggatatccctgatccgggagtaaattggattccctgtcgggacccctggcggtttggcaacaccccagtccaacagcgcctatcttgtctcgcgaaggataactcaatctacgttgtggcaaacattggagacaaaaagccatgcaatgcatctgacagtcagtgtccgcccgatggccggtaccagtataatacggatgtagtgtttgatagtcaagggaagttgcttgctaggtaccacaagtacaacctctttgcccccgagattcaattcgacttccctaaggattcagagctggttaccttcgacaccccattcggaaaattcggaatatttacctgctttgatatttttagccatgacccagccgtcgtggtcgtggacgagtccatcgatagtatactataccctacagcctggtataatactctgcccttgctgtccgcggtccctttccattccgcatgggcaaaggccatgggagtgaacctgcttgccgccaatacacacaatacatcaatgcacatgacgggctcaggcatatacgcacctgaagccgtgaaagtttaccattatgacatggagaccgaatctggacagctgctgttgagcgagctcaaatcaagacccagaagagagcccacatatcccgcggcggtagattggcatgcctacgcatcctccgtgaagcccttctcatcagagcaaagcgattttttaggcatgatctactttgatgaatttacatttactaaacttaaaagaaataccggcaactacaccgcgtgtcagaaggatctttgctgtcatctgacctataagatgagcgagaagcggacagatgagatttacgccctcggggcattcgatgggctacatacagtcgagggacagtattacttgcagatttgcgctctgctgaagtgccagacaactgacctcgaaacatgtggtgaaccggttgggtctgccttcactaaatttgaagacttcagcttgagtggaacctttggcactcggtatgtgttccctcaaatcatcctctcgggttcccagttagcccccgagagacactatgagatctcacgagacggcagactgaggtctaggagcggcgcccccctaccagttctcgtgatggcactatacggacgagtgttcgagaaagaccccccacgcttaggccagggtagcgggaaattccagtag

SEQ ID NO: 211643 - DNA, 1200 bp, synthetic construct
  misc_feature 1..1200: note = Description of Artificial Sequence: Synthetic coding sequence
  source 1..1200: mol_type = other DNA
atggacagcagcaccaccgcccagtgccggcagctggaggccgccgttggcggggcccaggcactttcctgcttgacggggtcacgcgcctacgaacgctttacgggtaaccaaatagccaagatctaccagcagaatccagaagcctattctcatacagagaggattagccttgtgtccagtttcgccgctagtttgttcttgggctcatactcccctattgattactctgacggatccggcatgaatctactgcagattcaagacaaggtgtggtcccaagcctgtctgggcgcctgtgcaccccacctggaagagaaactgagcccccccgttccctcttgttccgtcgtcggtgccatcagcagttactatgtccaaagatacggcttcccaccggggtgtaaagtggtcgccttcaccggggataaccccgcatctctcgccggcatgcgcctagaggaaggcgatatcgcagtcagcctgggtacctcagatacacttttcctctggcttcaggagcccatgccagccttggaagggcatatattttgtaaccctgttgatagtcaacattatatggctctcctatgttttaagaacggtagtcttatgcgagagaagatccggaatgaaagtgttagtagaagctggagcgacttctccaaggcactccaatccaccgaaatggggaacggcggtaacctgggtttttactttgacgtaatggagatcacgcctgagattatcggcaggcatcgcttcaacaccgagaaccataaagtcgcagcctttccaggcgacgtagaggtgcgcgcgctcatagaaggccagtttatggctaagagaattcacgccgaagggctcggatatcgggtgatgtctaagacgaagatattggccacaggcggcgccagtcataacagagagatactccaggtgcttgctgacgtgttcgatgctccagtatacgtgatcgacacagctaattccgcttgcgtggggtcagcgtaccgagccttccacggcctagctggaggcacagatgtccccttcagtgaagttgtgaaactcgccccaaatccaaggcttgccgcaaccccgtccccaggcgctagccaggtgtatgaagctctgctgccacagtacgcgaaactcgaacagcgcatcctcagccagaccaggggaccgccggagtag

SEQ ID NO: 211644 - DNA, 4269 bp, synthetic construct
  misc_feature 1..4269: note = Description of Artificial Sequence: Synthetic coding sequence
  source 1..4269: mol_type = other DNA
atgagcggcatcaagcggaccatcaaggagaccgaccccgactacgaagacgtcagcgtcgcccttcctaataaacggcataaggctattgagaattccgctagggatgcagccgtgcagaaaattgaaacaatcatcaaggaacagttcgcccttgaaatgaagaacaaggaacatgaaattgaggtcatcgaccagagattgatcgaagccagacggatgatggacaaacttcgcgcttgcatcgtggccaactactatgcatcggctggactccttaaagtcagtgaggggtctaagacatgcgatactatggtgtttaatcatcctgcaatcaaaaagtttctggagagcccctcccgctcttccagccctgccaatcaacgagctgaaaccccaagtgccaatcattcagaatcagacagcctcagccagcacaacgacttcctgagtgacaaagacaacaacagtaacatggacatcgaggagcgcctgagtaataacatggaacagaggccgtcccggaacaccggtcgcgacacatccaggattaccgggagtcacaaaacagagcagcgaaacgccgacctcacggatgagacgagtcgcctgttcgtcaagaaaaccatcgtggtgggtaatgtcagcaaatatataccacctgacaagcgggaggagaacgaccaatccacacacaagtggatggtgtacgtgagggggagtcgaagggagcctagcattaaccattttgttaaaaaggtgtggtttttccttcacccttcatataagccgaatgatctggtggaggtgagggagcctcctttccacctcacccgtagaggctggggcgaattcccggtccgggtgcaggtccattttaaagactcccaaaataagagaatagacatcattcataatctcaaactcgatcgtacatacaccggcctacagaccctgggcgctgagactgtggtggatgtggaactccacagacactcactcggcgaagactgcatctacccacagtcttcggagtcagacatttcagacgcccctccaagcctcccactaaccatccctgccccggtaaaggcttctagtcctatcaaacagtcccatgaaccggttcccgatacctctgtcgagaagggttttcccgccagtactgaagccgagcgccatactccattttatgctctgccttccagcctggaacggaccccaacaaaaatgactacctcacagaaagtgactttttgtagccacgggaactccgcttttcaacctattgcaagctcatgcaagattgttcctcaatcacaggtcccaaacccagaatccccgggaaagagtttccagcccattacgatgtcctgcaaaatagtttcagggagtccgattagcactccttcccctagtcctctaccccgcacacctacatccacaccggttcacgtgaaacaggggaccgcagggagtgtgatcaataacccatacgtcataatggataaacagcctggtcaagtaatcggggcgaccacccctagcactggatctcccacaaataagatcagcacagcctctcaggtctcacaaggaactgggtcgcccgttcccaagattcacggatctagttttgttacatctaccgttaagcaagaggattctctgttcgcatctatgcccccgctgtgtcctataggtagccaccctaaagtgcagtccccgaagcccataactggcggactgggagctttcactaaagtgataataaagcaggagccgggtgaagccccacatgtacccgctacaggtgcagcctctcagtcacctctaccgcagtatgttactgtaaaaggcggacatatgatagccgtgtctccccaaaaacaggtcatcactccgggggaggggatcgctcagtcagcaaaagtccaaccctccaaagttgtgggcgtgcccgtgggatctgctctcccatctaccgtaaagcaggcggttgccatctctggtggacagatcctggtggctaaggcaagctccagcgtctcaaaagctgtcggacccaagcaggtggtcacccagggtgtggcgaaagccatcgtgtcagggggtggcgggacaatcgtggctcagcccgtgcaaactctgacaaaggcacaggtgaccgcagcgggtcctcagaagagtggttcgcaaggcagcgtcatggccacactacaattacctgccaccaacctagcaaacttagcgaatctgccacccggtaccaaactctatctcaccacgaatagcaagaatccttctggaaaagggaaactgctgcttatcccccaaggtgctattttgagagcaaccaataatgccaacctccagagcggttcagctgctagcggcggcagtggcgcaggtggcggcggcgggggaggtggaggcgggggctccggttccggcggcggggggtccactggggggggaggcggaactgctggcggcggcactcagagcactgcagggccgggcgggatctcacagcacctcacatacaccagttatattctcaagcagactccccagggcacgtttcttgtgggccagccgtccccacagacctctggaaagcagctgaccaccggaagcgtcgtacaaggtacactcggtgtttccacttcctcagctcagggccagcagacgcttaaggtcatcagcggacaaaagacaacactgtttacccaggctgcacacgggggccaagccagtctgatgaaaatctcagatagcacccttaagacagtgcccgctacaagccaactatccaaacccgggactactatgctgcgcgtcgctggaggggtcataactacagccacctcacccgcagttgccctctcagcaaacgggcccgctcagcagtccgagggcatggcgcctgtgtcgagctctaccgtctctagtgtaacaaaaacaagcggccagcagcaagtgtgtgtgtctcaggctacagtgggcacctgcaaagcagctaccccaaccgttgtgagtgcgacttctttagttcctactccaaatcctatctccggcaaggctaccgtgagcggtttgctgaagatccactcatcccaatcttccccgcagcaggccgtacttaccatacccagccaactgaagcctctgtccgtaaacacaagtggcggtgtgcagactatcctcatgcctgtaaataaagtggtccaaagttttagcacgtcaaaacctccagctattttacctgtggccgccccgacacccgtagtgccctcaagtgccccggcagctgtagcaaaggtaaaaactgagcctgaaacgccggggcccagttgtctgtcacaggaaggacagaccgccgtaaagacagaagagtctagtgaactggggaactatgtgatcaagattgaccacctggagactatacaacagctgctgaccgccgtggtgaaaaaaattcccctgatcaccgctaagagtgaggatgcaagctgtttcagcgctaagagtgtggagcagtactacgggtggaatataggcaaacgtagagcagccgaatggcaaagggccatgactatgagaaaggtgctacaggagatcctggagaagaatcctcgcttccatcacctcacccccctgaagaccaagcatatagctcactggtgcaggtgtcatgggtacacaccacccgatccagagtccttaagaaatgatggcgactcaatcgaggacgttctgactcagattgactctgagcccgaatgtcctagcagtttctcgagcgcggacaacctttgtcggaaactcgaggatctgcagcagttccaaaagagggaacccgaaaacgaagaagaggttgacattctgtccctctccgagccagtcaagattaatatcaaaaaggagcaagaagagaagcaggaagaggtaaagttttatcttccccctacccccggatccgagtttattggggatgttactcagaagatcggcatcactttgcagcctgtggctctccatcgtaacgtttacgcaagcgtggttgaagacatgatcttaaaggccacagagcagctggtcaacgatatcctccgccaggccctcgccgtcgggtaccagaccgcaagccacaacaggatcccaaaagagatcactgtctccaatattcaccaagccatatgcaatatcccattcctggactttctgaccaataagcatatgggaatcttaaatgaagatcagtag

SEQ ID NO: 211645 - DNA, 4269 bp, synthetic construct
  misc_feature 1..4269: note = Description of Artificial Sequence: Synthetic coding sequence
  source 1..4269: mol_type = other DNA
atgagcggcatcaagcggaccatcaaggagaccgaccccgactacgaggacgtgtcggtcgcgctgcctaataaacgacataaagccatcgagaattctgcccgtgacgcagccgttcaaaaaattgagaccattatcaaggagcagttcgcgctggaaatgaagaataaagagcatgaaatcgaggttattgaccaacggctgatcgaggcgaggcgcatgatggacaagctgagagcatgcatcgtggcaaactactatgcttctgccggactgctgaaggtatccgagggtagcaaaacgtgtgacacaatggtgttcaatcaccccgcgatcaagaaattcctggagtcaccttctaggagctcttcgcctgccaaccaaagggccgagaccccctccgcgaaccactcggaaagcgacagcctgtctcagcataatgattttctctcagataaggacaataattctaatatggacattgaagagcgcttaagcaataatatggaacagcgcccttcccggaacaccggtagggacacatccagaatcaccggtagtcacaagaccgaacagagaaatgccgacttaacagacgagactagtcgccttttcgtcaagaaaaccattgttgtcggtaatgtgtccaaatatataccccccgacaaaagggaagaaaacgaccaaagcactcataagtggatggtctatgtgcgcggatcccgtcgtgaaccttctatcaaccactttgtgaagaaggtatggttctttctgcacccctcctacaagcctaatgatctagtggaggtccgagaaccaccctttcacctcacgaggcgcggttggggggaatttccagtgcgcgtgcaggtacacttcaaagattcacagaataaaaggatcgacattattcacaatctcaagctggacaggacctatacagggttacagacgctgggtgccgaaacagttgtggatgtggagctacatcggcactcactgggggaagactgtatctatcctcagtcaagtgagagtgacatctcggatgctcctccgtcactgcctttgaccatacctgctcctgtgaaagctagcagccctatcaagcagagccatgagcctgtgccagataccagtgtcgagaagggatttcccgccagtacggaggccgagcggcatacgcccttctatgcacttccgagctcattagagcgtaccccaaccaagatgactacgagccagaaagtgaccttctgttcccatggtaactctgccttccagcctatcgcatctagttgtaaaatcgtgcctcagtctcaagtgccaaaccctgagtccccgggcaaaagttttcagcctatcacaatgtcgtgtaaaatcgtgagcggatctcctatcagtacgccgagccctagtccacttcctcgaacaccaacgtccactcccgtgcacgtgaagcagggaaccgcgggatctgtgatcaataatccttacgtgattatggataagcagccggggcaggtcatcggagccacgacgcctagcaccggctctccaaccaacaagatctcaacggcctcccaagtgtcccagggcaccgggagtccagttccaaaaatacacggatccagtttcgtgacgtctaccgtcaaacaggaggattcacttttcgctagcatgccaccattatgtcctattggcagccatccaaaggtgcagtccccaaaaccaatcactggcggacttggcgccttcactaaggtaatcatcaaacaagagcccggagaagctccccatgtgccagctacgggggccgcttcacaaagtcctctccctcagtatgtaactgtcaaaggcggacacatgattgccgtatccccccaaaaacaggtgatcacacctggggaaggaattgcacagagcgctaaagtccagccctccaaagtcgtaggggtgcctgtgggctcagctcttccctccacagtcaagcaagctgtggccatttcaggcggccagatactggtcgcaaaggctagctcctccgtgtccaaagcagttggccctaaacaagtcgtgacccagggcgtagcaaaggccatagtgtctgggggcggcgggaccatcgttgcacagcccgtgcagactctcacaaaggcacaggtcaccgcagccggccctcaaaagtccgggagccaaggctccgtgatggcgaccctgcagcttcctgcaaccaatctcgctaatttggcgaacctgcctcccggcacaaaactgtacctcaccaccaacagcaagaatccatctgggaaggggaagctgctactcattccacaaggagcaatcctgcgagctacgaataacgccaacctgcaatcaggaagcgcagcgagcggaggctctggtgcaggaggtggcggtggaggcggtggaggcgggggtagcgggtctggcggcggcggctctacaggcggtggaggtgggacagccgggggcggcacccagtccactgcgggaccgggcggtatttctcagcacttgacctatacttcctacatactcaagcagacccctcaagggacttttctggtcggccagccctcacctcaaacctctgggaagcagttgaccaccggctctgtcgtacagggcaccttgggcgtgtccaccagctcagctcagggccagcaaacattgaaagtcataagcggccagaagaccaccctgttcacccaggcagcacacggcgggcaggcctccttaatgaagatttccgacagtacccttaaaaccgtcccagctacaagtcagctctctaaacctggaactaccatgctgagggttgccggaggcgttatcactaccgctacttctccggccgtggccttatctgccaatggcccagcgcagcaatcagagggaatggctcccgtgtccagttctacagtgtctagcgtgacaaagacgagcggtcagcaacaggtgtgcgtcagtcaggccactgtgggcacctgtaaggcggcaactcccactgtcgtgagcgctacttctttggtccctacacccaatcctatcagcggtaaagccacagttagtggtctgctgaagatccattcgtcccagtctagccctcagcaggctgtgctgaccattcccagtcagctcaagcctctgtcagtgaatacctcagggggggtccagacaatattgatgccggtcaacaaggttgtgcaatctttctctactagcaagccccccgccattttaccagtcgccgccccaaccccagtcgtacccagttccgcaccagcggcggtggctaaagttaaaaccgagccggagaccccaggaccatcatgtctgtcccaggaaggacagaccgcagtgaagactgaagagagcagtgagttaggcaactatgtgataaagatagaccacttggaaactatacagcagctgctaacagccgtggttaaaaagattcccctgattactgccaaaagcgaggacgcaagctgcttctccgccaagagcgtggagcagtattacggatggaatattgggaaaaggagagccgctgaatggcagcgagcgatgacgatgaggaaggttctccaggagatcctcgaaaagaacccaagattccaccatcttacaccactcaagacgaagcacatcgcacattggtgccgatgccacgggtacacaccaccagatcctgagagcctgcgaaatgacggggactcaattgaggacgttcttactcagattgacagcgagccagaatgccccagcagcttcagctcagcagataacctctgtaggaagctggaagacctgcaacagttccagaagagggaacctgaaaatgaggaggaggtcgacattttgagcctatccgaacccgtcaaaatcaatatcaaaaaggaacaggaagaaaagcaagaagaagtgaaattttaccttcctccaacacctgggtccgaattcatcggggatgtgacgcaaaagatcggaattactctgcagccagtggccttgcatcggaatgtgtacgccagtgtcgttgaagacatgatcctgaaagcgaccgagcaactggtcaatgatatactaaggcaggctttagcagtggggtaccagacagccagtcacaacaggattcccaaggaaatcaccgtgtccaatattcaccaagcaatatgcaacatcccctttttggacttcctaacgaataagcatatgggaatcttgaatgaggatcagtag

SEQ ID NO: 211646 - DNA, 684 bp, synthetic construct
  misc_feature 1..684: note = Description of Artificial Sequence: Synthetic coding sequence
  source 1..684: mol_type = other DNA
atgttcaagcggatggccgagttcggccccgacagcggcggccgggtgaagggggtgactattgtcaagccgatcgtctacggcaatgtggctagatattttggcaaaaagagggaggaggacggacatacacaccaatggactgtgtatgttaagccttatagaaacgaggacatgtccgcatatgttaaaaaaattcaatttaagctgcacgagtcttatgggaatccactgcgggtcgtgacaaaaccgccttatgaaattactgaaactgggtggggggaatttgaaatcattatcaaaattttctttatcgaccctaatgaaaggccagtaaccctgtatcacctgctgaagctgttccaatctgatacaaacgccatgctggggaagaaaaccgtggtgtccgagttttacgatgaaatgatctttcaggaccccaccgcaatgatgcagcaattgcttactacctccaggcaactgactctgggcgcgtataagcatgaaactgaatttgccgaactggaggtcaaaaccagagagaaactcgaagctgctaagaagaaaaccagtttcgagattgccgagctgaaagagcgtctcaaagcaagtcgtgagaccattaattgtctcaaaaatgaaattcgcaagctcgaggaggatgatcaggcaaaagacatttag

SEQ ID NO: 211647 - DNA, 1053 bp, synthetic construct
  misc_feature 1..1053: note = Description of Artificial Sequence: Synthetic coding sequence
  source 1..1053: mol_type = other DNA
atggccaccaccgccgcccccgccggcggcgcccggaacggcgccggcccagagtggggtgggttcgaggagaatatccaaggaggaggcagtgctgtcatcgatatggaaaatatggacgataccagcgggtcttcatttgaggatatgggcgagctgcaccaaaggcttcgggaggaagaggtagacgccgatgctgccgacgcagctgctgccgaggaagaggatggcgaattcttaggcatgaagggattcaagggccagttgagtagacaggtagccgatcagatgtggcaagccgggaagcgccaggccagccgcgctttctccctctatgccaatatcgatatcctccggccctactttgatgtcgagcccgctcaggttaggagtcgcctactggagtcgatgatccccattaaaatggtgaattttccgcagaaaatcgctggtgaactgtacggtcccttgatgttggtcttcacactggtggcgatcctgctgcatgggatgaaaacctcggatacaattatcagggaaggtacacttatgggcactgcaatcgggacatgttttggatactggctcggagtctcaagttttatttacttcctggcgtacttgtgtaatgctcaaattacgatgctgcagatgcttgctctgctggggtacggattgtttggacactgcattgtcctgttcataacatataacatacacctccacgcactgttctacctgttctggctgctcgtcggcggattgagcacactgaggatggtggcagtattagtcagccgaacagttggccctacacagagacttttgctctgcggaaccctggccgcccttcacatgctgtttttactgtaccttcactttgcatatcataaagtggtcgaaggaatcctggataccctcgagggacctaatatcccaccgattcagcgagtcccacgtgacatccccgccatgctccccgctgcccgactcccaactactgttctgaacgccaccgcaaaggcagtcgccgtcacattgcaatctcattag

SEQ ID NO: 211648 - DNA, 774 bp, synthetic construct
  misc_feature 1..774: note = Description of Artificial Sequence: Synthetic coding sequence
  source 1..774: mol_type = other DNA
atgagcggcttcgagaacctgaacaccgacttctaccagaccagctactctatcgatgaccagtcacaacaatcctacgactacggcggttctgggggtccctattctaagcaatatgccgggtatgattattcccagcaagggaggttcgtgcctcccgacatgatgcagcctcagcagccctacacgggccagatctatcaaccaacccaggcgtacacccctgcgagcccccagcctttctacgggaataattttgaggatgaaccgcctctccttgaagaattggggattaacttcgaccacatttggcagaagaccctgaccgtgctgcatcctctgaaagtggcggacgggagtatcatgaatgaaaccgatctggccggtccaatggtgttctgtctggcctttggcgccactctgctgcttgccgggaagatacaattcggctacgtatacgggatttcagctatcggctgtctgggcatgttttgcctgctcaaccttatgtccatgaccggcgtgtccttcggctgcgttgcgtctgtattgggctactgtctcttgccaatgattctcctgagctctttcgccgttatcttttcactgcaagggatggtgggcatcatccttacagcaggaatcattggatggtgttcgttcagtgcctctaaaatctttatttccgccttagccatggagggacagcagttgctggtggcctacccttgtgctctcttgtacggtgtcttcgctcttatctcagtgttctag

SEQ ID NO: 211649 - DNA, 798 bp, synthetic construct
  misc_feature 1..798: note = Description of Artificial Sequence: Synthetic coding sequence
  source 1..798: mol_type = other DNA
atgagcggcttcgagaacctgaacaccgacttctaccagaccagctactccattgatgaccaaagccagcagtcttatgattacggagggtctggtgggccatattccaaacagtatgccggctacgactacagccagcagggtagattcgttccccctgatatgatgcagccccagcagccttacacgggccagatctaccaacccacacaggcctatacaccggcatctccacaacctttctacgggaataacttcgaggatgaaccacctctgctggaggagttgggtattaacttcgatcacatctggcagaagaccctcactgtgctgcacccactgaaggtggccgacgggagtataatgaatgaaactgatctagccgggccaatggtgttctgcctggctttcggagcaactctgttgttggccggcaagatccaatttggttatgtctacggtattagcgcaatcgggtgtctggggatgttttgtctactgaatctaatgtccatgactggggtctcgtttgggtgtgtggcctccgtgctgggttactgtctgttgcctatgatcttactttccagtttcgcagttatcttttccttgcaaggaatggtcggcattattctgacagcagggatcatcggatggtgttcattttctgcctccaagatctttatctccgcactagccatggaggggcagcagctgttggtggccctgcagcccaacattacgtatgggagcaactacttcctcttttgttgcctcccctacccacagcagcatttttag

SEQ ID NO: 211650 - DNA, 774 bp, synthetic construct
  misc_feature 1..774: note = Description of Artificial Sequence: Synthetic coding sequence
  source 1..774: mol_type = other DNA
atgagcggcttcgagaacctgaacaccgacttctaccagaccagctattccatagacgaccaatctcagcagtcctacgactacgggggctccggaggcccatattcaaagcagtatgctggttatgactactcccagcaaggacgctttgtacctcccgacatgatgcaaccccagcaaccctataccggacagatctatcagccaacacaggcatacacccccgcctcacctcagccattttacggcaataatttcgaagacgaaccccccctgcttgaagagttaggcattaatttcgaccatatctggcagaagactttaacggtgctgcatccacttaaagttgctgacggatctattatgaacgaaactgacctggcgggaccaatggttttttgccttgccttcggggccaccctgctcttagcaggtaagattcagtttggctatgtgtatggcatctcagccataggatgtctgggaatgttctgtctcctcaatctgatgtcaatgacaggtgtgtcgttcggctgcgtcgcgagcgtcctcggttactgtctccttccaatgattttgcttagcagcttcgccgttatcttttcactgcagggcatggtcggcattatcctaacggcaggtatcatcggttggtgctcgttttccgcctctaagattttcatatctgcactggcaatggaagggcagcaattactggtggcctatccttgcgccctcctctacggcgtgttcgcacttatcagcgtgttttag

SEQ ID NO: 211651 - DNA, 612 bp, synthetic construct
  misc_feature 1..612: note = Description of Artificial Sequence: Synthetic coding sequence
  source 1..612: mol_type = other DNA
atgatgcagccccagcagccctacaccggccagatctaccagcccacacaggcctatacacctgcctcaccgcagcctttttacgggaacaattttgaggacgagcccccactgctggaggaactgggcatcaatttcgaccatatatggcaaaaaaccctgacagtgctgcaccctctgaaagtggccgatggaagtataatgaacgaaaccgatcttgcaggcccgatggtgttttgtctcgcattcggggctaccctgctgctggcaggtaagattcagttcggatatgtgtatggaatttccgctattggatgtctggggatgttttgtctgctgaacttgatgtctatgacgggagtgtccttcggctgtgtcgcctctgtattaggttattgtcttctacccatgattcttctctcttctttcgctgttatattctctctccaaggcatggttggtatcattcttaccgcaggaatcatcggttggtgctctttctctgctagtaagatcttcatctccgcgttggctatggagggccagcagcttttggtggcctacccatgcgctctgttgtatggggtgtttgctttaatctctgtcttctag

SEQ ID NO: 211652 - DNA, 534 bp, synthetic construct
  misc_feature 1..534: note = Description of Artificial Sequence: Synthetic coding sequence
  source 1..534: mol_type = other DNA
atgatgcagccccagcagccctacaccggccagatctaccagcccacacaagcgtatactccagcctccccccagccattctacggtaacaactttgaagatgagccacccctcttagaggaattaggtattaacttcgaccacatttggcagaagaccctcaccgtgttgcatcccttgaaggtagcagacggaagcattatgaatgagaccgatctcgctgggcccatggtgttttgtcttgccttcggtgccactctgcttctcgcgggcaagatccagtttggctatgtctacggcatctctgcaatcggctgcctgggcatgttctgtctcctgaatttgatgtccatgacaggtgtgtcctttggctgcgttgcatccgttttgggctactgtcttctccctatgattctcttatcatcttttgcagttatattttcgctccaggggatggttgggattattttaactgccggaatcataggatggtgctccttctcggcctcgaagatcttcatttctgctctgtag

SEQ ID NO: 211653 - DNA, 306 bp, synthetic construct
  misc_feature 1..306: note = Description of Artificial Sequence: Synthetic coding sequence
  source 1..306: mol_type = other DNA
atgatgcagccccagcagccctacaccggccagatctaccagcccactcaggcatacacccccgcatcaccgcagcctttctacggtaacaactttgaggatgagcccccactgctggaggagctcggaattaatttcgatcacatctggcagaagactttgacggttctgcatcccctgaaggtcgctgatggctctatcatgaacgagactgatctcgctggacctatggtcttctgtctggcgtttggtgcaactctgctcctggccggcaaaatacaattcggttacgtctacggcatctag

SEQ ID NO: 211654 - DNA, 429 bp, synthetic construct
  misc_feature 1..429: note = Description of Artificial Sequence: Synthetic coding sequence
  source 1..429: mol_type = other DNA
atgagcggcttcgagaacctgaacaccgacttctaccagaccagctatagcattgacgatcagtctcagcaaagctacgactatggcgggtccggcggcccatacagcaagcagtatgcaggatacgattatagccagcagggccggttcgtacctcccgatatgatgcagcctcagcagccatacacaggccagatctatcaacccacccaggcttacacccctgccagcccccagcctttctatggcaacaattttgaggacgagcccccactgctggaagagttagggattaacttcgaccacatctggcagaagacactgaccgtgttacaccctcttaaagttgccgatggctcaatcatgaacgaaacagacctagcccagtggttctttgccctgctgctcgaacctcactgttactggtag

SEQ ID NO: 211655 - DNA, 882 bp, synthetic construct
  misc_feature 1..882: note = Description of Artificial Sequence: Synthetic coding sequence
  source 1..882: mol_type = other DNA
atggcctaccacagcggctacggcgcccacggcagcaagcaccgggcccgcgcagccccagatcccccacctcttttcgacgacacctccggcggctattcaagtcaaccgggagggtacccagcaacaggcgctgacgtggcattttcggtgaatcacttgctgggcgaccctatggctaatgtggctatggcttatggttcaagcatcgcctcacacggtaaggacatggtccataaagagctgcacaggtttgtgagcgtgagcaaactgaagtacttcttcgccgtcgacacagcctacgttgcaaagaagctaggactgttagtcttcccttacacacaccagaactgggaagtacaatacagcagagacgctcctctgcccccgcgacaagaccttaatgcacccgacctgtacatcccaactatggcctttattacctacgtcctactagcaggcatggctctgggcatccagaagcgtttttcacccgaagtgctggggctgtgtgcctccactgcacttgtatgggttgtcatggaggtcctggcattgctgctgggtctctatttagccacagtcagatctgatctgtccacattccaccttcttgcatattccgggtataagtatgtcgggatgattctgtccgtgttgaccggcctcctgttcggttctgacgggtactacgtggccctggcctggactagttcagccctgatgtacttcatcgttaggtcactgcgcaccgccgccttgggcccggattctatgggggggcccgtaccccgccaacggctacagctgtacctgacgctgggagcagcagctttccagcccttgatcatctactggctgaccttccacctggtcaggtag

SEQ ID NO: 211656 - DNA, 360 bp, synthetic construct
  misc_feature 1..360: note = Description of Artificial Sequence: Synthetic coding sequence
  source 1..360: mol_type = other DNA
atggtgaagatgaccaagagcaagaccttccaggcctacctgcccaactgccaccgaacatattcttgtatacactgccgggctcacctggcgaaccatgatgagctgatttctaagtctttccagggctctcagggccgagcctatctgtttaattcggttgtaaatgtgggttgcggccccgccgaggaacgggttctcctgaccggactgcacgcggttgccgacatatattgcgaaaattgcaaaactacgctcggctggaagtatgagcacgcattcgagtcttcacagaagtacaaggaaggaaagtttattatagaactggcccacatgataaaggataatggatgggagtag

SEQ ID NO: 211657 - DNA, 360 bp, synthetic construct
  misc_feature 1..360: note = Description of Artificial Sequence: Synthetic coding sequence
  source 1..360: mol_type = other DNA
atggtgaagatgacccggagcaagaccttccaggcctacctgcccagctgccaccggacctacagctgtattcactgccgcgcccacctggccaaccatgacgagctgatttccaagtcattccagggcagtcagggtagggcgtatttattcaattcagtggtcaacgtaggttgtggccccgctgaggagagggtgctcctgactggactgcacgccgttgcagacatctactgcgagaactgcaagacaacattgggatggaagtatgagcacgctttcgaatcctcccagaagtacaaggagggtaagtatatcatcgaattggcccacatgattaaagacaacgggtgggactag

SEQ ID NO: 211658 - DNA, 360 bp, synthetic construct
  misc_feature 1..360: note = Description of Artificial Sequence: Synthetic coding sequence
  source 1..360: mol_type = other DNA
atggtgcggatcagcaagcccaagaccttccaggcctacctggacgattgtcaccgtcggtactcatgcgctcattgcagagctcatctagcgaaccacgacgacttgatttcaaagagtttccaggggagccagggccgcgcctacctcttcaacagcgtcgtgaacgttggctgcggccccgcagaagagagagtgcttctaacagggctacacgccgtcgcagacattcactgcgagaactgcaagaccacattaggctggaagtatgaacaggcatttgagtcctcacagaaatataaagaggggaaatatatcattgaactcaatcacatgattaaagacaatggttgggactag

SEQ ID NO: 211659 - DNA, 474 bp, synthetic construct
  misc_feature 1..474: note = Description of Artificial Sequence: Synthetic coding sequence
  source 1..474: mol_type = other DNA
atgtgcgtggcccaggtgctgaccgcccacctgctgcccccccggcaagctctgggctccttatgtagcccttgggccgcccccagagttggcccactcccacccgccccggccatggtgcggatatctaagccaaagactttccaggcttaccttgacgactgccaccgacgctacagttgtgcacattgtagggcacacctcgccaaccacgatgacctcatttctaagtcattccaagggtcgcagggccgtgcttacctgttcaatagcgtggtgaacgtcgggtgcggacctgccgaggagagagtgctgcttaccggactgcatgccgtggcagatatccactgcgagaattgcaaaacgacactcgggtggaagtatgagcaggcttttgaatcctcccaaaaatacaaggagggcaagtatattatcgaactaaaccacatgattaaggacaatgggtgggactag

SEQ ID NO: 211660 - DNA, 384 bp, synthetic construct
  misc_feature 1..384: note = Description of Artificial Sequence: Synthetic coding sequence
  source 1..384: mol_type = other DNA
atgcccagctgcgaccccggccccggccccgcctgcctgcccaccaaaaccttccgttcttatcttcctcgctgccaccggacctacagctgtgttcactgcagggctcacctggccaaacatgatgagttgattagtaagtcatttcaaggtagccatggccgggcttatctgtttaactctgtcgttaacgtcggctgcggccccgccgagcagcgccttttgctgacagggctgcacagtgtggccgatatattctgtgagtcatgcaagaccactctcgggtggaaatacgaacaggccttcgaaaccagtcaaaaatataaggaaggcaagtatataattgaaatgtcacatatggtcaaggacaatggctgggattag

SEQ ID NO: 211661 - DNA, 384 bp, synthetic construct
  misc_feature 1..384: note = Description of Artificial Sequence: Synthetic coding sequence
  source 1..384: mol_type = other DNA
atgcccagctgcgaccccggccccggccccgcctgcctgcccaccaagacattcaggtcgtacctgcctcggtgtcaccgcacctatagttgcgtgcactgtagggcccacctggccaagcacgatgaactaattagcaaaagcttccagggctcacatgggcgggcgtacctgttcaatagcgttgtgaacgtgggctgtggacccgcagagcagcgcctgctgcttacgggtctccatagcgtcgccgatatcttctgcgagagctgcaaaaccactctgggctggaagtacgagcaggcgtttgagacatcccaaaaatataaggaggggaagtacattattgagatgagtcatatggtaaaagacaacggttgggactag

SEQ ID NO: 211662 - DNA, 384 bp, synthetic construct
  misc_feature 1..384: note = Description of Artificial Sequence: Synthetic coding sequence
  source 1..384: mol_type = other DNA
atgcccagctgcgaccccggccccggccccgcctgcctgcccaccaaaacatttcgcagctatctgccccgatgtcaccgaacctactcatgtgtgcattgccgcgcccacttggcgaaacatgacgaacttatttcaaaatcattccagggatctcatggaagggcttacctgttcaattcggtggtgaatgtgggttgcggcccagccgaacagcgcctcctgttaaccggccttcacagcgtagcggacatcttctgtgagagctgcaagactaccctcggatggaaatatgaacaggcattcgaaacctctcagaagtataaggagggcaaatatatcattgagatgtcacacatggtaaaggataatggatgggattag

SEQ ID NO: 211663 - DNA, 243 bp, synthetic construct
  misc_feature 1..243: note = Description of Artificial Sequence: Synthetic coding sequence
  source 1..243: mol_type = other DNA
atgcccagctgcgaccccggccccggccccgcctgcctgcccaccaaaacatttcggtcctatctccctcgatgccacagaacctacagctgcgtgcactgcagagcacacttggctaagcacgatgagctcatctccaagagttttcagggaagtcatggtcgggcctatctgtttaattctgtggttaacgtggggtgcggtccagctgagcagagacttcttctgaccggtctacactag

SEQ ID NO: 211664 - DNA, 384 bp, synthetic construct
  misc_feature 1..384: note = Description of Artificial Sequence: Synthetic coding sequence
  source 1..384: mol_type = other DNA
atgcccagctgcgaccccggccccggccccgcctgcctgcccaccaagacctttcggagctacctccctcgttgtcaccgtacatactcctgtgtccactgcagagcacacctcgccaagcacgacgagctcatcagtaagtccttccaaggttctcacggccgcgcctacctgtttaacagcgtggttaacgtgggctgtggacctgccgagcagcgattactactcacaggactgcacagcgtcgccgacattttttgcgaatcatgcaagaccaccctaggctggaagtacgagcaggccttcgaaactagtcaaaaatacaaagaaggtaaatacatcatcgaaatgtcgcacatggtgaaggacaacggatgggactag

SEQ ID NO: 211665 - DNA, 366 bp, synthetic construct
  misc_feature 1..366: note = Description of Artificial Sequence: Synthetic coding sequence
  source 1..366: mol_type = other DNA
atgggccggatcttcctggaccacatcggcggcacccggctgttctcttgtgccaattgcgacactattctgaccaatcgatcagaactcatcagtacacgcttcaccggcgccacaggccgcgcatttctttttaataaggtagttaatctacagtattccgaagtgcaggatagggttatgttgaccggacggcatatggttagagacgttagttgcaagaactgtaatagcaaacttggttggatctacgaatttgcaactgaggatagccagcgttacaaagaggggcgggtgatcctggagcgagctttagtgcgggaatccgagggatttgaggaacatgtgccatctgataattcttag

SEQ ID NO: 211666 - DNA, 366 bp, synthetic construct
  misc_feature 1..366: note = Description of Artificial Sequence: Synthetic coding sequence
  source 1..366: mol_type = other DNA
atgggccggatcttcctggaccacatcggcggcacccggctgttcagctgtgctaactgcgatacaatattgactaatcgtagtgaactgatcagtactcgttttaccggtgcaactggcagggccttcctgttcaacaaggttgtgaaccttcagtatagcgaggtgcaggatcgagtcatgctgaccggtaggcacatggtccgcgacgtctcttgtaagaattgcaattcaaagctgggttggatctatgaattcgctactgaggatagccagcgttataaagaaggtcgagtgatactggagagggctttggtgcgggagtctgagggttttgaggagcacgtcccttctgacaactcatag

SEQ ID NO: 211667 - DNA, 366 bp, synthetic construct
  misc_feature 1..366: note = Description of Artificial Sequence: Synthetic coding sequence
  source 1..366: mol_type = other DNA
atgggccggatcttcctggaccacatcggcggcacccggctgttctcttgtgcgaactgcgacaccatcctgaccaacaggtccgaacttattagcacaaggttcacaggagctacgggccgggcttttctgtttaataaagtggtgaaccttcagtattctgaggtgcaagatagagtcatgctcactggacggcatatggtgcgggacgtcagttgcaaaaactgcaactctaagctggggtggatatatgagttcgcaacagaggattcccagaggtacaaagaagggagagttattctggaacgcgctttagtacgggagtctgaaggattcgaagagcatgtgcctagcgataactcgtag

SEQ ID NO: 211668 - DNA, 366 bp, synthetic construct
  misc_feature 1..366: note = Description of Artificial Sequence: Synthetic coding sequence
  source 1..366: mol_type = other DNA
atgggccggatcttcctggaccacatcggcggcacccggctgttcagttgcgcgaattgtgatacaattctcaccaacagaagtgaattaatatccacacggttcacgggcgctacaggccgagcatttctctttaataaagtcgttaatctgcaatacagtgaggtgcaggatagggtgatgctgactgggcgtcacatggtcagggacgtctcatgtaaaaactgcaacagcaagttgggctggatctacgagttcgcaacggaggattcgcagaggtataaggaagggagggtgattctggagagggcactcgtcagagagtcagaagggtttgaggagcatgtgcctagcgacaacagttag

SEQ ID NO: 211669 - DNA, 366 bp, synthetic construct
  misc_feature 1..366: note = Description of Artificial Sequence: Synthetic coding sequence
  source 1..366: mol_type = other DNA
atgggccggatcttcctggaccacatcggcggcacccggctgttctcctgtgctaactgcgacaccattctcacaaaccgcagcgagttaatttctacgcgattcacaggggctaccggaagagcctttctctttaataaggtggtgaatctccagtattctgaggtgcaggatagagtgatgctgaccggcaggcacatggtgcgcgatgtatcctgtaaaaactgcaactccaaactcggttggatctacgagtttgctacagaggacagccagagatacaaagagggtcgggtgattctggagcgcgccttggtacgagagagcgagggtttcgaagagcatgtcccctcagacaattcttag

SEQ ID NO: 211670 - DNA, 2322 bp, synthetic construct
  misc_feature 1..2322: note = Description of Artificial Sequence: Synthetic coding sequence
  source 1..2322: mol_type = other DNA
atgttcagcctgagcagcaccgtgcagccccaggtgaccgtgcccttgagtcacctgataaacgctttccacactcctaaaaatacgtccgtgtcgttgtccggagtctcagtgagtcagaaccagcaccgggatgtggtgccagagcatgaggcccctagcagcgagtgcatgttcagtgacttcctgacaaagctcaacattgtgagtatcggaaaaggaaagatctttgaaggctacagatctatgttcatggaacctgcaaagcgaatgaagaagtctcttgataccactgacaattggcatattagacccgagcccttctcattgagcatccctcctagtctaaaccttcgggacctgggcctctccgagctcaagatcggccagattgatcaacttgtcgaaaatcttctgcctggcttctgtaaaggcaagaatatctcatcccactggcacacaagtcatgtatctgcccagagcttctttgaaaacaagtacgggaacctcgatatcttctcaacactcagatctagctgcctataccggcaccactcccgagcactacaaagcatctgcagcgatttacagtattggcctgtttttatccagtccaggggatttaagacgttaaagtccaggactcgccgcctgcaatccactagcgaaaggttggccgagacacaaaatatcgcaccttcttttgtcaaggggtttctcctacgggatagaggctctgacgttgaatcccttgacaagctgatgaagaccaagaatattccagaggctcaccaagacgcttttaagactggattcgcggaaggattcctgaaggctcaagcacttacccagaaaacaaacgattcactgcgtcggactagactaatattgtttgtgttgctgctgttcggcatatacggcttactgaagaacccctttctgtctgtaagattcaggacaaccacagggctggacagcgccgtcgatcccgttcagatgaagaacgtgacgttcgagcacgtcaaaggtgtagaggaggccaaacaagagcttcaagaggtggttgagttcctgaaaaatcctcagaagttcactatcctgggcggcaagttaccaaaggggatactgttggtgggacctcctggaaccggaaagaccctactcgctcgcgcagttgccggcgaagcagacgtgcccttttattatgcatctggcagtgagtttgacgagatgttcgttggcgtcggagcgagccgtattaggaacctgttccgagaggccaaggcaaatgctccatgcgttatcttcattgatgaactcgatagtgtgggaggaaaaagaattgagagtcctatgcacccctattctaggcagactatcaaccaactgctcgctgagatggacggcttcaaaccgaacgagggcgtgatcattatcggcgctactaatttcccagaagctctcgataacgcccttattagacctgggagatttgacatgcaagtgacagtgccccgacccgacgtaaaagggcgaacggagattcttaagtggtacctgaataaaatcaagtttgaccaatccgtagatccagagattatcgccaggggaacggtgggatttagcggcgccgaactggaaaatttggtaaatcaagccgcacttaaggctgccgttgatggtaaggagatggtgacaatgaaggagttagaatttagcaaagataagattctaatgggtccggaaaggaggtcggttgagattgataacaagaataagaccatcacagcatatcatgagtccggccacgcaatcatcgcttattataccaaagacgccatgcccatcaacaaagccacgatcatgcctcgaggacccaccctaggccacgttagtcttttacccgaaaacgacaggtggaacgaaactagggcccagctgctagcacagatggatgtcagtatgggcggccgcgtggccgaggagcttattttcggaactgatcacattacaacaggcgcctccagcgacttcgacaacgctaccaaaattgctaagcggatggtcacaaagtttgggatgagcgaaaaactgggggtgatgacctactctgatacaggtaagctgagtcccgagacccagagtgccatcgagcaggagatccggattctgctcagagattcctacgagcgcgccaaacacatcctcaagacacacgctaaggagcacaagaacctcgccgaggcgctgttgacctacgagacattagacgccaaggaaattcagatcgttctcgaggggaagaagctggaagttagatag

SEQ ID NO: 211671 - DNA, 2223 bp, synthetic construct
  misc_feature 1..2223: note = Description of Artificial Sequence: Synthetic coding sequence
  source 1..2223: mol_type = other DNA
atgttcagcctgagcagcaccgtgcagccccaggtgaccgtgcccctcagccacctgataaatgcttttcatacaccaaaaaatacaagtgtgtccctgagcggagtctccgtttcccagaatcaacatagagacgtcgtgccggagcacgaggctccctcttccgaatgtatgttttctgatttcctgactaagcttaacatcgtgagcataggcaaaggtaagatttttgaggggtatcgatcgatgtttatggaacctgctaagagaatgaagaaaagtctcgacaccacagacaattggcatatcaggcccgaaccgttttccctttcaattcccccttctttgaacctccgagaccttggcctgtccgaactgaagatcggacagatcgaccaactggtagagaatttgctccccggtttttgcaagggtaagaacattagtagccactggcatacttcccacgtgagcgctcagtctttcttcgaaaataagtatggcaatctggacatttttagtacattgcgctctagttgcctttatcggcaccactccagggccctgcagtcaatttgttcagacctgcagtactggccggtgtttattcagtcccgtgggtttaagacactgaaatcccgcacacggagattgcagtccaccagtgaacgcctcgctgaaactcaaaacatcgcccctagcttcgtgaagggatttcttctccgggaccgaggctctgatgtcgagtctctagacaaactcatgaaaactaaaaacatccctgaagcgcaccaggatgcatttaaaaccggcttcgccgaggggtttctgaaggcacaggctctcacccaaaagactaacgactcgcttcgacgaacgcggctgatcttattcgtattactgctgtttgggatttatggactgctgaaaaaccccttcttgtcagtgcgattcagaacaacaaccgggctggatagcgcagtggaccccgtgcagatgaaaaatgtgacctttgagcatgtaaagggggttgaggaagccaagcaggagctccaggaggtagttgagttcctaaaaaatccacaaaaattcaccattctggggggcaaactgcccaaagggatcctgctcgtggggccgccaggtactggcaaaacattactcgcccgggcggtggccggagaggctgacgtcccattttattatgcctcaggctccgaattcgatgaaatgtttgttggcgtgggtgctagtagaattagaaacttgtttagagaggcaaaggccaacgctccatgcgtgattttcattgatgagcttgattccgtcggtgggaagaggattgagagccctatgcacccatactcaaggcaaacaatcaaccagttacttgcggagatggatggtttcaaacctaacgaaggggtcatcatcattggcgcgactaattttcccgaggcccttgacaatgcgttgatccgccccggtagatttgacatgcaggttaccgtgccaagacctgacgtgaagggccggacggaaatactaaagtggtacttgaacaagatcaaattcgaccagagcgtcgaccctgaaattatagccagagggacagtgggattctccggggctgaacttgagaatctagtgaatcaagcagccttgaaagcagccgtggacggcaaagaaatggtgaccatgaaggagcttgaattttccaaggataagatcctcatgggacccgagcggaggtcagttgagatcgataacaagaacaagaccattacagcctatcacgagtcgggacacgcgatcattgcatactacacaaaggacgccatgccaattaataaagccactatcatgccccgaggaccaacactcggacacgtctcccttctaccagagaatgatagatggaatgaaacccgtgcccagttgctggcacagatggatgtgtcaatggggggacgggtggccgaagaactgattttcggcaccgaccacattacaactggagcttcctctgacttcgacaatgctacaaaaatagctaagaggatggtaaccaagtttggcatgtcagaaaagctaggagtcatgacttactcggacacggggaaactgagccccgaaacacagagtgcaatagagcaggaaatccgaatactgttacgtgatagctacgaaagggccaagcacatcttgaaaacccattcttag

SEQ ID NO: 211672 - DNA, 2052 bp, synthetic construct
  misc_feature 1..2052: note = Description of Artificial Sequence: Synthetic coding sequence
  source 1..2052: mol_type = other DNA
atgttcagcctgagcagcaccgtgcagccccaggtgaccgtgcccctatctcacttaattaatgcttttcacacgcccaaaaatacctcggttagcttaagcggagtctctgttagtcagaaccagcatcgcgatgtggttcctgagcatgaagcacccagcagcgagccatctctgaatctgcgggaccttggactcagcgagctgaagatcgggcagattgatcaattggtggagaacctgctacctggattttgcaaaggaaaaaacatcagttcgcattggcacactagtcatgtgtctgcccagagcttctttgagaataaatatgtctttattcaaagcaggggttttaagaccttgaagtctcggacgcggcggctccagagcacgtccgagcgactggctgaaactcaaaatatcgcgcctagtttcgttaaggggtttctgttacgggatagaggaagtgacgttgaatctctcgacaaattgatgaaaaccaaaaacatccctgaggcgcaccaggacgcatttaaaactggttttgcagaaggcttcctaaaggcgcaggctctgactcagaagaccaacgactcattgcgaaggacacgactcatcctctttgttctgttactgttcggaatctatgggctgctgaagaatcccttcctctccgtgcggtttagaactacgactggactcgacagcgcagtcgatccagttcagatgaaaaatgttacttttgaacatgtgaagggggtggaagaagcaaagcaggagctgcaggaggtcgtggagtttctaaagaacccccagaaatttaccatcttgggtgggaaattgcccaagggcattctcctcgtggggcccccgggcaccgggaaaacattgcttgccagggccgtagctggcgaagctgatgtgcctttctattacgccagcgggagcgaattcgatgagatgtttgttggcgtcggcgcatctcggatccggaacctcttccgcgaagccaaggccaacgctccctgtgtcatatttatcgacgagcttgactctgtcggagggaagcggatcgagagtcccatgcacccgtatagtcggcaaactatcaatcagctcctggctgagatggatggcttcaagcctaatgaaggcgttataattatcggggcaacaaattttcctgaagccctcgacaacgcgctgatcagaccaggacggtttgacatgcaagtgactgttccaagacccgatgttaaaggtcgtaccgagatcctgaaatggtacctgaacaaaattaaattcgatcagagtgtggaccccgaaatcatcgctaggggcactgtgggcttcagcggcgccgagctagaaaatttggttaatcaagccgcacttaaggctgcggtggatggaaaagagatggttactatgaaggaactggagttcagcaaggacaagatactgatgggacccgaacgaagaagcgtggaaatcgacaacaagaacaaaaccattacagcatatcacgagagtgggcatgccattatcgcgtactatactaaagatgcgatgccaatcaataaggcgaccatcatgccccgaggccctacactgggccacgtgtccctgctccccgagaacgacaggtggaatgaaaccagagctcagttgctggcacagatggacgtgagcatgggcggacgagtagccgaagagctcatattcggaacagatcatattaccaccggcgcatccagtgattttgataatgcaacaaagatcgcaaaacgcatggttactaaatttggcatgtctgagaagctgggagtcatgacttactctgataccgggaaactctctccagaaacacaatccgctattgagcaagaaatcagaatacttctacgcgattcatatgaacgagccaagcacatattaaagacccacgcgaaggaacacaaaaacctggcagaagctcttctgacctatgagacactagacgctaaggagatccagatcgtactcgaaggcaaaaaactggaagttcgctag

SEQ ID NO: 211673 - DNA, 2151 bp, synthetic construct
  misc_feature 1..2151: note = Description of Artificial Sequence: Synthetic coding sequence
  source 1..2151: mol_type = other DNA
atgttcagcctgagcagcaccgtgcagccccaggtgaccgtgcccctatcgcaccttatcaacgcctttcacactcccaagaatacttctgttagcttgtctggtgtgtctgttagccagaaccagcatcgggatgtcgtgcccgagcacgaagcaccctcttctgagccgagcctgaatctgcgcgatctgggtctgagtgagctgaagattggccagattgatcaacttgtggagaatctgcttcctggcttctgcaaaggaaagaatatctcctcccactggcacactagtcacgtgagcgctcagtccttctttgagaataagtacggtaatctcgatattttcagtacactaagaagctcttgcttatatcgccaccactcaagggctctgcagtcaatctgttccgaccttcagtattggcccgtcttcattcagagcaggggttttaagacacttaagtctaggacacgaaggctgcagtccaccagcgaacgtctggcagagactcagaacatagccccatcatttgtgaagggcttcttgctaagagatcggggatcagatgtagagtctttagataagctcatgaaaactaagaatatccctgaggctcaccaagatgccttcaaaacaggatttgcagagggattcctcaaggcccaggcactcacgcagaaaacaaacgactcactgcggcgcacaaggctgatcctattcgtcctgctgctctttgggatttatggcctgctcaaaaatccctttcttagtgtgaggttcagaaccactactgggctagattccgctgtggaccctgtacagatgaagaatgtgactttcgagcacgtgaagggcgtggaggaggccaagcaggagttgcaggaggtggtagagttcctgaagaacccccagaaatttacgatacttggcggcaaactcccgaaggggatcctcctcgtgggacctccaggcactggaaagactctcttggccagggctgttgctggggaggctgacgtacctttctactatgcctcaggttcagagtttgacgagatgtttgtgggcgtgggtgctagtcgaattcggaatttgttccgggaggctaaggccaatgcaccctgcgtgattttcatcgacgagctggattctgttgggggcaaacgtattgaaagcccaatgcatccgtacagccgccagaccattaaccagttactagcagagatggacgggtttaaaccaaacgaaggcgtgatcatcatcggcgcaacaaacttccccgaggccctggataatgctttgatcaggcccggtcggttcgatatgcaagtcaccgtgccccgccccgacgtcaaaggccgaaccgaaattctgaagtggtacttgaacaagattaagttcgaccagtccgtcgacccggagattattgctcgaggaacggtgggctttagcggggctgagctcgaaaacttagtcaatcaagctgctctgaaggcagctgtggatgggaaagaaatggtgacaatgaaggagctggagttctcaaaagacaaaattctcatgggacccgaaagaaggtctgtcgaaattgacaataagaataaaacaattaccgcataccacgagagcggccatgctataatcgcctactacaccaaggacgctatgcctattaataaggctacaattatgcctaggggaccgaccctggggcacgtttccctgcttcccgagaacgatcgttggaacgagacaagggcccagctgctagcccagatggatgtctctatgggcgggcgcgtggctgaagaactgatttttggcaccgaccacataactacgggggccagtagcgattttgataacgccacaaagattgcaaaacgcatggtgaccaagtttggaatgtctgaaaaactgggcgtgatgacttattcggacacggggaaattgtcacctgagacgcagtcagccatagagcaagagatccggatcttgcttcgcgattcctatgagagggccaaacatatcttaaagacacacgccaaggagcacaagaacctggctgaggctcttttgacatacgaaacattagacgccaaggagatccagatagtcctggaaggcaaaaagctggaggtgcgttag

SEQ ID NO: 211674 - DNA, 747 bp, synthetic construct
  misc_feature 1..747: note = Description of Artificial Sequence: Synthetic coding sequence
  source 1..747: mol_type = other DNA
atgtaccaggtgaccgtgcccctgagccacctgatcaacgccttccacaccccaaagaatacttccgtgtctctcagcggcgttagcgttagccaaaatcaacaccgggacgtagtgcccgaacatgaagctcctagctctgagccctcactgaacctgagagacctggggctttccgagctcaaaattgggcaaatcgatcagctggtcgagaacttgctccctggtttctgtaagggtaagaatataagttctcattggcacacaagccatgtgagtgcccagtcgtttttcgagaataaatacgggaatttagacatattcagcacgctgagaagtagttgtttgtacagacatcacagcagagcgctacagtccatttgcagcgacctgcaatactggccagtctttattcaatcccggggatttaaaaccctcaaatcgaggacaagacgcttacagagcacctcagaacggttggccgagacacagaacattgccccatcctttgtgaaaggctttctactcagggataggggctcggatgtggagtcacttgacaagctcatgaaaactaagaacataccagaggcccaccaggatgccttcaagacgggtttcgctgaagggtttctgaaagcccaagctctgacccaaaaaaccaacgattcccttcgtaggacgcgccttatactattcgtgctgctcttgtttggcatttatggtctcttaaagaacccattctag

SEQ ID NO: 211675 - DNA, 762 bp, synthetic construct
  misc_feature 1..762: note = Description of Artificial Sequence: Synthetic coding sequence
  source 1..762: mol_type = other DNA
atgttcagcctgagcagcaccgtgcagccccaggtgaccgtgcccctttcacacctgatcaatgcttttcatacaccaaagaacacctcagttagcctgagcggggtgagcgtgtcccaaaaccagcaccgcgacgtggtcccagagcacgaagctccgtccagtgaaccaagccttaacctgcgcgacctgggactttcagagctgaaaatcggccagatcgatcagttggtggaaaatctgctccccgggttctgtaagggaaagaacatttcaagccattggcatacctcgcatgtgagtgcccaatccttcttcgagaacaaatacgtgtttattcagagtaggggctttaagactctcaaatctcggacacgtaggctgcagtccacttcagaacggctcgcagaaacccagaacatcgcgccgtcatttgtcaagggcttcctgttaagggacaggggctcggacgtagaatcgctggacaaactgatgaaaactaaaaatattccggaagctcatcaagacgccttcaagaccggtttcgcagaaggcttcctcaaagcccaggcacttactcagaaaacgaatgattccctcaggagaactaggctgatcctcttcgtcctgctgctctttggcatttacggactgctcaagaacccctttctaagtgtgcgcttcagaaccactactggcttggactccgctgtagatcctgtgcagatgaagaacgtgaccttcgagcatgtcaaaggctag

SEQ ID NO: 211676 - DNA, 1551 bp, synthetic construct
  misc_feature 1..1551: note = Description of Artificial Sequence: Synthetic coding sequence
  source 1..1551: mol_type = other DNA
atgaagaccaagaacatccccgaggcccaccaggacgccttcaagactggctttgcagagggcttcttaaaagctcaggcccttactcagaaaaccaacgactcactgcgccggactcgcctgatcctgtttgtgctcctcctctttggaatttatggattactgaagaatcctttcttatcagtgaggtttcgtaccacaacagggttagactctgctgttgacccagtgcagatgaaaaatgtcacttttgagcacgtgaaaggggtggaagaggccaagcaggaattgcaggaggtggtcgaatttctgaaaaatccgcagaagtttacgatccttggggggaagttaccgaaggggatcttgctggtgggacccccggggacaggcaaaaccttgctcgctagagcggtagcgggggaggctgatgtgcctttctactacgctagtggcagcgagtttgacgagatgtttgtgggggtaggcgcatctcggatcaggaacctgttccgtgaggcaaaagctaacgccccctgcgtgattttcatcgatgaacttgatagcgtcgggggcaagaggattgaatctccaatgcatccatacagcaggcagacaattaatcagttgctggccgagatggacggctttaagccgaacgagggagtgattataataggagctactaacttccccgaggccttggacaatgcccttatccggcccggtcggttcgacatgcaggtcacggtgcctcgccccgatgtgaagggtagaaccgaaattctcaaatggtacctgaacaagattaaattcgaccagtccgttgatccagaaatcatcgcccgcggaacggtaggttttagcggagcagagctggaaaacttggtgaaccaagccgcccttaaagcagcagttgatggaaaggaaatggtgaccatgaaggagctagaatttagcaaagacaagatcttgatgggaccagagaggagatccgtggagatcgacaacaagaataaaacaatcacagcttatcatgagagtgggcacgccattatagcttactacaccaaagatgcgatgccgataaataaggccaccattatgccacgcggacctacgctgggccacgtgagcctacttcccgaaaatgacagatggaacgaaacgagggcccagctacttgcccagatggatgttagtatgggcggaagggtcgccgaagaactgattttcgggaccgatcatatcaccactggggcttctagcgacttcgacaatgcaacaaagatcgccaaacgcatggtcacaaaattcggaatgtccgagaaacttggcgtgatgacttacagtgacaccggaaaactatccccagagacacaatcagccatcgagcaggaaattcgaatactgctgcgagactcctacgaacgcgccaagcacattttaaagacgcatgccaaagaacataagaatctggccgaagcgctgctgacttatgagaccatgccgaagcggtttaaactcttcctcaggggcaagagctggaagtag

SEQ ID NO: 211677 - DNA, 1047 bp, synthetic construct
  misc_feature 1..1047: note = Description of Artificial Sequence: Synthetic coding sequence
  source 1..1047: mol_type = other DNA
atgttcggccccgccaagggccggcacttcggcgtgcaccccgccccaggctttccaggtggggtgtcccagcaggccgccggtacgaaagcaggtcccgccggtgcatggcccgtagggtccagaactgacacaatgtggcgcttaaggtgtaaggcaaaagacggaactcatgtccttcagggtctcagcagccggacgagggtgcgggagctacagggccagatagccgccatcacgggcatcgcccctggcggtcagcgcatcttagtcggctaccctccagaatgcctggatctgtctaatggcgacacaatcctagaggatctgcctatacagtccggcgacatgttaatcattgaagaggatcagacccgcccacggtcttcccctgcttttaccaagcgaggggcctctagctatgtcagggagaccttacctgtcctgactcgcacagtggtgccagccgataattcgtgtctgtttacctccgtttactacgtggtggagggaggcgtgctcaatcctgcatgtgcgcccgagatgcgtcgcctgatcgctcaaatcgtggccagcgaccccgacttctacagtgaggccatcttgggcaaaaccaatcaagaatactgcgactggattaaaagagacgacacttgggggggtgcaatagagatctcaattttgtccaagttttatcagtgtgagatttgtgtagtcgatactcagaccgtgcggatcgacaggtttggggaggacgcaggttacacaaagagagtgctcctgatctatgacggtattcactatgatccactccagcgcaacttccctgaccctgacacccctcccctgacaattttttcctccaacgacgatatcgtcctggtacaagcgttggaactcgccgacgaggctcgtcgccgccggcagttcactgacgtgaatcgatttaccttgcgttgtatggtctgccaaaaagggttgaccggacaggcagaagcacgggagcacgccaaggagacaggccacacaaatttcggggaggtatag

SEQ ID NO: 211678 - DNA, 915 bp, synthetic construct
  misc_feature 1..915: note = Description of Artificial Sequence: Synthetic coding sequence
  source 1..915: mol_type = other DNA
atggagaccctgcacatcatctacagcgaggccaagagcttcaccgtggaaggcctgagtagccgtacccgggtgagagagcttcaggggcaaatagccgccattacgggtatcgctcctggaggccaacgcatactggtgggttacccccccgagtgtctagacctgtctaatggagatactattctagaggacctcccaatacagagtggtgatatgttgatcattgaagaggaccagacacggccgcgaagctctcctgccttcactaagaggggcgccagcagctatgtgagggagacgctacccgtgctgacacggacggtagtccctgctgacaacagctgtctttttaccagcgtctactacgtcgttgaaggaggtgtcctcaacccggcctgcgcgcccgagatgaggaggcttatagcacagattgttgcttccgatcctgatttctattccgaagccatactggggaagaccaatcaggaatactgcgactggatcaaacgcgacgatacgtggggcggcgctatagagatttctattttgtctaagttttatcagtgtgagatctgcgtggtggacacacagacggttcggatagatcgctttggcgaagacgccggctacactaagagagtgctccttatttatgacggtatccactacgacccactgcagaggaacttccccgatcccgacacaccgcccctgacgatcttcagttccaatgatgacatcgtgctggtccaggcgctggaattggcagacgaggcgagaaggcgccggcagtttacagatgtaaatagatttaccctgcgctgtatggtgtgtcaaaaggggctgacggggcaggctgaagcccgcgagcacgccaaggagacaggacatactaattttggtgaggtgtag

SEQ ID NO: 211679 - DNA, 915 bp, synthetic construct
  misc_feature 1..915: note = Description of Artificial Sequence: Synthetic coding sequence
  source 1..915: mol_type = other DNA
atggagaccctgcacatcatctacagcgaggccaagagcttcaccgtagaaggcctgagctcacgcacaagggtgagggagttgcaggggcagatagccgccatcactggaattgctccagggggccagcgtatcctcgtgggttaccctccggaatgcttggacttgagcaatggtgataccatactggaggatctccccatccagagcggcgacatgctgataatcgaagaagatcagaccagaccacgcagcagccccgcgttcacaaagaggggagctagcagctacgtaagagaaacccttcccgtcctgactcgtaccgtggtccctgctgataactcttgcctgtttacctctgtgtactacgtggtggaaggcggtgtcctgaaccccgcatgtgctcccgaaatgaggcggttgatcgcccaaatcgtcgcctccgacccagacttctattcagaggccatacttggaaagactaaccaggagtactgcgattggatcaaacgcgacgatacctggggaggtgccatcgagattagcatcctctcgaaattttaccaatgtgaaatctgcgtcgtggatacccagaccgtccggatcgatagattcggtgaagatgctgggtacaccaaacgcgtgttactgatctacgatgggattcactacgaccccctgcagcggaacttcccggatcccgacacgccacccctgacaatcttctcctctaacgacgatatagtgctggtacaggcgctggagttagctgacgaggcccgcagacggagacaatttacagacgttaacagattcaccttgcggtgcatggtctgccagaagggcctcaccggccaggccgaggctcgggaacacgccaaggagacagggcatacaaacttcggtgaggtctag

SEQ ID NO: 211680 - DNA, 840 bp, synthetic construct
  misc_feature 1..840: note = Description of Artificial Sequence: Synthetic coding sequence
  source 1..840: mol_type = other DNA
atgagccccgcccggcggtgccggggcatgcgggccgccgtggccgcatcagtagggctgagcgaaggcccagccgggagtagatctggtcgcctcttcagaccccctagtcctgcacccgccgcccccggcgcaaggttactgcgactccccgggtctggggcggtccaggcggcttctcccgagcgggccggatggaccgaggcgctgagggctgccgtcgcagaactgcgcgcgggggcagtcgttgcagtaccaaccgacaccctctatgggctcgcatgcgcagccagctgcagcgcagcacttcgagcagtttatcgtttgaaaggccgatccgaggcaaagccgttggctgtgtgtctaggacgtgtggccgacgtgtaccggtattgccgagtccgggtgcctgaggggctgctgaaagacctgctacccggcccagtgactctcgtgatggagcgtagcgaggagctcaacaaagatctgaatcctttcacccctctggttggcattaggattcccgatcacgccttcatgcaggacctggcgcagatgtttgaggggcctcttgcattaactagtgccaacctgagttctcaggcgtcctctctgaatgtggaggaattccaggatctctggccccagctctcgttggtcatcgatggtggccagattggcgacggccaatctcccgagtgtagactcggaagtacagtggtcgatctgagtgtgccaggtaaattcggcataatccgcccaggttgtgcattagagtccacaacggccatcttacaacagaaatatggcctactgccatcccatgcctcttatctatag

SEQ ID NO: 211681 - DNA, 1740 bp, synthetic construct
  misc_feature 1..1740: note = Description of Artificial Sequence: Synthetic coding sequence
  source 1..1740: mol_type = other DNA
atgagcgccagcagcctgctggagcagcggcccaagggccagggcaacaaggtacagaatggtagtgtgcaccagaaggacggcctgaacgatgatgattttgaaccctatctctcgccccaggccaggcctaacaatgcatatactgccatgtcagactcttatttaccatcatactatagccctagcatcgggtttagctattcccttggagaggcggcatggtcaactggtggggacaccgctatgccatatctcacctcttatggacaattgagcaacggtgagccccattttctccccgacgccatgtttggccagcctggcgccctgggctcaacccctttcctaggtcagcatggattcaacttctttccctccggcatcgacttttccgcctgggggaacaatagctctcaagggcagagcacgcagtcatctggttatagctctaactatgcttatgcgccctcatctctgggcggtgctatgattgacggacaaagcgcattcgctaacgagaccctgaataaggcaccagggatgaacaccatcgatcagggtatggctgctctgaagcttggcagcaccgaggttgcctccaatgtacctaaggtggtgggaagcgccgtgggcagcggcagcattacctccaatattgtagcttcgaactctttacctccggctacaattgccccgccaaagccagcctcttgggccgacatcgcatccaagccagccaagcagcagcctaaattaaagaccaaaaatggaattgccggcagctctctgcccccgccccccataaagcacaacatggacatcgggacgtgggacaataaggggccggtcgccaaagctcccagccaagccctggtccagaatataggtcagccaacccagggctccccccagcccgtcgggcagcaggctaacaattctcctcccgttgcccaggcatctgtgggacaacaaacacagccattgccacctccaccccctcagcctgcacagttaagcgttcagcagcaggctgcgcagcccacaagatgggtggctccacgcaatcgtggatctggtttcgggcacaacggcgtggacgggaatggggttggccagtctcaagccgggagcgggtccaccccctccgaaccccaccctgtactcgagaaactgcggtccattaataactataaccccaaagactttgattggaatctgaaacacggccgagtgttcataatcaagagttactccgaggacgacatccacagaagcattaaatacaacatctggtgttcgacagagcatggtaataagcggctggatgccgcctaccgctccatgaacggtaagggtcccgtttacctcctgttttcagtgaacggatcgggacatttctgtggtgttgccgagatgaagagcgcggtggattacaacacatgtgctggggtctggtcccaagacaagtggaaagggaggtttgacgtgcggtggatctttgtaaaggatgtgccgaactcccagctgcggcacatacgactcgaaaataatgagaacaaacctgtaaccaactctcgggacactcaggaggtgcctctggaaaaagcaaagcaggtccttaagattatagcaagctataaacatacaacttcaatcttcgatgattttagccattatgaaaaaagacaggaggaggaggaatccgtcaagaaggagagacaggggcgcggaaaatag

SEQ ID NO: 211682 - DNA, 1710 bp, synthetic construct
  misc_feature 1..1710: note = Description of Artificial Sequence: Synthetic coding sequence
  source 1..1710: mol_type = other DNA
atgagcgccagcagcctgctggagcagcggcccaagggccagggcaataaggtccagaatggcagcgtgcaccagaaagatgggctcaatgacgacgacttcgaaccttacctttccccccaggcccgcccaaataatgcatacactgccatgagcgattcatacctccccagttactattcaccatctatcggctttagttacagcctcggggaggccgcctggagcactggcggagacaccgcaatgccgtatctgacgagctatgggcaactgtcaaacggggaaccacattttctaccagacgctatgttcggccaacctggagccctggggtctacacccttcctcgggcagcatggctttaactttttcccctcagggattgacttctctgcttggggaaacaattctagccaaggccaatccacccagtccagcggctacagttctaattatgcctacgccccttcatctctcggcggcgccatgatcgacggccaatccgcctttgccaacgagaccctaaataaggccccgggcatgaataccattgaccaggggatggccgcacttaaactggggagtacagaggttgcttctaacgttccaaaagtagtcggatctgctgtggggagtgggagtattacaagtaacatcgtggcttccaattctctccctcccgccacaatcgccccaccaaagcccgccagctgggctgatatcgccagcaagcctgctaagcagcagcctaaacttaagaccaaaaacggaattgccggatcttctctgccacctccccccattaaacataatatggatattggaacttgggataataaggggcctgtggctaaggccccctctcaggccctggtgcagaatataggacagcctacccaaggcagcccgcagcccgtcggccagcaggctaacaattctccgcctgtggctcaagccagcgtggggcagcaaactcaacccctgccccctcctccgccgcagccggcgcagctatccgttcaacaacaggccgctcagccaacccggtgggtcgcaccacgtaatcgtgggtctgggttcggacacaacggcgtcgatggaaatggagtgggacagagccaagctgggagcggcagcacgccatccgagccccacccggtcttggaaaaactccgatccataaacaattacaatccaaaggattttgattggaatctgaaacacggaagagtgtttatcattaaatcttactctgaggacgacattcataggagcattaaatacaatatctggtgcagcacagagcatggcaacaaacggttagacgctgcttatcgtagcatgaacggcaaggggccggtatacctgctcttttcagtgaacggtagcggccatttttgcggagtagcggaaatgaagtccgcagttgattacaacacctgcgcgggtgtctggtcccaggacaagtggaaagggaggttcgatgtgagatggatcttcgtgaaggacgttcctaactctcagttgcggcatattcggctggaaaacaatgagaacaaacctgtcactaactctcgcgacacacaggaggtgccactggaaaaggctaaacaggtactcaaaattatcgccagctataaacacactacatctatcttcgacgatttctcccactacgaaaagagacaaggccggagaaaatgctag

SEQ ID NO: 211683 - DNA, 1590 bp, synthetic construct
  misc_feature 1..1590: note = Description of Artificial Sequence: Synthetic coding sequence
  source 1..1590: mol_type = other DNA
atgagcgacagctacctgcccagctactacagccccagcatcggcttttcgtattctttaggggaggctgcgtggtctactggcggcgatacagccatgccgtacctgacatcatacggccagttgagcaacggagaacctcactttctccccgacgctatgttcggccaaccgggtgcgctcggttccacaccctttctgggacagcacggattcaacttctttccctcgggaatagatttcagcgcatgggggaataactcctcccagggccagtccactcagtcctccggctacagtagcaattatgcttatgcccctagcagcttgggcggggctatgatcgacggacaatctgccttcgcaaacgagacactgaataaagcacccggcatgaatactattgaccaagggatggctgctctcaagctgggaagcactgaggtggccagtaacgtccctaaggtcgttggttccgcggtgggcagcgggagtataacctctaatatcgtagcctctaattccttgccaccagctacaattgctcctcccaaaccggcctcttgggcagacattgcctcgaaacccgcgaagcagcaaccaaagctcaagacaaagaatgggatcgcgggaagtagtctccccccccctccaatcaagcacaatatggatataggaacttgggacaacaaggggccggttgctaaggctccctcccaggcgctagtgcagaatatagggcagccgacacaaggtagtccccagcccgtaggccagcaggctaacaactctccccccgtagctcaggctagtgttgggcagcagacccagcctctcccacccccacccccacagcccgcgcaactttccgttcaacagcaggctgcccaaccgacccgatgggtcgccccgcggaacaggggatccgggtttggccacaatggcgtggatggaaatggagttggacagagtcaggctggttcagggtccacaccttccgagcctcaccccgtcctcgagaagctcagaagcatcaataattacaatcctaaggactttgattggaatctgaagcatggtagggttttcattattaagagttattcagaagatgacatccacagaagcatcaaatataacatttggtgctccactgagcacggtaacaagagactggatgccgcttatcgttccatgaacggaaagggccccgtctacctgctgttcagcgtaaatggatctggacacttttgcggcgtggccgaaatgaagtctgctgtggattataacacttgtgctggcgtgtggagccaggacaaatggaaggggaggtttgatgtgaggtggatctttgtgaaagatgttccaaacagccagttgaggcacatcagactcgagaacaacgaaaataagcctgtaactaacagcagggacacgcaggaagtccctcttgaaaaagcaaagcaagtcttaaaaataatcgcgtcatataagcacaccacctctatctttgatgatttttcacattacgagaaaaggcaagaagaggaagagagcgtgaagaaggaacgacagggtagagggaaatag

SEQ ID NO: 211684 - DNA, 1740 bp, synthetic construct
  misc_feature 1..1740: note = Description of Artificial Sequence: Synthetic coding sequence
  source 1..1740: mol_type = other DNA
atgagcgccagcagcctgctggagcagcggcccaagggccagggcaataaggtacagaacggtagtgtgcaccagaaggacggcttaaatgatgacgattttgaaccctatctgtcgcctcaggcgcgccccaataacgcctacactgccatgagcgacagctatctgccctcatattactccccaagcatcggcttctcttactcccttggggaagccgcctggagcacaggaggggacacagcgatgccttatttaacgagctatgggcagttgagcaatggcgaaccacacttccttcctgacgccatgtttgggcaacctggagccctgggatccactcccttcctcggtcaacatggcttcaacttctttccaagtggcattgatttcagcgcttggggtaacaattcttctcaagggcaatcaacccagagctccggatactcctcgaactatgcctacgccccctcatccttgggaggagctatgatcgatggccagtctgcctttgccaatgaaacactgaataaggccccgggcatgaacacgattgatcagggcatggccgcactgaagcttggttcaacagaggtggctagtaacgtccctaaagtggtcggcagcgccgtaggctcaggttctattacatcaaacattgttgcttcgaactcccttccccccgcgacaattgctcctccaaaacctgcttcttgggccgacattgcatcaaagcccgcaaagcagcagcccaaactcaagacaaagaatgggattgccggaagctccctgccacccccaccaattaaacataacatggatatcggtacctgggacaataagggccccgtggcaaaagctccaagccaggctctcgtgcagaatataggacagccgacacaaggctccccccaacccgtcgggcagcaggccaacaacagccctcccgtggcacaggctagcgttggccagcagacccagcccctgccccctcctcccccacagcccgcccagttatccgtgcagcagcaggccgcacagcccacaagatgggtagcccccaggaaccgcggctctggatttggacataacggggtggacggtaacggcgtgggccagtcacaggccggatccggatccacaccatctgaaccccaccccgtcctggagaaactgcgcagtattaacaactataatccaaaggatttcgactggaacttgaagcacgggcgtgtgttcataattaagtcgtattccgaagatgatattcatcggtccatcaagtacaatatttggtgcagcacagaacacggtaataagagacttgacgcggcctataggagcatgaacggcaaaggacccgtgtacctgctgttttccgtaaacggatcaggacatttctgtggggtggcagagatgaagtccgctgtggattacaatacatgtgctggagtgtggtctcaggacaaatggaagggcagatttgacgtccgatggatttttgtgaaagatgttcccaattctcaactgagacatatcaggttagagaacaacgaaaacaaacctgtgacaaatagtcgggacacccaggaagtgcccctggagaaggccaagcaggttctgaagatcatcgcatcttacaagcatacgacatccattttcgatgatttctcccattatgaaaagagacaagaagaggaggaatcggtgaaaaaggagcgtcagggccggggcaagtag

SEQ ID NO: 211685 - DNA, 1245 bp, synthetic construct
  misc_feature 1..1245: note = Description of Artificial Sequence: Synthetic coding sequence
  source 1..1245: mol_type = other DNA
atggccagcggcgacaccctgtacatcgccaccgacggcagcgagatgccagctgagatcgtggagttacacgagatcgaagtggagaccatccctgtggagaccatcgagacgaccgtggtcggtgaagaagaggaagaagacgatgacgatgaagacggcgggggaggtgatcatggcgggggaggcggccatggtcacgctggccaccatcatcatcaccatcaccatcaccatcaccctcccatgattgctttgcagcccctcgtcaccgatgacccaacccaggttcaccatcaccaggaggttatcttggtgcaaacacgggaagaggttgtgggaggcgacgattcagacggcttgcgagccgaggatgggtttgaagatcagattctgatacccgtgcccgcacccgctggcggtgatgatgattacatcgagcagactttggtaacagtggccgcggccggcaaatccggaggaggcggaagctcctcaagcggcggcggtagagttaagaagggaggcggaaaaaagtccggaaagaagtcctacctctcgggcggggcaggcgccgctggtgggggcggcgctgacccaggaaacaagaagtgggaacaaaaacaagttcagattaagacacttgaaggcgagttttcagtgactatgtggtcctctgacgaaaaaaaagacatcgatcatgaaacagttgttgaagaacagattatcggggaaaacagcccccctgactacagcgagtatatgacgggaaagaaacttcctccgggcggcatcccggggatcgatcttagtgatcctaaacaactcgctgagttcgcccggatgaagccgagaaaaattaaagaggatgatgccccacggaccatcgcatgtcctcacaaaggctgtacgaagatgtttagggacaacagtgccatgcggaagcatctccatacacacggacccagagtccacgtgtgcgccgagtgcggaaaggcttttgtcgaatcctccaaactaaaaagacaccagctggttcatactggcgagaagcctttccagtgcactttcgaggggtgtggaaagaggtttagcctggatttcaatcttcggacccacgtcaggatccatactggtgataggccatacgtttgccccttcgatggctgcaacaagaaatttgcgcagtctaccaacttgaagagtcatattctgactcacgcgaaagctaagaataaccagtag

SEQ ID NO: 211686 - DNA, 105 bp, synthetic construct
  misc_feature 1..105: note = Description of Artificial Sequence: Synthetic coding sequence
  source 1..105: mol_type = other DNA
atggccagcggcgacaccctgtacatcgccaccgacggcagcgagatgcctgcagagattgtcgaactgcacgagatagaggtggagacgatcccagtcgagtag

SEQ ID NO: 211687 - DNA, 1221 bp, synthetic construct
  misc_feature 1..1221: note = Description of Artificial Sequence: Synthetic coding sequence
  source 1..1221: mol_type = other DNA
atggcccaggcccccgccgaccccggccgggagggccacctggagcagaggatcttacaggtacttacagaagcaggatcccctgttaagttggcccaactggtaaaggaatgtcaggcccctaagagggaattgaaccaggtcctgtaccgaatgaagaaggagcttaaggtgtctttgaccagccccgcaacttggtgtttgggcggcaccgatccagagggtgagggccccgcagagctggcgcttagctccccagaggaagacatctataggtttttaaaagataacggcccacagcgggcgttagtgattgcccaggcattggggatgcgcacagcaaaagatgtcaatcgggatctgtatagaatgaagtctcgtcacctccttgacatggacgaacagtccaaagcttggactatctataggcccgaagactcaggccggcgcgcaaagagcgcctccatcatctaccagcacaaccctataaacatgatctgccagaacggtcctaacagttggataagcatcgcaaactccgaggcaatccagatcggccacggcaacatcatcacacgccagactgtgagccgagaggacgggtcagcgggccctcgccacctgccctccatggcaccaggcgattcatccacctgggggaccctggttgatccctggggtccacaggatattcacatggaacagtcaattttacggcgggtgcagcttggccattctaacgagatgcgactgcacggtgtgccaagtgagggtccggcccacattccccctgggagcccccccgtctcagcaactgctgccgggccagaagcatctttcgaagctcgcataccaagccccgggacgcacccggagggcgaggccgcccaacgcattcatatgaaatcatgtttcctggaagatgccaccattggaaattctaataagatgtccatttcccctggggtcgcaggccccggcggggtggccgggtcgggggagggggagcctggggaagacgccggacggcggccagctgacactcagtctcggtcacacttcccaagggacatcggccagccaataacaccctcacatagcaaactgacacccaagctggaaacaatgacactgggtaatagatcgcataaggccgccgaaggctcccactacgtggacgaagctagtcacgaagggtcttggtggggaggcgggatttag

SEQ ID NO: 211688 - DNA, 1341 bp, synthetic construct
  misc_feature 1..1341: note = Description of Artificial Sequence: Synthetic coding sequence
  source 1..1341: mol_type = other DNA
atggcccaggcccccgccgaccccggccgggagggccacctggagcaacgcattctgcaagtcctcactgaggctggaagccctgtgaagctcgctcagcttgtgaaggaatgccaagccccaaagagagagttgaatcaggtcctctacagaatgaagaaggagctgaaagtgtccttaacaagccccgccacttggtgcctgggtgggaccgaccccgaaggcgagggtcctgccgagctggctctcagcagtccggccgaacggcctcaacagcacgccgccactatacctgagactccaggcccacaattcagccaacagcgagaagaggatatatatagattcttgaaggataacggtccccagcgcgctctggtcatcgcccaggccctcggtatgaggactgccaaggatgtgaaccgggacctgtacaggatgaagtctcgccacctgctggatatggacgagcagtctaaggcctggaccatttacagacctgaggacagcggaaggagagcaaaatctgcaagtatcatctatcagcacaaccccataaacatgatctgtcagaatgggccgaattcatggatatccatcgccaacagcgaagctatccaaatcggccacgggaatatcatcactcgacagacagtgagtagagaggacggcagcgccgggcctaggcaccttcccagtatggcaccaggagattccagtacctgggggacactggtagatccctgggggccgcaggatatccacatggagcagtccatcttacgccgggtgcaattaggccactcaaatgagatgaggttgcacggcgtacccagcgaaggacctgcacacatacctcccggttctccccctgtgtccgcaaccgccgcagggcccgaggcctcttttgaagctaggattccctctcctggtactcacccggagggagaagccgcccaaaggatccatatgaagagttgctttctcgaggacgctacaataggaaactctaacaagatgagtatttcacctggagtcgctgggccaggcggggtggctggtagcggtgagggggaacctggtgaagacgcagtggcagctttcactgaggtgctgaatccgagtaagtccttcatgaagttcggaatcaattttttccagacgcccgtaaatgtggatagtctgacatcctcgcacgagagccaaatgtttctcaccgcatgtcgcttggtcatcttctcgagaagattttccacatattttgcgcagattcacctgaggaaccattcagtgctgcacctttgtccgcacaagatatatttgcttaaaaacaagaagtag

SEQ ID NO: 211689 - DNA, 1143 bp, synthetic construct
  misc_feature 1..1143: note = Description of Artificial Sequence: Synthetic coding sequence
  source 1..1143: mol_type = other DNA
atggcccaggcccccgccgaccccggccgggagggccacctggagcagcggatcttgcaagttcttactgaggccggttcccccgtgaaacttgcccagcttgtaaaagaatgtcaggcccctaaaagagaactcaaccaggttctttatagaatgaagaaagagctgaaggtgtccctaacaagcccggccacctggtgcctgggggggacagatcccgaaggggaaggaccggcggagctggctctaagttctcccgccgaacgaccccagcagcacgctgctaccatccccgagactccaggcccacagtttagtcaacaacgcgaagaagatatttaccgctttttaaaggataatgggccacagcgggcgcttgttatcgcacaggccttgggtatgaggaccgctaaagacgtaaacagagacctttatcggatgaaaagtcgtcacctcctggacatggacgagcagagcaaagcgtggacgatttaccggccggaagattccggtcgaagggctaagtctgccagcattatctatcagcataatccaatcaacatgatctgccagaatgggccaaacagctggataagtattgccaactcagaggccattcagataggacacggcaatatcattaccaggcagacggtgtctcgggaagacggcagcgctgggccaagacatctgccttcaatggcccccggcgactcttcaacatggggcaccctcgtggacccctgggggccacaagacattcacatggagcagagtattcttaggcgggtccagcttggtcattccaacgaaatgaggctccacggtgtgccatctgagggcccggcccatattccacccgggagcccaccggtctctgctactgcagccggacctgaggcctctttcgaggccaggatacctagccccgggacccatcccgagggggaggctgcacagagaatccacatgaagtcctgttttcttgaagatgctacgatagggaacagcaataagatgtcaataagtcctggcgtggccgggccaggaggcgtggccggcagtggtgaaggtgagccaggtgaggatgctggcagaaggccggccgatactcaggctaggagcttcgatggacaggagtag

SEQ ID NO: 211690 - DNA, 1290 bp, synthetic construct
  misc_feature 1..1290: note = Description of Artificial Sequence: Synthetic coding sequence
  source 1..1290: mol_type = other DNA
atggcccaggcccccgccgaccccggccgggagggccacctggagcagagaattttacaggtcctgactgaagccggaagtccagtgaagctagcacagcttgtaaaagaatgtcaagcacccaagagagagctaaaccaggtgttgtatcggatgaagaaggaactgaaggtgagcctcacgagccctgccacatggtgcttaggcggcacggaccccgagggagaaggcccagccgagctggccctgtccagtcccgctgaaaggcctcagcagcacgctgctaccatcccagagacccccggcccacaattcagccaacagagggaagaagacatctacagattcctgaaggacaacgggcctcaaagagctcttgtgattgcacaggcgttagggatgcgtaccgccaaggacgtcaatagagatctttacagaatgaagtctcgccacttactggatatggatgaacaaagcaaggcttggaccatttaccgccccgaggactcaggtagaagagccaaatctgccagtattatttatcagcataacccaatcaacatgatctgtcaaaatggcccaaatagttggatttcaatagcaaacagtgaggcaattcagattgggcatggaaatataatcactcgccagacagtttctagggaagacggttctgcagggccacggcatttaccttctatggcccccggggacagctcgacttggggaacactggtggatccctggggcccccaggacatccatatggaacagagtatcctccgccgtgtccagctagggcattctaacgaaatgagattgcacggggtgccttcagaaggccctgcgcacataccccccggctcacctccagttagcgccactgcggcaggacccgaagcgtcatttgaagctcgcatcccctctccaggaactcaccccgaaggagaggccgcgcaaagaattcatatgaaaagttgctttctggaggacgctaccataggtaactccaacaaaatgagcatttccccgggggtcgcggggcctggcggcgtagcggggagcggcgaaggcgagcctggggaggacgctgggcgccgcccggccgacactcagtcgaggagtcatttcccacgggacatcggacaaccaattactcctagccattctaagctcacccccaagttggagaccatgaccttgggcaaccgaagccacaaggcagccgaaggcagccattatgtggatgaggcttcgcacgaagggtcatggtggggtggcggaatatag

SEQ ID NO: 211691 - DNA, 747 bp, synthetic construct
  misc_feature 1..747: note = Description of Artificial Sequence: Synthetic coding sequence
  source 1..747: mol_type = other DNA
atggcccaggcccccgccgaccccggccgggagggccacctggagcagcgtatcctgcaggttttaaccgaggccgggagtcccgtaaaattggcgcagctggtcaaagaatgtcaggcaccaaagcgagagcttaatcaggtcctgtaccgaatgaaaaaagaactgaaggtctccctcacaagtcctgcaacatggtgcctggggggcacagacccagagggcgaaggcccggctgagttagcactaagcagccctgccgagaggccacaacagcacgctgccaccattccagagactccaggcccacaattcagccagcagagagaggaggacatatacaggtttctgaaagacaatggaccccagcgggcgcttgtcatagcccaggcgctgggtatgagaacagctaaagacgtaaaccgcgatctgtaccgaatgaagtcccgccatctgctggacatggatgagcagtccaaagcttggaccatttatcgccccgaggattcgggccgtagagctaagtccgcctccataatctatcaacacaatcctatcaacatgatatgtcagaatgggccaaactcgtggatatcgatcgctaattccgaggctatacagatcggacatggtaatatcataacacgccagacagtgagccgggaagatggcaagtctccaaagagggcccagggcggggacctcggcggggaacccccggatcctcttggagggggcaaaggatag

SEQ ID NO: 211692 - DNA, 1065 bp, synthetic construct
  misc_feature 1..1065: note = Description of Artificial Sequence: Synthetic coding sequence
  source 1..1065: mol_type = other DNA
atggcccaggcccccgccgaccccggccgggaggccgagcggccccagcagcacgccgcaacgatacctgaaacaccaggaccccagttctctcagcagcgggaggaagatatctatcgattcctgaaggataatggcccacagagagccctcgtcatcgctcaagctctcggtatgaggactgccaaagatgtaaaccgggatctctataggatgaaatcaaggcatctgcttgacatggacgagcaatccaaagcttggacaatttaccgtccagaggattctggaagacgggccaaaagcgcatctatcatctaccagcataaccctattaacatgatatgccagaacggacccaattcctggatatctatcgccaacagtgaagcgatccagataggccatggcaacatcatcaccagacagacggttagcagagaggatggatccgccgggcctagacatctgcccagtatggcccctggagattcatcaacctggggtacgctagtcgacccctggggcccccaggatatccatatggaacagtccatactgcggagagtccagctgggccattccaatgaaatgcgcttgcatggagtaccatcggaggggcctgcccacattccaccagggtcccccccagtcagtgcaacagcagcgggaccggaggcttcctttgaagcccgaattccaagccctgggactcaccccgaaggagaagctgcccagcgcatccatatgaagtcttgcttcctagaagacgccactatcggcaactctaataaaatgtcaatctcgccaggcgtggccggccccggcggtgtcgcgggcagtggagaaggcgagccaggggaggacgctggccgcagacctgctgacactcaaagcaggtcccatttccctagggatattggccagccaatcactccttcgcatagcaagttgacacctaaactagagactatgactctagggaaccgttcacacaaggccgcagagggcagccattatgtggacgaggcatcacatgagggaagttggtggggtggcgggatatag

SEQ ID NO: 211693 - DNA, 1860 bp, synthetic construct
  misc_feature 1..1860: note = Description of Artificial Sequence: Synthetic coding sequence
  source 1..1860: mol_type = other DNA
atgcccgaccccgccgcccacctgcccttcttctacggcagcatctcaagagccgaagcggaggaacatctgaagctagccggcatggcagatggcctgttcctgctgcgacagtgtctgagatctctggggggctatgtactgtctctggtacacgatgtccgtttccaccattttcctatcgagcggcagctgaacggcacttacgccatcgcaggcggaaaagctcactgcggaccggctgagctgtgcgaattctactcacgggaccctgacggtttgccgtgcaacctgcgcaaaccatgcaacaggccttctgggctcgagcctcagcctggagtcttcgactgcctgcgcgacgcgatggtgagagactatgtcaggcagacctggaagctggagggagaagccctggagcaggcaatcataagccaggccccccaggtagaaaaacttatcgcgaccactgcacatgagaggatgccttggtaccattccagcctgacaagagaagaggccgaaagaaagttatatagcggcgcccagaccgacggaaaattcctgctgagaccccgaaaagagcagggaacatatgccctctccttgatctacgggaagacagtttatcactatcttatatcccaggacaaagcaggaaaatattgcattcccgagggaaccaagttcgacactctctggcaactggtcgaatatctgaagttgaaggctgacggtctaatctattgcctgaaagaagcatgccccaactcttcagcatccaacgccagcggcgcggctgcccctactctgccagcacacccaagtacactgactcatcctcaacggcgcattgacacactgaactccgacggatacactcctgagcccgcaaggattacatctccagataagccaagacctatgcctatggacaccagcgtctacgagtctccctattcggacccagaggagctgaaggataaaaaactgttcctcaagcgtgataacttgcttattgccgacatcgaactgggctgtggaaactttgggtctgtcagacagggggtctataggatgcggaagaagcagatcgacgtagccatcaaagttctcaagcaggggactgagaaagcggacaccgaggaaatgatgcgggaagctcagattatgcaccagttggacaatccttatattgtcagattaataggcgtctgtcaggcagaggcccttatgctggtgatggagatggcaggaggggggcctctccataaatttcttgtgggtaaaagggaggaaattcctgtgagtaatgtggccgagttgttgcatcaggtgtctatgggcatgaaatatctggaagagaagaactttgtacaccgggatttagctgctcggaacgtgctgttggttaatcggcactatgcaaaaatttcggatttcgggctgtccaaggcactgggcgcagacgattcctactatacagcccgaagtgcaggcaaatggccactgaaatggtacgcacctgagtgcataaactttaggaagttctcctctcgatcagatgtgtggagctacggggtgaccatgtgggaggcgctctcatatgggcaaaagccttacaagaagatgaaaggaccagaggttatggccttcatcgagcagggaaagcggatggaatgtccacccgagtgtccccccgaactatacgcacttatgagcgattgctggatttacaaatgggaagatagacctgactttctcactgtggagcaacggatgcgcgcatgctactattcactggctagcaaagtggaggggcctcccggatccacccaaaaggcagaggcagcttgcgcatag

SEQ ID NO: 211694 - DNA, 1482 bp, synthetic construct
  misc_feature 1..1482: note = Description of Artificial Sequence: Synthetic coding sequence
  source 1..1482: mol_type = other DNA
atgcggctgggcccccggtggaagggcgaggccctggagcaggccatcatctctcaagcgccacaggttgagaagttgatcgccactacggctcatgaaagaatgccctggtatcattcttccctgaccagggaggaggctgagcgcaaactgtatagtggagcacagaccgatgggaaattcctgctgcgcccgaggaaggagcagggcacatacgccctttcattgatttacgggaaaactgtgtatcactatttgatctcacaggataaggctggcaagtattgtatcccagagggcaccaaatttgatacattgtggcaactggtggagtatttaaagctcaaagcagatggactcatttactgtctgaaagaggcctgtcccaactctagcgcctctaacgcgtctggtgccgctgcccccacattgccggctcatccctccaccctgacacatcctcagaggcgaatcgatactctgaactcagatgggtatacacctgagcccgcccggatcactagccctgataaaccacggcccatgcccatggacacctcagtctacgaatctccctactctgatcctgaagagctcaaggacaagaaactctttttgaagcgggataaccttctgattgcggatatcgagttgggctgcggaaacttcgggagcgtccgacagggcgtttacagaatgcgaaaaaaacagatcgacgtggccatcaaggtactcaagcagggaacagaaaaggctgacacagaggagatgatgagggaggctcagattatgcaccaacttgataacccatatatcgtcagactcatcggtgtctgtcaagctgaagcccttatgttggtgatggagatggccggtggaggtcccctccacaagttcctggtcgggaaaagagaggagatccctgtttctaacgtggccgaactccttcatcaggtttcaatgggcatgaaatatctcgaagagaaaaacttcgtgcacagagacctcgcagctcgtaatgtccttcttgtgaatcgccattacgcaaagatctccgatttcggcctgagcaaagcgctgggggcagacgacagctactacaccgcccgtagcgcaggaaaatggcccctgaagtggtacgctccggaatgtatcaacttccggaaattctctagcagaagcgacgtgtggtcgtacggggtcacgatgtgggaagctctgagttacggacagaaaccctataaaaaaatgaaaggcccagaggtgatggccttcatcgagcaggggaagagaatggaatgcccccctgagtgcccacccgaactgtacgccctcatgtcagattgttggatttacaaatgggaggacagacccgattttctcactgtggagcagcggatgcgggcgtgctactacagtctggcatccaaagttgaaggtccccctggatcaacccagaaggctgaagctgcctgtgcatag

SEQ ID NO: 211695 - DNA, 939 bp, synthetic construct
  misc_feature 1..939: note = Description of Artificial Sequence: Synthetic coding sequence
  source 1..939: mol_type = other DNA
atgcccatggacaccagcgtgtacgagagcccctacagcgaccccgaagagttgaaggataaaaagctctttctcaagagagacaaccttctcatcgccgatattgaactgggctgcggaaacttcggcagcgtaaggcagggcgtgtaccgaatgaggaaaaagcaaatcgatgtagcaataaaggttcttaagcagggaacagaaaaggctgatacagaagaaatgatgagggaggctcaaataatgcaccagctcgataacccatatattgtgcgcctgattggggtttgccaggctgaggcgcttatgttggttatggaaatggctggaggtggccctttgcataagttcctggtcggcaaacgcgaggaaatcccggtctccaacgtcgctgagttacttcaccaagtgtctatggggatgaagtatcttgaggagaaaaattttgtccaccgtgatctcgctgcacgaaacgtcctccttgtcaaccgacactatgcaaagattagcgactttggactatcaaaggccctgggcgccgatgacagctactacacagctcggtccgccggcaagtggccactaaaatggtacgctccagagtgtattaatttccgaaaattctccagtaggagtgacgtttggagctatggtgtcactatgtgggaggcgttatcttatggacaaaagccttataaaaaaatgaaaggccccgaggtgatggcgttcattgaacaggggaagaggatggaatgtcctccggaatgcccccctgaactctacgcacttatgtcagattgttggatctacaaatgggaagatagaccagacttcttaactgtcgaacagagaatgagggcctgttattacagcctggctagtaaggtcgaagggcctccaggatcgacacagaaggcagaagccgcgtgtgcctag

SEQ ID NO: 211696 - DNA, 1344 bp, synthetic construct
  misc_feature 1..1344: note = Description of Artificial Sequence: Synthetic coding sequence
  source 1..1344: mol_type = other DNA
atgctgctggacgccggcccccagtaccccgccatcggcgtgaccaccttcggggcttcccgccatcatagcgcaggagacgttgccgaacgggacgtaggtttggggatcaatccctttgctgatggcatgggtgcttttaagttgaacccgtcttcacatgagctggccagcgccgggcagactgcattcacttcccaagccccaggctatgccgcggctgctgcacttgggcatcaccatcatccgggtcatgtgggcagctattctagtgcagcgttcaactccactagagatttcctttttcgcaaccggggttttggcgacgcggctgccgctgcatcagcccaacactcactcttcgccgcttcagccggcggatttggtgggccccacgggcacactgatgctgcaggacatttgctgttcccaggtctccatgagcaggctgctggtcatgcgtctccaaacgtggtcaacgggcagatgcgacttggtttctctggtgacatgtacccccggcccgagcagtatgggcaggtgacctcccccaggtccgaacactatgccgccccacagctgcatggttatgggccaatgaatgtcaacatggccgcccatcatggagccggagctttctttcgctacatgagacagccgatcaagcaggagttgatctgtaagtggattgaacccgagcaactcgcaaaccctaaaaagagctgcaataagacattcagtacaatgcacgagcttgtcacacatgtgacggttgagcatgtaggaggcccagagcagtctaaccatatctgcttttgggaggaatgtccacgcgaagggaaaccttttaaggcaaaatacaaactggtgaaccacataagagttcatacaggggagaagccattcccatgcccatttcctgggtgcggaaaggtgtttgcgcggagcgaaaacttgaagatccataaaagaacccacaccggagagaagcccttcaagtgtgagtttgagggttgcgatcgaaggttcgccaatagctctgaccgcaaaaagcacatgcacgttcacacaagcgacaagccctatttatgtaaaatgtgtgacaaatcttacacacaccccagctccttgcggaagcatatgaaggtccacgaatccagcagtcagggttcacaaccttcccccgcagcatctagtgggtacgagagctcaacgcccccaacaatagtgagtccgtcaaccgacaatcctacaacctccagtttatcgccttcatcctctgccgtgcaccacaccgcagggcacagtgccttgagttctaattttaatgagtggtacgtctag

SEQ ID NO: 211697 - DNA, 1599 bp, synthetic construct
  misc_feature 1..1599: note = Description of Artificial Sequence: Synthetic coding sequence
  source 1..1599: mol_type = other DNA
atgctgctggacgccggcccccagttccccgccatcggcgtgggctccttcgctcggcatcaccatcactctgccgccgctgccgcagctgcagcagccgaaatgcaggatagggaactgtcactggcggccgcccagaacgggttcgtcgattccgctgctgcccacatgggcgcctttaaacttaacccaggcgcccacgagctgtctccaggacagtcctctgccttcacctcccaggggcccggggcctatcccggatcagcggccgccgccgcagccgccgcagccctggggccccatgcggctcacgtaggatcttactccggccctccatttaattctacccgagacttcctgtttcggagccgagggttcggcgatagcgcacccggcggagggcaacatggcctattcggtccaggcgcggggggtttgcatcacgctcattccgatgcacagggccacttgctgttccctgggctgccagagcagcacggccctcacggttcacagaacgtgcttaatggccaaatgagactcgggttgcctggggaggtatttgggagatctgagcaataccggcaggtggcctccccaagaaccgacccatactcagccgcccaactccataaccagtacggacccatgaacatgaatatggggatgaacatggccgccgccgccgcccaccaccaccatcatcaccaccatcatcccggcgcttttttccggtacatgcgtcagcagtgtattaagcaggaactaatctgcaagtggatagaccccgagcagctatccaatcctaagaaatcctgcaataagacgttctccactatgcatgagctcgtgacccacgtgagcgtcgagcacgttgggggtcccgaacaaagcaatcacgtttgtttttgggaggagtgtcccagagaaggaaaacccttcaaggctaaatataagctggtcaaccacatacgcgtgcatactggtgagaaaccgtttccatgcccctttcctggctgcggtaaggtttttgctcgctccgaaaatttgaaaatacataagcggacccacaccggcgagaaacctttccagtgcgagtttgaagggtgcgaccgcagatttgcaaacagtagcgatcgtaaaaagcatatgcatgtgcatactagtgacaaaccctatctgtgcaagatgtgcgataagtcctatacacacccaagcagtctgaggaagcatatgaaggtgcacgagagctcacctcaagggagcgaaagctctccggccgccagcagtggctacgaatccagcactcctcccggactagtctcccctagtgcggaacctcagtcttcgagtaacctgagtccggcagccgcagccgctgccgcggctgctgccgctgctgccgctgctgtgtcagccgtccatcgtggcggcggatcgggtagcggaggagcaggtggcggaagcggcggggggagtgggtctggtggcggagggggcggagcgggaggcggtgggggcggcagttccggcggcggttccgggactgcgggaggccattcaggtctatcatcgaatttcaatgaatggtacgtgtag

SEQ ID NO: 211698 - DNA, 489 bp, synthetic construct
  misc_feature 1..489: note = Description of Artificial Sequence: Synthetic coding sequence
  source 1..489: mol_type = other DNA
ccccccccccccccccccccccccgccccccccccccccccccccctaaatcccaaaaaatcctgtaacaagacattttcaacgatgcatgaactggtcacccacgttagcgtggaacacgttggcgggcctgaacagtctaaccacgtgtgcttttgggaggaatgtcctagggagggtaaacccttcaaggctaagtacaagctagtgaaccacataagagtccatacaggggagaagcccttcccgtgcccgttccccggatgtggcaaagtgttcgcgcgctccgaaaacctgaaaatccacaagcgcactcacactggagagaaacccttccaatgtgaatttgagggctgtgatcgtcgttttgctaactcttcagatcgtaagaagcacatgcacgtgcatacttcagataaaccatatttatgcaaaatgtgcgacaagtcctacacacacccatcttcactcaggaagcacatgaaatag

SEQ ID NO: 211699 - DNA, 783 bp, synthetic construct
  misc_feature 1..783: note = Description of Artificial Sequence: Synthetic coding sequence
  source 1..783: mol_type = other DNA
atgctgctggacgccggcccccagttccccgccatcggcgtgggcagtttcgctagacaccaccatcactccgctgctgccgctgcagctgcggccgccgaaatgcaggatagagagttgtctctggcagcagcacagaatggttttgtagacagcgctgctgcacacatgggagctttcaagctcaatcccggagctcatgaactgagtcctggacagtccagcgcattcacttctcaaggccccggcgcatatccaggtagcgccgccgcggcagccgccgcagctgcattggggccgcacgctgcccatgttggaagctattccgggccaccattcaattctacgcgggacttcctcttcagatcacggggatttggggacagtgcgcctggcggaggccagcacgggctgttcgggccgggggccggtgggctgcaccatgcccatagtgacgctcaggggcatctgctcttccctgggctccccgaacaacatggtccccatggatcacaaaacgttctcaatggacagatgcgactgggtctgcccggagaggttttcggcaggagtgagcagtaccgccaggtggcctcgcctcggacagatccttactccgctgcccagttacacaaccaatacggccccatgaatatgaacatgggaatgaacatggccgccgcagctgctcatcaccaccaccatcatcaccacccagtgccctctttgctcacgaactgtgttcactcaggcctgctgctgtcccctcctaggtggttttag

SEQ ID NO: 211700 - DNA, 1404 bp, synthetic construct
  misc_feature 1..1404: note = Description of Artificial Sequence: Synthetic coding sequence
  source 1..1404: mol_type = other DNA
atgaccatgctgctggacggcggcccccagttccccggcctgggcgtcggaagtttcggcgcgccgcgacaccacgagatgccaaacagagagcctgctggaatgggactcaaccctttcggagactcaacacatgctgccgctgccgctgccgctgccgccgccttcaaattgagcccagctgcagctcacgacctgtcctctggccagtctagcgctttcacccctcagggctcgggctatgccaacgcactgggccaccaccaccatcaccaccaccaccatcaccatacatctcaggttcctagttacggcggggccgcatccgctgccttcaacagcactcgcgaattcctgttcagacagcggtccagcggactgtcggaggccgcctcaggaggggggcagcacggactatttgcaggcagcgcttctagcctgcacgcgcctgccggtattcctgaacctccatcctatctgttgtttcctggtctccatgagcaaggggcgggacatccttcaccgactgggcacgtcgacaataaccaggttcacctcggcttgcgaggcgagctgttcggtcgagccgacccctacaggccagttgcctctccgcggaccgacccatatgcggctggggcgcagttccctaactactcccctatgaatatgaatatgggggtgaacgttgcggcccaccacgggccaggggcattttttcgctacatgaggcagccaattaagcaggaactctcctgcaagtggatagacgaagcacagctctccaggccaaagaagtcctgcgacagaaccttctcaactatgcatgaactggtgacacatgtgacaatggaacacgtcggtggaccagagcagaataaccatgtgtgctactgggaggagtgccctcgcgaaggtaagtcattcaaggctaagtataaactggtaaaccatatccgcgtccacaccggggagaagcctttcccttgtccctttcctggatgcgggaagattttcgcccgcagcgagaacctcaaaattcataagcggacccacacgggtgagaaaccttttaaatgtgagttcgaagggtgcgacagacgctttgccaactctagcgataggaaaaaacacatgcatgtgcatacaagtgacaagccatacatttgcaaggtctgtgacaagagctatacacatccttctagcttgaggaaacatatgaaagtccatgaatctcaaggctctgattcctccccagccgcaagttctggatacgagtcatcaactcctcccgccatagcatccgcaaactcaaaagacacaacgaaaacaccatcagcagttcagaccagcacaagccacaacccgggcctcccaccgaattttaatgagtggtacgtatag

SEQ ID NO: 211701 - DNA, 1374 bp, synthetic construct
  misc_feature 1..1374: note = Description of Artificial Sequence: Synthetic coding sequence
  source 1..1374: mol_type = other DNA
atgaccatgctgctggacggcggcccccagttccccggcctgggcgtaggatcattcggagctccgcgacaccacgaaatgcccaacagagagccagccggtatgggcttgaacccattcggggatagtacccatgccgcagccgctgcggctgcagctgctgctttcaagctgtcgcccgctgccgcccacgatttgtcctcggggcagtcctctgcttttacaccccagggatctggttacgctaacgcactgggtcatcatcaccaccatcatcaccaccaccatcatacatcccaggtgccctcatacggcggagcagctagcgcagccttcaactccacgagagagtttttatttagacagcgctcaagcggtctgtcggaggccgccagcgggggtggacagcacggcctcttcgctggaagcgcgtcttccttgcacgcccccgcaggtattcctgagccgccttcgtacctcctattccccggtctgcacgaacagggagccgggcacccttctccgactggtcacgtagataacaaccaagtgcatttaggcctgaggggggaactgtttggccgtgccgacccctatagacctgtagcctcccctcgcactgacccatacgctgcaggggcgcagttccccaactatagccccatgaacatgaatatgggcgtgaatgtcgccgcacaccacggaccaggcgcattttttaggtacatgaggcagccaatcaagcaagagctttcctgtaagtggatcgatgaggcccagctcagcagaccaaagaagagttgtgatcgaacatttagcactatgcatgagctcgttacacacgttacaatggaacacgtgggtggtccagagcaaaataaccacgtctgttattgggaagagtgtccaagagagggcaagtcattcaaggctaaatataagctggtaaatcacatcagagtgcatactggagagaagccctttccatgcccgttcccagggtgcgggaaaatattcgcaagaagtgagaatttgaagatccataaaaggactcacacaggagaaaaaccttttaaatgcgagtttgagggatgtgacagaaggttcgccaattctagcgacagaaagaaacacatgcacgtgcacactagcgacaaaccctacatatgtaaagtctgcgataaatcatacacccacccatcgtcacttaggaagcatatgaaatgctgccccgcttggtaccctggtcaatctctcatcccggatgaggaactcgacaccgacgtcggaatgcagcagccagctttacataacacgacttaccctaaatgtcgagtcaatgctgagcccacagttcaggaaatgatttattag

SEQ ID NO: 211702 - DNA, 1005 bp, synthetic construct
  misc_feature 1..1005: note = Description of Artificial Sequence: Synthetic coding sequence
  source 1..1005: mol_type = other DNA
atgcggtacaagaccagcctggtgatgcggaagcggctgcggctgtaccggaataccctgaaggagtcttccagttcgtccggacatcatggtccccaactgaccgcggcatcatccccaagtgtgttccccggtcttcacgaagagcccccccaggcgtcaccatcacgcccacttaacggcctgttgcggctcggcctccctggggatatgtacgcccgacccgagcctttcccccccggacccgcggcaaggagtgacgcactagctgccgcggccgctctgcatggatacggtggtatgaatctaacggtcaaccttgccgctccccacggccccggggcctttttccgctatatgagacaacccattaaacaggaacttatttgcaagtggttggcagctgatggtaccgccaccccttcactgtgttcgaagaccttcagtacgatgcacgaattagtgacccacgtcacagtggagcacgtcggtggaccagaacaggcaaatcatatttgcttctgggaagagtgcccacgacaagggaagcctttcaaagccaaatacaaactcgttaatcatatccgagtccatacgggggagaaacctttcccgtgtccttttccgggctgcggtaaagtgtttgcaaggtctgaaaatttgaagatccataaacggactcacactggggagaaaccgttccgctgcgaattcgaaggctgtgagcggcggtttgcgaattccagcgatagaaagaagcattcacatgtgcacactagcgacaaaccttatacttgtaaggtacgtggctgcgataaatgttacactcacccaagtagcctaaggaaacatatgaaggtacacggacgaagtccacctcccagctctgggtacgattccgcgactccttcagccctggtcagtcctagttctgactgtggccacaaatcacaagttgcgtcgtctgctgctgtggcggcacgcaccgccgatcttagcgagtag

SEQ ID NO: 211703 - DNA, 1119 bp, synthetic construct
  misc_feature 1..1119: note = Description of Artificial Sequence: Synthetic coding sequence
  source 1..1119: mol_type = other DNA
atgaacggcccctgccagagcctgcggaaggccgagggcctgctggagggctgcacatcggctgtcacagtctttaggaagttgccgctggattccaaggcccaatcccaaaagatgcgctataaaacaagcctggttatgaggaagagattgcgcctctataggaatacccttaaggagagttctagctcttccggccaccacgggccccagttaacggccgcatcaagcccctccgtctttcccggtctgcacgaagaacctccacaagctagcccaagccgccctctcaatgggctgctgaggctgggtctgccaggagacatgtatgcacggcccgagccttttcccccagggcctgctgctcgcagtgatgcactcgctgctgcagctgccttacacggctatggcgggatgaatctgaccgttaatttggccgctcctcacgggcccggcgcctttttcaggtatatgcgccagccaatcaagcaggagctgatctgtaagtggctggctgcagacgggacggccacaccaagcctgtgcagcaaaacattttcaaccatgcacgaactagtcacccacgttacagtggagcacgtggggggaccagaacaggcaaaccacatctgcttttgggaagagtgccctaggcaaggaaaacctttcaaagctaagtataagctcgtaaaccacattcgggttcacaccggggaaaagccgtttccctgtccgtttcccggttgtggaaaagtctttgcgaggagcgaaaacctcaagatacacaaacgcacccacacaggagaaaagcctttccggtgcgagtttgaaggatgcgagcggagattcgccaacagctcggatagaaaaaaacatagccacgtccatacatccgacaagccatatacttgcaaggtgcgtggctgcgacaagtgctacactcatccatcaagtttgcgcaagcatatgaaagttcatgggcggagcccgccgccatcttccggctatgactccgctactccctccgccctggtctctcctagctccgactgtggccataagtcacaggtcgccagtagtgccgctgtggccgcccggacagctgacctatccgagtag

SEQ ID NO: 211704 - DNA, 690 bp, synthetic construct
  misc_feature 1..690: note = Description of Artificial Sequence: Synthetic coding sequence
  source 1..690: mol_type = other DNA
atgcggtacaagaccagcctggtgatgcggaagcggctgcggctgtataggaacaccttgaaggaatccagcagctccagcgggcatcacggcccacaattaaccgctgcttctagccccagcgtgttccccggtctgcatgaggagcctccccaggcctcgccctcccgtcctttaaacggattactccggctcggactgcccggggacatgtatgctcgtcccgaaccattcccccccggcccagccgctcgatcagacgccctggccgctgccgctgcgctgcacggatatgggggtatgaacttgacagtcaatctggccgccccccacggccctggagccttcttcagatatatgagacagcccatcaagcaggagttgatttgcaaatggctggccgctgatggaactgcaacaccatccctctgcagtaaaactttttctacaatgcacgaactggtcacccatgttaccgtggaacatgtggggggccctgagcaagcgaatcatatctgtttctgggaagagtgcccaaggcaaggaaagcccttcaaggctaagtacaagctcgttaaccatattcgcgtgcacactggggagaagcctttcccctgccctttccccggctgcgggaaggttttcgccaggtctgagaacttgaaaatccataagaggactcacacctag

SEQ ID NO: 211705 - DNA, 207 bp, synthetic construct
  misc_feature 1..207: note = Description of Artificial Sequence: Synthetic coding sequence
  source 1..207: mol_type = other DNA
atgcggtacaagaccagcctggtgatgcggaagcggctgcggctgtaccgtaacacactgaaggaatcgtcttcgagctccggacaccacggcccccaactgactgcagccagttccccctcagtgttcccaggtctgcacgaagagcccccccaggcatctcctagccgcccacttaacggattgttgcgtctgggcctgccttag

SEQ ID NO: 211706 - DNA, 1005 bp, synthetic construct
  misc_feature 1..1005: note = Description of Artificial Sequence: Synthetic coding sequence
  source 1..1005: mol_type = other DNA
atgcggtacaagaccagcctggtgatgcggaagcggctgcggctgtaccgcaacactcttaaggagtctagctcatcaagcggacatcatggaccccagttgacagcagcttcctctccttctgtctttcccggtctgcatgaggagcccccacaggccagtccctccaggccactaaatggactgctcaggctggggctgccaggcgatatgtacgccagaccagaaccttttccgcccggtcctgcggcccgctctgacgcactggccgccgccgctgcacttcacggctatgggggaatgaacctcacagtaaatttggctgcgccccacggccccggggctttttttagatatatgcgacaacccattaagcaggagctaatctgcaagtggctggctgccgacggtactgccacgccgtcactctgctcgaaaaccttttccacaatgcatgaattagttactcatgtgaccgtggaacacgtgggaggtccagagcaggctaatcacatctgcttctgggaagagtgtcctagacagggtaagccatttaaagctaagtataagctagtcaaccacatcagagtacatactggggaaaaacccttcccttgcccattccccggctgtggcaaggtcttcgctcgttcggaaaacctcaaaattcacaaacggacccacacaggagagaagccctttcgctgtgaattcgaagggtgtgaacgaaggttcgccaatagttccgacaggaagaaacattcccacgtacatacttctgataaaccatatacatgcaaagttcgtgggtgtgataaatgctacactcatccctcatctttgaggaagcatatgaaagtacacggacgaagcccaccccccagctctggctacgatagtgcaacaccctctgccctcgtctcacctagtagtgattgcggccacaagtctcaggtcgcaagcagtgcggcagtggcggccaggactgccgatctctctgaatag

SEQ ID NO: 211707 - DNA, 1005 bp, synthetic construct
  misc_feature 1..1005: note = Description of Artificial Sequence: Synthetic coding sequence
  source 1..1005: mol_type = other DNA
atgcggtacaagaccagcctggtgatgcggaagcggctgcggctgtatagaaatacgctgaaggaatcatcctccagctccggacatcacgggcctcagctgactgcggcatccagccccagcgtgttcccgggcctacacgaggagcctccccaggcttctccttctaggccactcaacggacttttaagattggggcttcccggcgatatgtacgctcgtccagaacccttcccgcccgggcccgcggcgcggtccgatgcactcgccgcagcagccgctctccatggctacggcgggatgaacctgaccgttaacctagccgcacctcacggccctggtgcattctttaggtatatgaggcagccaattaaacaggagctgatctgtaaatggctcgcagctgacggtacagcgacgccaagtctctgctctaaaactttctccacgatgcatgaacttgtcacgcacgtcacagtggagcacgtgggtgggccagagcaggcaaatcatatctgcttctgggaagagtgtccccgtcaggggaagccttttaaagccaaatacaagctggtgaatcatatccgcgtgcatacaggagagaagccatttccgtgcccctttcctggatgcgggaaggtctttgccagatcagaaaacctcaagatccataaacgaacacatacgggagagaagcctttcagatgtgaatttgaaggctgcgagaggcgatttgctaattcctctgaccgcaaaaagcattcccacgtccacacgtctgacaagccatacacctgcaaggtcagagggtgtgacaagtgttacacacacccgtcaagtctcaggaagcacatgaaagttcacgggcggagtcctccaccaagttccggctacgattctgcgactccttcggctctcgtctccccctcctccgactgcggacacaagtcccaggttgccagttccgccgccgttgccgcacgcaccgctgacctttccgagtag

SEQ ID NO: 211708 - DNA, 234 bp, synthetic construct
  misc_feature 1..234: note = Description of Artificial Sequence: Synthetic coding sequence
  source 1..234: mol_type = other DNA
atgcggtacaagaccagcctggtgatgcggaagcggctgcggctgtatcggaatacgctcaaggagagcagcagcagctctggccaccacggaccgcagctgacagctgcgtcctcaccttctgtgtttcccgggctgcacgaggagccgcctcaagcctctccatcccgacctctcaacggtcttttgcgcctcgggctcccaggcgacatgtacgcccgccccgagccttag

SEQ ID NO: 211709 - DNA, 1155 bp, synthetic construct
  misc_feature 1..1155: note = Description of Artificial Sequence: Synthetic coding sequence
  source 1..1155: mol_type = other DNA
atgccccccttctgccggaacgccaagctgggcctgctgagcttcctgatttgcgctggtcggagccttctgccccttgggaaaaatgctttctggttggagcggattgagaataacaatactctgtgggaaaaagcccaatcccagaagatgcgctacaaaacgtcactcgtgatgagaaagaggctcaggctctatagaaatacgctcaaggaaagttctagcagcagtggccaccacgggcctcagctgacggctgcaagcagccccagtgtgtttcctggcctacacgaagaaccaccacaggccagcccctctcggcctctgaatgggttgctgcggctgggcttgcccggagacatgtatgcccggcctgaacctttcccccctgggcccgccgcccgcagcgacgctcttgcagctgctgctgcccttcacggctacggcggtatgaacctgactgttaacctcgcggctccccatggccctggggctttttttcggtacatgcgccagcctattaaacaggagctgatttgcaagtggttggctgccgacggtaccgctaccccgtctctgtgctcgaaaacgtttagcaccatgcacgagctggtgacacacgtcactgtagagcatgtgggaggaccagagcaagctaatcatatttgcttctgggaagagtgtccacgacaagggaagccctttaaagccaaatacaagctggtaaatcacattcgggttcatactggcgaaaagccatttccttgtccattcccggggtgtgggaaggttttcgcacgaagcgaaaatctcaaaattcacaagaggacccataccggcgaaaagccctttcggtgtgagtttgaaggttgtgagcgacgttttgccaattcgtccgacagaaaaaagcactctcacgtccatacctctgacaagccttatacctgcaaggtgcgtggctgcgacaaatgctacacacacccatcctccctgcggaagcacatgaaggtccacggccgaagccctcccccttcgagcggatacgacagtgctacaccgtctgctctcgtgtccccatcaagcgattgtggccataaatcacaggttgcaagctctgccgctgtggccgcaaggacagcagacctatccgagtag

SEQ ID NO: 211710 - DNA, 684 bp, synthetic construct
  misc_feature 1..684: note = Description of Artificial Sequence: Synthetic coding sequence
  source 1..684: mol_type = other DNA
atgggcggcaagcagagcaccgccgcccggagccggggccccttccccggggtgtctaccgacgactccgccgtcccccctcctggtggagccccacatttcggccattacagaaccgggggaggcgcaatgggtctgagatctcggagcgtcagctcagtcgcagggatgggtatggatccctccacagcaggcggggtgcctttcggcctgtacactccagcctcccgagggaccggcgatagcgaacgtgcacccggcggaggtgggtcggccagtgatagcacgtatgctcacgggaacggctatcaagagactggggggggacaccatcgggacgggatgctgtacctgggcagcagagcctccctcgcagatgcactgcccctgcacatcgccccgaggtggttcagctctcactcagggttcaagtgccctatctgcagcaaaagcgtagccagcgatgaaatggagatgcacttcattatgtgtctctccaagccccgtctgtcgtacaatgatgacgttctgacgaaagacgctggcgaatgtgtcatttgtctggaagaacttctgcagggtgatacaatcgctcgcctaccatgtctctgtatctatcataagtcctgtatcgactcctggttcgaggtaaaccgatcctgcccagaacatcccgctgactag

SEQ ID NO: 211711 - DNA, 543 bp, synthetic construct
  misc_feature 1..543: note = Description of Artificial Sequence: Synthetic coding sequence
  source 1..543: mol_type = other DNA
cagcggggcgtgcccgccgccggcacccccagcagcccccggctgttagtcagcagaagtttaggcggcgccgtcggctctgtcgcaagcggtgcaagagccgcacaaagccccttttccatacccaattctagctcaggcccatatggcagccaagattcagtacactcgtctccggaggacgggggtggtggtagagatcgcccagtgggcgggagtcccggaggtccaagattggttatcggctcccttccggcccacctgtctcctcacatgttcgggggtttcaaatgtcccgtgtgctctaaattcgtgtcctctgatgagatggatttgcacctcgtcatgtgtctgactaaacctagaatcacatataatgaagacgtgttatctaaagatgccggggagtgcgcaatctgcctggaagaacttcagcaaggggatactatagcccgacttccttgcctgtgcatctaccacaagggttgcattgatgagtggttcgaggtcaaccggtcttgccctgagcatccaagcgactag

SEQ ID NO: 211712 - DNA, 729 bp, synthetic construct
  misc_feature 1..729: note = Description of Artificial Sequence: Synthetic coding sequence
  source 1..729: mol_type = other DNA
atgggcgccaagcagagcggccccgccgccgccaacggccggaccagagcatacagcggatctgatctgccctcctcctcatctggaggggctaacggaaccgccggcgggggcgggggcgctcgggcagccgcggccgggcggtttccagcacaggttccatcggctcatcagccctccgccagcggaggagcagcagcagctgctgcagctcccgcagcacccgccgcgccccgctcacgcagtctggggggagcggttgggtccgtggcctctggagcacgggcagcccaatcaccctttagcatccctaattccagttccgggccttatggctcccaggactccgtgcactctagcccagaggatggaggcggcggcagggatcgacccgtgggcggtagccccggtggaccacgactcgtcatcggttctctgccagcccacctgtccccacatatgtttggaggctttaaatgtcccgtttgctctaaatttgtctcatccgacgagatggatcttcaccttgtgatgtgccttaccaagccaagaattacatacaatgaagacgtgctctccaaggatgccggcgagtgcgctatttgtttagaagagctccaacagggggatacaatagcaaggctcccatgcctatgtatctaccacaagggatgcattgacgaatggtttgaagtgaacagatcatgccctgaacaccccagcgattag

SEQ ID NO: 211713 - DNA, 2511 bp, synthetic construct
  misc_feature 1..2511: note = Description of Artificial Sequence: Synthetic coding sequence
  source 1..2511: mol_type = other DNA
atgcaccccctgggcctgtgcaacaacaacgacgaggaggacctgtacgagtatggttgggtgggggtggttaagctagaacagccggagctggaccctaagccttgtctcactgtactcggcaaggccaaacgggccgtgcagaggggtgccaccgcagttatttttgacgtctccgagaatcctgaagctatagatcagctgaaccaggggagcgaagaccccctgaaaagaccagtggtctacgtgaagggagctgacgctatcaagcttatgaacatcgtgaataaacagaaagtggcaagggcaagaattcagcaccgacctcccaggcagccaactgaatactttgacatgggcatttttctagcctttttcgttgtcgtatccctcgtctgcctgattctgctcgtgaagatcaaactgaaacagagaaggtcacagaatagtatgaatcggttggcggtgcaagcactggagaaaatggaaacgagaaaattcaattcaaagtcaaagggacggcgggaaggcagttgtggcgcactagatacactttctagcagcagcacctccgactgcgcgatctgtttggagaaatacatagatggcgaggagcttagggttatcccctgtacgcaccgcttccacaggaagtgtgttgatccctggctgctccagcaccatacctgcccccattgcagacataacatcattgagcagaaaggcaatccttccgcagtctgcgtcgagacttcaaacctttctagagggcgacagcaacgggttaccctgcccgtacattaccccggacgtgtgcataggacaaacgccatccccgcctacccgactagaacctcaatggactctcacggcaatcctgtgacattactgaccatggatcggcatggggaacagagtctctacagccctcagacgccggcttatattagatcgtacccaccccttcacttggatcactccctggctgcgcaccgctgcggactggagcatagggcctatagccccgcacacccttttagacggccaaagctgagcggccgctctttctccaaagcggcttgtttcagccagtatgagacgatgtaccagcattattattttcaagggctgagctaccctgagcaagaggggcagagtccaccaagcctcgctccacgaggccccgcacgtgcatttccaccctccggatccggaagtctactgtttcccacagtggtgcacgtagcccccccctcccacctcgagtcaggttcaacgagctcattcagctgttaccatggccaccgtagcgtttgttccggttatctggctgactgccccggaagtgacagttcttcttctagctcctcgggtcagtgccattgctcttctagtgacagtgttgtcgattgtacagaggtcagcaatcaaggcgtgtacggctcttgctccaccttcaggtccagcctgagtagcgattatgatccctttatctacagatcaagatctccttgccgtgcaagcgaggctggaggcagtggaagttccggccggggccccgctctgtgcttcgagggctcaccacccccagaggagctgcccgccgtacactcacacggggccggcaggggggagccttggcccggtcctgcttccccatcgggcgatcaagtgtccacctgttcattagagatgaactattcatctaacagctctctggagcacagaggtccaaactcctcaacgagcgaggtcggcctcgaggcttccccaggggctgccccagatttgcgacgtacttggaaggggggacatgagcttccttcctgtgcatgctgttgtgagccacaacccagcccagctggtccgagtgccggggccgctggtagctccacgctttttttaggccctcacctgtatgaaggcagcgggcccgccggaggcgagccacagagtgggtcctcacagggactatatgggcttcaccccgaccacctgccacgcaccgacggagtgaagtatgagggcctgccatgctgtttctacgaagagaaacaggttgcgcgaggcggtggaggaggtagcggatgttacactgaagactatagcgtcagtgtccagtacactctaacagaagagcctcccccaggatgttatcctggcgctcgagatctcagccagcggatcccgattatacccgaggacgtggattgtgatctggggttgcccagtgactgtcaaggaacccactccctgggcagctggggcggcacgagagggccggataccccacgcccccaccgcgggctgggggcgacaagagaagaggaacgagccctgtgttgccaggccagggccctgctaaggcccggttgtcctcctgaagaagcgggggcagtccgagcaaatttccccagcgccctgcaagacacccaagaatcctcaaccactgctaccgaggctgctgggccacgctcccacagcgccgactcgtcgtcccccggcgcctag

SEQ ID NO: 211714 - DNA, 2511 bp, synthetic construct
  misc_feature 1..2511: note = Description of Artificial Sequence: Synthetic coding sequence
  source 1..2511: mol_type = other DNA
atgcaccccctgggcctgtgcaacaacaacgacgaggaggacctgtacgagtatggttgggttggtgtggtgaagttggagcagcccgagctggatcccaaaccttgcctgacagtgctgggcaaagctaagagggccgtgcagagaggagcaaccgccgtaatcttcgatgtctcagagaaccccgaagccattgaccagctgaaccagggctccgaggacccattaaagagacctgtggtctacgtcaagggcgcggacgcaattaagctgatgaatatagtgaacaaacaaaaggtagcgcgcgccaggatccagcacaggcccccacgacagccaaccgagtacttcgatatgggcatttttctcgctttctttgtggtcgtgagtctcgtgtgcctcattctgcttgtaaagatcaagctgaagcagcggaggtcccagaatagcatgaatcgcctcgctgtgcaggcactcgagaaaatggagacccgtaaatttaatagcaaatctaaagggcggagggagggatcatgtggcgcactggatacactttcctcctcctcgacatccgactgtgcaatctgcctggaaaaatatatcgatggcgaagagctgcgggtgattccctgtactcaccggttccaccggaagtgcgtagatccttggctgttacagcaccatacttgtcctcactgcaggcacaacataatcgaacagaaaggtaatcccagcgccgtttgcgttgagacctcaaacctctccagaggcagacagcagagggtcacacttccagtgcattatccaggacgtgttcacaggaccaatgccataccggcttacccaacacgaacatccatggatagccatgggaaccccgtgaccctccttacaatggatagacacggagagcagtccttatattccccacagacccctgcctacattcgttcctatccccctttacatctggatcacagtctggcagctcatcgatgcggcctggagcacagggcctactctcccgcccaccccttccgtcgcccaaaactgtcaggaagaagtttctcaaaggctgcctgcttttcccagtacgaaacaatgtaccaacactattacttccagggcttgtcttatccagaacaggagggccagtcaccaccaagtctggcacccagaggccctgcgagggctttcccacctagcggatccggcagcctgctgttccctacagtagtgcacgtggcccctcctagccaccttgaaagcggcagtaccagttcctttagctgttatcatgggcaccgaagcgtttgtagcggatatctggcggactgccccggctccgatagctccagctcctctagctccgggcagtgtcactgctcttctagcgatagcgtggtcgactgtaccgaggtctccaatcagggcgtgtacggctcctgctctaccttcagatcatcactgtcttctgactacgacccctttatatatcggtcccgcagcccctgtcgtgcctccgaggcaggcgggagtgggagtagcggacgcgggcccgcgctttgcttcgaggggtcacctccacccgaggagttacccgcagtccacagtcatggcgcaggtaggggcgagccatggcccggacctgcctcacccagcggcgaccaggtgagtacttgttctctggagatgaactacagctctaactcttcactggaacatagaggccccaattcctctacaagtgaggttggtctggaagcatcaccaggagcagcccctgacctgcgacgaacatggaaaggaggacacgagctgccctcatgcgcttgttgctgtgagcctcagcccagccccgcgggaccctcggccggcgccgccggtagtagtacgctgtttttgggccctcacctgtacgagggcagtgggccagcgggaggcgagcctcaatctgggagttcacaggggctttatggactgcacccagatcacctgcccagaacagacggcgtcaaatacgagggacttccttgctgtttctacgaggagaagcaggttgctaggggcggtggcggtggtagcgggtgttataccgaagattacagcgtgtcagtgcagtacactctaaccgaggaaccgccacctggatgctaccccggtgctcgtgatctgagtcagagaatcccaattattcctgaagacgttgattgcgatttggggctgccaagtgactgtcagggtactcacagcctcggctcttggggcggaactcggggccccgacacgcccagaccccataggggactgggcgcaactagggaagaagagcgggctctgtgctgccaggcccgggctctacttcgaccgggctgtccccctgaagaggcaggggctgtgagagccaacttcccaagtgctctacaagacacccaggaaagctctactaccgcaacagaagcagcgggacccagaagccatagtgccgactcaagttcccccggcgcttag

SEQ ID NO: 211715 - DNA, 2511 bp, synthetic construct
  misc_feature 1..2511: note = Description of Artificial Sequence: Synthetic coding sequence
  source 1..2511: mol_type = other DNA
atgcaccccctgggcctgtgcaacaacaacgacgaggaggacctgtacgagtatggatgggtaggagtggtgaaactggagcagccagaacttgatcccaaaccgtgtctcaccgtcctcggcaaagctaagcgcgcagtgcaaagaggcgccacagccgtaatctttgacgtgagcgagaaccccgaggcaatcgatcagttgaatcagggctctgaggaccctttgaagaggcccgtagtatacgtcaagggggccgatgcgataaagctgatgaacatagtgaataaacagaaggttgctagggctaggatccaacaccggccaccccgacagcccacggaatatttcgatatgggtatctttcttgcattcttcgtcgtagtgtccctcgtgtgtctgattctcttggtgaagatcaagctgaaacagaggagatctcagaactcaatgaaccgtctggcggtccaggctcttgagaagatggagaccaggaaatttaattctaagtccaaaggtcggcgcgaagggagctgtggagctctggatacactgagtagctcttccacatccgactgtgccatctgccttgagaagtacatcgacggcgaggagctccgggtgattccatgtacacatagatttcacaggaaatgtgtcgacccctggctcttgcagcaccacacctgcccccattgccggcacaatattatcgaacagaagggaaacccctctgccgtgtgcgtggagacaagtaaccttagccgggggagacagcagcgggtaactctgcccgtccactaccccgggagagttcatcgcacaaatgcgatcccggcctatcctacacgtacatccatggacagccatggcaatcctgtcaccctgctgaccatggacaggcatggggaacagagcctttactcacctcagacacccgcttatatcagatcttaccccccccttcatctagatcacagtctcgctgcacaccgctgcggcttggaacatagagcatacagccccgcgcaccccttcagacggcccaagctgagcgggcgctccttcagcaaggcagcctgttttagccagtacgagaccatgtaccagcactactacttccagggcttatcctaccctgagcaagaggggcagagcccccctagtctagcccccaggggacctgcacgggcatttccccccagcggctcaggttcactcctgttcccaacggtagtccatgttgcccccccctcacacctggagtctgggtcaacgagctccttttcctgctaccacgggcatagatccgtgtgtagtggctacttagccgactgtccggggtctgacagcagctcaagcagttcctcgggccagtgccactgcagtagttccgactcagtggtggactgtactgaggtgtctaatcagggggtctacggatcatgttctacctttcggagcagcttatcttctgactacgacccgtttatttataggtctcgatccccctgccgtgcaagcgaggcaggaggaagcgggtcatcaggacgaggtcccgcgttgtgcttcgagggttcaccacctcctgaagagctcccagccgtgcatagccacggcgccgggcgcggagagccatggcctggacctgccagtcctagcggggatcaggtctcaacctgttctctcgagatgaattactctagtaactctagcttagaacatcgcggacccaactcttcaacaagcgaagtcggcctggaggcttcacctggggcagcgcctgacctgagacgcacatggaaagggggtcacgagttgccatcctgcgcctgctgctgcgaacctcagcccagcccggccggaccatcagctggagccgcagggagttcaacactttttttggggcctcatttgtatgagggaagcggtcccgcaggaggggagccacagagtggttcgagtcagggtttgtacggcctgcacccggaccatctgccccgtaccgatggcgtgaaatacgagggactgccctgttgtttttacgaagagaagcaagtggccagaggagggggcgggggatctgggtgctatacagaggactactccgtgtctgtacagtacacattaaccgaggagccacccccaggatgttaccccggagcgagagatctttcacaacgaattcctatcattcccgaggacgttgattgtgatctgggcttgcccagcgattgtcagggtacacactctttgggttcttggggcggcacacgaggccccgatacacctcgcccacatcgcggcctgggcgccactagagaggaggaacgcgcgctatgctgccaagcccgtgctctgttgcgtcctgggtgtccacctgaggaggctggagctgttcgagcgaactttccctccgcgctccaggatacacaggagagttcaactaccgcgacagaagcggctggcccgcggtcccactctgcggattcctcatcccccggagcatag

SEQ ID NO: 211716 - DNA, 1932 bp, synthetic construct
  misc_feature 1..1932: note = Description of Artificial Sequence: Synthetic coding sequence
  source 1..1932: mol_type = other DNA
gtgcccagcgtgtggcggagcaccctgatggagcggagctgcggcagttctcctgtgcttaccggtttcactggctctgcctggactccactactccagcaccacacatgtccgcactgccggcacaacattatcgaacagaaggggaatccatccgcggtatgtgtggagacaagtaacctgtcccgaggtcggcagcagcgggtgacccttccagttcattatcctgggcgggtgcataggaccaatgcaatcccagcttaccccactcgtaccagcatggattcccatggcaaccccgtcacgctgctgacaatggaccgccatggcgagcagagcctctattcacctcaaactccggcatacattagatcctatccacctttgcacttggatcacagtctggccgcgcaccgatgtggactggaacaccgcgcctacagtcctgcccacccttttcgccggcctaagctgagcggacgatccttcagcaaggctgcttgctttagtcagtacgagaccatgtatcagcattactacttccaagggctttcttatcctgagcaggaaggacagtcccccccctctctcgctcctagggggcctgcccgggcctttcccccgtcagggtctggttccctactgtttcccacagtggtacacgtcgcaccgcccagccacttagagtctggctccacttcttcattttcttgctaccatggccaccgcagcgtctgtagcggctacttagctgactgccccggaagcgacagcagctcttcctcttccagtggacagtgtcactgctcatctagtgactccgtagtggactgcactgaggtgagcaaccaaggagtatacgggtcctgcagcacattccgcagcagcctatcttcggactatgatccattcatctatcgttccaggtctccttgcagagcttcagaggcaggaggtagcggcagcagtggccgtggcccagccctgtgcttcgagggaagcccacccccggaagagttgccggccgttcacagccacggagccggcaggggagagccttggccaggcccggcttctccctcaggcgaccaggtatctacatgcagcctggaaatgaactactcaagtaacagctcactcgagcaccgcggtcctaatagctccacatccgaagtaggacttgaggcgtcaccaggggcagctcctgatctgaggagaacgtggaagggcgggcacgagctgccgtcttgtgcctgctgttgcgaacctcagccatcacccgccggtccaagcgccggtgcggctggcagttctaccttgttcctgggaccccatttgtatgagggcagcggccctgccggtggtgaaccacagagtgggtcatcccagggactttacggcttacatccggatcacctgccgcgcaccgatggggtcaagtacgaaggtcttccatgctgtttttatgaagagaagcaggttgctcggggtggcggaggcgggagcggatgctacacagaagactactctgtgagtgttcagtacacattaacagaggagccgccacctgggtgttaccctggcgcccgcgacttgagtcagcgaatcccaattattcccgaggacgttgattgcgacctgggactaccaagtgactgccagggaacccattcgctcgggtcctggggtggcacgcggggacccgacaccccccgtccccacagaggactcggagctacaagggaggaagaacgagcgctgtgttgtcaagcccgcgccctcttacgccccggatgtccgcctgaagaagctggggccgtccgggcaaactttcctagtgcacttcaggatacacaggagtctagtacaaccgccaccgaagccgctggccctcggagtcactccgcggacagttcctcccctggtgcctag

SEQ ID NO: 211717 - DNA, 2811 bp, synthetic construct
  misc_feature 1..2811: note = Description of Artificial Sequence: Synthetic coding sequence
  source 1..2811: mol_type = other DNA
atgcggccccggagcggcggccggcccggcgccaccggccggcggaggcgcaggctgaggcgccgaccacgcggtcttaggtgcagtcgattaccgcccccccccccactgcccctgttgttaggcttgctgttagccgctgcgggcccgggtgctgcccgtgccaaggaaaccgcgtttgtggaagtcgttctcttcgaatcatcgccaagcggggactacaccacctacacaacaggtcttacagggcgctttagtagagcaggcgctaccctgagcgctgaaggcgaaatcgtgcaaatgcaccccctgggtctgtgcaataacaacgatgaagaagacctctacgaatatggatgggttggagtggtgaagctggagcagcccgagctggatcccaagccctgtcttactgtgcttggcaaagcgaaacgggcggtacaaaggggtgccaccgccgtcatattcgatgtatctgagaatccagaagcaatagaccagctgaatcaaggctcagaagatccactcaagcgccctgtcgtatacgtgaagggtgctgatgccatcaaactcatgaatatcgtgaacaaacagaaagtcgccagggcccgaatccaacatcgaccccccagacaacctaccgagtattttgacatgggtatatttctggcattttttgtcgttgtgagcctcgtttgtctgatccttctcgtcaaaattaaattaaaacagcgaaggtctcagaacagcatgaatagactggccgtgcaggctttagaaaaaatggagactcgtaaattcaattcgaagtccaaggggcgcagggaaggatcttgcggcgcattggacacattatcgtccagttcaaccagcgattgtgccatttgtctggagaaatatatagacggcgaggaactccgcgtcattccttgcacccatagattccacagaaaatgcgtagatccttggctgctgcagcaccacacctgtccgcactgcagacacaatatcattgagcaaaaagggaacccttcagccgtgtgcgtggagacaagcaatctttcccgaggcaggcagcaacgggtcacactgcccgtgcattaccctggacgggtgcaccgaaccaatgcgatccctgcttaccccactcgaacttcaatggacagccatggaaatccggtgactctgctaaccatggatcgccacggtgagcagagcttgtattctccacagacaccggcttatattagatcttacccgccccttcacttggatcatagtttggccgcccacaggtgcggcctagagcatcgcgcatactcccctgcccaccccttccgtcggcctaaactgtcagggcggagcttctcaaaagcagcgtgcttcagccaatacgaaaccatgtatcagcattattacttccaaggtctttcctaccctgagcaggaagggcagagccctccttcccttgcgcctcgtgggcctgccagggccttcccaccttcaggttctggcagcctgctgtttcctacagtggtgcacgtggctcccccttcacacctggaaagcggttctacgagttctttttcatgttaccacggccatcgctccgtgtgttccggctatctggccgattgcccaggtagcgacagcagctcctccagttcctcagggcagtgtcactgctctagctcggacagcgtcgtcgactgtacagaggtcagcaatcaaggagtgtacgggtcctgctcaacttttcgcagttccctctcttcggactacgatccctttatctacaggagccgtagcccttgtcgcgcatccgaagctgggggatccgggtcaagtggcagggggcctgccctgtgctttgagggatccccccctcctgaggagttaccagctgttcatagccacggagctggacgcggcgaaccctggcccgggcctgcctcgccatcaggcgatcaagtgtcaacctgttccctggaaatgaactactcgtcaaatagctcgctagagcataggggccctaactcaagtacgtctgaagtaggcctggaagcaagccctggtgccgcccccgacctgcgacggacttggaaggggggccatgagctccccagttgtgcttgctgctgcgagccacagccttctcccgctggccccagcgctggcgcagcgggatccagcaccctgttcctggggccccatctctacgaagggtccgggccggcaggtggagagccacaaagcgggtccagccagggcctttatggcttgcaccccgatcaccttcctaggacggacggagttaaatacgaagggcttccatgctgcttttacgaagagaaacaagtcgcacgtgggggcggcggaggatccggatgctacacagaagactatagcgtcagtgtccaatacactctgacggaagagcctccaccaggttgttatcccggcgcaagagatttgtcccagcggatcccaatcataccggaagacgtggattgcgatctcggcctgcctagcgattgtcaggggacacactctttgggctcctggggagggacgaggggccccgatacgccccggccacatcgcggattgggcgctactcgtgaggaagagagggcactgtgttgccaggctcgcgccctactaagaccaggatgtcccccagaggaagctggtgccgtccgggcaaacttcccaagtgctctgcaggacactcaggaatcctccaccacagcaactgaagcagccggcccgcgctcgcattctgccgacagctcttcccctggcgcctag

SEQ ID NO: 211718 - DNA, 339 bp, synthetic construct
  misc_feature 1..339: note = Description of Artificial Sequence: Synthetic coding sequence
  source 1..339: mol_type = other DNA
atgagctaccccgtgaccagccagccccagtgcgccaccaccagctgttaccaaacccagctttccgactggcacacaggattaacagactgttgtaatgacatgcctgtttgtctctgtgggacatttgcacctttatgtctcgcctgcaggatttccgatgacttcggagagtgttgctgcgcaccctacttaccggggggattgcactcgattcgcacaggaatgcgagagaggtaccacattcaagggagcgtcgggcacgactgggcagctctaaccttttgcctgccctgcgccctgtgccagatggcgcgcgaactaaaaattagagagtag

SEQ ID NO: 211719 - DNA, 1440 bp, synthetic construct
  misc_feature 1..1440: note = Description of Artificial Sequence: Synthetic coding sequence
  source 1..1440: mol_type = other DNA
atggccgccctggagaagatgaccttccccaagaagatgaccttccccgaaaaaccctctcacaaaaagtatcgtgcagctctaaaaaaagagaagcgcaagaaacggcggcaggaattagctagacttcgggactctgggttgagtcaggaagaggaggaggataccttcattgaagaacaacagctggaggaggagaagcttctcgagcgcgaaagggagcgcctgcatgaggagtggctcttgagggaacagaaagcacaggaagagtttcggattaaaaaagagaaggaggaggctgcaaagaaatggttggaggaacaggagagaaaactgaaggaacagtggaaagaacagcagagaaaggaacgagaggaagaagaacagaaacaacaggagaaaaaggaaaaagaagaagctgttcagaaaatgttagaccaggccgaaaacgatctggaaaacagcacaacctggcagaatcccgaacctcctgttgactttagggtcatggaaaaagatagggccaattgtcctttctacagtaaaaccggcgcctgcaggtttggggaccgctgtagtagaaagcacaacttcccgacgtcatctcccacactgcttattaaaagtatgttcaccacatttggcatggagcagtgcagacgggacgactatgaccctgacgcaagcctggaatattccgaagaagagacataccagcagttcctggatttttacgaagatgtactgcccgagttcaaaaatgtaggcaaggtcattcagttcaaggtgtcctgcaatttggagccccacctgagaggcaacgtttatgtgcaataccagtccgaggaggagtgccaggctgcactgtcgttgtttaatgggcggtggtacgctggacgccagctacagtgcgagttctgcccagtgacacgctggaagatggcgatttgtgggctgttcgaaattcagcagtgtcctcgcggaaagcactgcaatttccttcatgtattccggaatccaaacaacgaattttgggaggcaaatcgggacatctacttgagctccgatcagacggggtcttcatttgggaaaaacagcgaacgacgggagaagatgggacatcacgaccattattattctcgccaaagaggtaggcgaaatccatccccagatcacacatataaacgtaacggcgagtccgaacgcaagaaatcgtcgcatagaggtaagaagtcccacaagagaactagtaagtcacgtgaaagacacaacagtccctcgaggggaagaaacagacaccgctcgtgggatcagggtcgccggtctcaatctcgaagatcgcaccgaagtagaagccaaagttcgtcacggtgcaggtcccgtggaagacggaagagtggcaatcgtgaccggaccgtgcagtcaccgcagtctaagtag

SEQ ID NO: 211720 - DNA, 1449 bp, synthetic construct
  misc_feature 1..1449: note = Description of Artificial Sequence: Synthetic coding sequence
  source 1..1449: mol_type = other DNA
atggccgcccccgagaagatgaccttccccgagaagcccagccacaaaaaataccgggccgctttgaaaaaggagaaaagaaaaaagcgccgacaagagttggctaggctgcgggatagcggtctgagccagaaggaggaggaagaggatacctttatcgaggaacagcaattagaagaggaaaagctgcttgaacgtgagcggcaaaggttgcacgaggagtggcttttacgcgagcagaaagcacaggaagaattccggatcaaaaaagaaaaggaagaagcggctaaaaagagacaggaggaacaagagaggaagctgaaggagcagtgggaggagcagcagcgaaaggagcgtgaggaagaagaacagaagaggcaggagaagaaggagaaggaggaagccttgcagaagatgttggaccaggcggaaaacgaactcgagaatggcaccacttggcaaaatcccgaaccacctgttgactttcgggtgatggagaaagaccgggccaactgcccgttttacagcaaaactggcgcctgcagatttggggaccggtgttcacgcaaacacaacttcccgacaagctcccctactttgttgatcaagagcatgttcactacctttggaatggaacagtgtcgtagggatgattacgacccagacgccagtctcgaatactccgaagaagaaacctaccaacagttcctggatttctatgaagacgttctgcccgaatttaagaatgtgggaaaagttattcagttcaaggttagttgtaacttggagccccaccttcgaggaaatgtctacgtgcagtaccagtcggaagaagagtgccaagctgcattgagcctgttcaacggtagatggtacgccggccgccaattacagtgtgagttttgccctgtgacccgctggaaaatggccatctgtggactgttcgagattcagcagtgcccgaggggaaagcattgtaacttcttgcatgtttttaggaaccccaacaacgagttctgggaggctaatcgagatatctacctcagtccggaccgaactgggagtagcttcggaaaaaatagcgaaagaagagaacgtatgggacaccatgacgattattatagcagattaagggggcgtcgaaacccttcccccgaccactcatacaaacgaaacggagagagcgagagaaagtcctcgcgacatcgcggaaagaagtcacacaagcgcacttccaaatcaagagagaggcataattcgcgatcgcgggggagaaatcgcgatcgctcacgcgaccgctcaaggggccgaggtagtcgttcccgctctaggtctagatctcgcagaagcagacgatcaagatctcagtcttcttcacgaagtagaagccgggggaggcgacgttccggcaatcgtgaccgtaccgtgcagagtccaaagtctaagtag

SEQ ID NO: 211721 - DNA, 444 bp, synthetic construct
  misc_feature 1..444: note = Description of Artificial Sequence: Synthetic coding sequence
  source 1..444: mol_type = other DNA
atggccgcccccgagaagatgaccttccccgagaagcccagccacaagaaatatagggccgctctgaagaaggaaaagaggaaaaagcggcgccaggaattggctcgcctcagagactcggggctgagccagaaggaggaagaggaagacacttttatcgaagagcagcagctggaagaggagaagctcctcgaaagagagaggctggagtgtagcggcgtaataagcgcacacaggaacttacatctccctgggtcccacgacagtcccgcttcagcctcccgggtcgccggtataaccggcacgcacaggcacacccagctgattttcttttgtacgttcagccgcgatggggtaagtccatgctggccaggatggtccaggtctctggacctgatgatctgtcctcccaggccgcataaggtcctcagactgcaggtatag

SEQ ID NO: 211722 - DNA, 3438 bp, synthetic construct
  misc_feature 1..3438: note = Description of Artificial Sequence: Synthetic coding sequence
  source 1..3438: mol_type = other DNA
atgtgcaagtgctgcaacctgttcagccccaaccagagcgagctgctgagtcatgtctctgaaaagcatatggaggagggggtcaacgtggatgagatcatcattcctttgcgcccgctgagtacccccgaaccaccaaatagctccaagaccggcgacgaatttttggtcatgaaaagaaagagaggcaggccaaaggggagcacaaaaaagagctctaccgaggaagaattggctgaaaacatcgtgtcaccaaccgaggatagtcccctagcgccagaggagggaaattccttacctccgagctcgctggagtgttcaaaatgctgtaggaagttctcaaacacgcgacagcttaggaaacacatttgtattattgtactcaacctcggggaggaggaaggcgaggccggaaacgagtccgacctggagctggagaagaaatgcaaagaggatgaccgggagaaggcctccaagcggccacgctctcaaaaaaccgaaaaagtccaaaaaatatccggaaaggaagcaaggcagctctccggtgctaaaaagcctattatctcagtggtactcaccgcccacgaggcaattccgggggcaactaagatagtcccggtcgaagcaggcccgcccgaaaccggcgctaccaacagcgagactacctccgccgacttggtgccgcggagaggctaccaggagtatgctatccagcagacaccctacgagcagccgatgaaaagttcaaggctggggcctactcagctcaagatctttacatgcgaatactgtaacaaagtgtttaagttcaagcattccctgcaggcacacctacgtattcataccaatgaaaagccgtataagtgcccgcagtgttcatacgcgtcggcaattaaagccaatctgaacgttcatcttcgcaaacatacaggcgagaaattcgcctgcgattattgtagcttcacctgtctctccaagggacatctaaaggtccatatcgaaagagttcataaaaagattaagcagcattgccgtttctgcaagaaaaaatacagtgatgtcaaaaatttgatcaagcatatcagggacgcacatgatccccaggataaaaaggttaaggaggcgcttgacgagctgtgccttatgacccgggaagggaagaggcaactgctttacgattgccatatatgtgagcgtaagtttaaaaatgagctggatagggacagacacatgttggtccacggggataaatggccattcgcttgcgagctctgcgggcacggagccacgaagtaccaggctctcgaactccatgtccgaaaacatccttttgtgtacgtttgtgccgtgtgccgcaaaaagtttgtttcctccatcagactgcgaacccacattaaggaagtgcatggggctgcacaggaggccttggtgttcactagctccataaaccagtcattttgcctgctggaacctgggggagatattcagcaggaagccctaggagatcagctacagctcgtagaagaggaattcgcgctgcaaggcgtgaatgccctgaaagaggaagcctgtcctggagacacacagttggaggaaggccgaaaagaacctgaagcccccggagagatgccagcaccagctgtccatctggcctcaccacaggctgagagcacggcattgccaccctgtgaacttgagacgacagtggtgtcctcttctgacctgcattcccaggaggttgttagcgacgattttttgctgaagaacgatacgtcatctgcggaagcccacgccgccccagaaaaaccaccggatatgcaacaccgatcatccgtgcagacacagggggaggtgatcacactgctcctctctaaagcgcagagcgccggctctgatcaggaatcccacggcgctcagagccccctgggtgaaggccaaaacatggcagtattgtctgccggagatcctgacccttctcgctgcctgcgttcaaatccggcggaggcctctgatctgctccctccggtcgccgggggcggcgacacaatcacacaccagcctgattcatgcaaagcggctccagagcatcggtctggcatcaccgcattcatgaaggtcctgaactcgctccagaaaaagcagatgaatacatccctgtgcgaaaggatccgcaaggtatacggggacctcgaatgcgagtactgcggcaaattattttggtatcaggttcacttcgacatgcacgttaggacacacactcgtgagcatctgtattactgctcccaatgtcactacagcagtattacaaaaaattgcctcaaaaggcacgtgattcagaagcactccaacattctgctgaaatgcccaacggacgggtgtgactattccacacccgacaaatataagttgcaggctcacttgaaggtccacacagccttggacaaacgaagctatagctgccctgtatgtgaaaagtcgttcagcgaggacaggctgattaagtctcatattaagactaatcacccggaggtttcaatgagtacgatttctgaagtgcttgggcggagggtccagctcaaggggttgattggcaaaagggctatgaagtgcccttactgcgacttttacttcatgaaaaacggcagcgatctgcaacgccatatctgggcccacgagggcgtaaagcctttcaagtgctcgctgtgcgagtacgctacacgcagcaaaagcaatctgaaagcacacatgaacagacactccaccgagaagactcatctgtgtgacatgtgcggaaagaagttcaaatcgaaagggaccttaaaatctcataaattgctgcacacggctgacggcaagcagttcaaatgtaccgtgtgtgactacacagctgcacagaaaccccaacttttgcggcacatggagcagcatgtgtctttcaaacccttccgatgcgctcattgccattactcttgtaacataagcggttccctgaaaaggcactataataggaagcaccccaatgaagagtatgctaatgtggggaccggagaactggcagccgaggtgcttatccagcagggggggcttaaatgcccagtgtgtagcttcgtctacgggacaaagtgggaatttaatagacatctcaaaaataagcatggattgaaggtcgtggagattgacggggaccccaagtgggaagtgaccgaagaggaaccttcaagtaaccatacagtgatgatccaggaaacagtgcagcaggcatcggttgagcttgccgagcaacatcacttagtggtgtctagcgacgatgtggagggtattgagacagttactgtatatactcaaggaggcgaagctagtgagtttattgtgtacgtacaggaggctatgcagcccgtcgaggagcaggccgttgaacaacctgcccaagagctttag

SEQ ID NO: 211723 - DNA, 3546 bp, synthetic construct
  misc_feature 1..3546: note = Description of Artificial Sequence: Synthetic coding sequence
  source 1..3546: mol_type = other DNA
atggagacccgggccgccgagaacaccgccatcttcatgtgcaagtgttgtaacctattcagccctaatcagtctgaactcctctcacacgtgagtgagaagcacatggaggagggcgtgaacgttgatgagattatcatccctctgcgacccttgtccacaccagagccccctaactctagtaagaccggtgatgaatttctggtgatgaagcggaagcgcggcagacctaaagggagcacaaaaaaatcctctaccgaggaagaattggcggaaaatattgtcagtcctactgaagatagtccactcgctccggaggagggaaatagtttgccgccgagcagcttagagtgttctaaatgctgtcgcaaattttccaatacgcgacagttgaggaaacacatttgtattatcgtgcttaacctgggagaggaggagggagaagcgggcgccaccaaaattgtaccagtggaagctggtccgccagagacaggtgccactaatagcgaaacaacaagcgctgatttggtgccccggcgcggctatcaggaatacgccatccagcagaccccctatgagcagccaatgaaatcctcccgcctgggacccactcagcttaagatattcacttgcgagtattgtaataaggtgttcaaattcaaacactctctccaggcccacctgcggatacatacaaatgaaaagccatacaaatgtccccagtgttcctacgctagcgcaattaaagctaacctcaacgtccacttacggaaacacaccggcgaaaagttcgcctgcgactactgtagtttcacctgtctctcaaaggggcacctcaaggtccacatcgagcgggtgcacaagaaaatcaagcagcactgtcggttctgcaagaaaaaatattctgacgttaaaaatctgatcaagcatatccgcgatgcgcacgacccgcaggacaagaaggtaaaagaagccctagatgagctttgcctgatgactcgggaagggaaacgccagctgctctacgactgccacatctgtgagcgaaagtttaagaacgaactggatcgggatagacatatgttagtgcacggcgataagtggcctttcgcttgcgagttgtgcggtcatggagccaccaagtaccaggctttagagctgcatgttcgcaagcatccattcgtctatgtgtgtgccgtgtgtcgtaaaaagtttgtatcatccatccgcttgcgaacgcacataaaggaggtgcatggagccgcacaggaggctttggtcttcacctcgagtataaaccaatcattctgcctcctggaacccggaggtgatattcagcaagaagcattaggtgatcagttgcagctggtggaggaggaattcgcactccagggagtgaatgctctgaaggaggaggcctgcccaggtgatacccagctggaggagggaaggaaagaaccagaggcccctggagaaatgcccgctcccgcggtgcacttagcatctcctcaggctgagtctacagccctacccccatgcgagctggagacaaccgtcgtcagcagctccgatctgcactcacaggaagtggtcagtgacgacttcctcctcaagaatgatacaagtagcgccgaggctcatgctgccccagagaagccaccggatatgcaacaccgatctagtgtgcagactcagggtgaagtcattacgttactgctgtcaaaggcccagagcgccggctccgaccaggaaagccatggcgcgcagagccccctcggagaagggcagaatatggcagtcctgagcgctggcgatccagacccgagtcgatgtctgcggtctaaccccgccgaggccagtgatttgttaccgcccgtggcgggaggaggagacacaataacacatcagcctgactcatgcaaggcggcccctgagcatagatcgggcatcaccgctttcatgaaagttctaaattctctccagaagaagcaaatgaatacttctctctgcgagcggatcagaaaagtgtacggtgacctggagtgcgaatattgtggaaaacttttctggtatcaggttcatttcgacatgcacgtcaggacacacacacgcgagcacctctattattgctcccaatgccactactctagtattactaagaactgcctaaaacgccacgtgattcagaagcattcaaatatccttctaaagtgtcctacagacgggtgcgactattcaacacccgacaagtataagttgcaagcccatttaaaggttcatacagctctggataaaaggagctattcttgccccgtgtgtgagaaatccttttcggaagatagattaatcaagtcacatatcaaaacgaatcatcctgaagtctccatgagtacaatcagtgaggtgttgggaaggagggtgcagttaaaggggctgattggcaagcgggccatgaaatgcccttactgcgatttctatttcatgaaaaacgggagcgatctccaaagacatatttgggcacacgagggggtaaaaccttttaaatgcagcctgtgtgaatacgcgacaagaagtaaatctaacctgaaggcgcacatgaacaggcactcaacagaaaagacccacttatgtgatatgtgcggtaagaagtttaagtccaaaggcacattgaagtctcacaaattgctccataccgccgatggcaagcagtttaagtgtacggtatgcgattatacagccgcccaaaagccacaattactgcgtcatatggaacagcacgttagtttcaaacctttccggtgcgctcactgtcactattcatgtaacatatccggctctctcaagcgccactacaacagaaagcacccgaacgaggaatatgccaatgtagggaccggcgaactggccgccgaggtgctaatacagcaaggtgggctgaaatgtcccgtatgctcattcgtgtatggaactaagtgggagtttaatagacacctcaagaataaacacgggctcaaagtggtggaaatagatggcgacccaaagtgggaaacagccactgaggctcctgaggagccttccacccaatatcttcacatcacagaagccgaagaggacgtgcagggaacacaggccgcagtcgcagcactgcaggacctgcggtacacctcagagtcaggagacaggctcgaccccaccgccgtgaatatcctacaacagatcatcgagctcggtgccgagactcatgatgcaaccgccttggcttcagtcgtggcgatggcccccggcaccgtgacggtggttaagcaggtgacggaggaagaaccatcatctaaccatacagttatgatccaagagacggtgcagcaggccagcgtggaactggcagaacagcatcacctagtagtaagcagcgacgacgttgaagggatcgaaactgtcaccgtgtatacacagggtggcgaggcttccgagtttatcgtctacgtgcaggaggcaatgcaaccagtggaggaacaggctgttgaacagcctgcccaggagctttag

SEQ ID NO: 211724 - DNA, 177 bp, synthetic construct
  misc_feature 1..177: note = Description of Artificial Sequence: Synthetic coding sequence
  source 1..177: mol_type = other DNA
atggagacccgggccgccggcctgctggagttcgccggcggccccttgcacacattattcgcatgggtgtctccggtagaggcagcagaacaacagcggctgctacccgtgccagcctccggctcgtttgtacccgagggccacctccccgatgccagccagagcagcccagtgtag

SEQ ID NO: 211725 - DNA, 1653 bp, synthetic construct
  misc_feature 1..1653: note = Description of Artificial Sequence: Synthetic coding sequence
  source 1..1653: mol_type = other DNA
atggacctgaccaagatgggcatgatccagctgcagaaccccagccaccccaccggcctcctctgcaaggctaaccaaatgagactcgcgggtactctctgtgatgtggtcatcatggtcgactcacaggaatttcatgcacaccgcaccgttttggcctgcactagtaagatgtttgagattctctttcaccgaaactcgcagcactatacgctggatttcctgagcccaaaaactttccaacagattctcgagtacgcatacacggctacgctacaagctaaggctgaggatctggatgatttgctgtatgcagcagaaatcctggagattgaatatctggaagaacagtgcctgaaaatgctggaaacaattcaagcatccgacgataacgacaccgaggcaacaatggccgatggaggcgcagaggaagaggaagatagaaaagcccgctacctgaagaacatttttatcagcaagcattcgtccgaagagtcagggtacgcctccgtggcgggccagtccctgcccggacctatggtcgaccagtcccctagtgtgagcactagttttgggctgtccgccatgagccctactaaagctgctgtggactcattaatgactatcggacagtctctccttcagggcacgctgcaaccacccgctggtcccgaggaacctaccctggcagggggaggccgtcacccgggggtggccgaggtgaagaccgaaatgatgcaggttgacgaagtcccaagtcagggcttcattcagcgcgaattgtttagcaagctgggggagctcgccgtgggaatgaagagtgaatcccgcaccatcggcgaacagtgctccgtttgcggcgtcgagttaccagacaacgaggccgtggagcagcacaggaagctccactcaggcatgaagacatatggctgtgaactgtgtggcaagagattcttggacagtctccgactcagaatgcaccttctcgcccactccgctggagccaaggcctttgtgtgcgaccagtgcggggcccagttcagcaaagaggacgccctggaaactcaccgccaaacccatactggcaccgatatggccgtattctgtctgttatgtgggaagaggtttcaggcccagtccgcgctgcagcagcatatggaggtccacgctggagtgcgatcttatatatgcagcgaatgtaaccgaaccttcccaagccatacagctctgaaacggcatctgcgttcccataccggtgaccacccctatgaatgtgaattttgtggtagctgcttccgtgatgagtcgacgttgaagagtcacaaaaggatccacacaggcgaaaaaccttatgagtgcaacggctgcggtaagaaattttcccttaaacaccagcttgagacccattatagggtccacactggcgaaaaaccatttgagtgtaagctgtgccatcagcgcagcagagattactcggctatgatcaagcatcttagaacccacaatggggcaagtccatatcaatgcacgatttgcaccgagtactgtccaagcctctccagtatgcagaagcacatgaagggtcacaagcctgaggagattcccccagactggcgcattgaaaagacatatctatatctgtgctacgtttag

SEQ ID NO: 211726 - DNA, 2022 bp, synthetic construct
  misc_feature 1..2022: note = Description of Artificial Sequence: Synthetic coding sequence
  source 1..2022: mol_type = other DNA
atggacctgaccaagatgggcatgatccagctgcagaaccccagccacccaactggtctcctttgcaaggcaaatcagatgagactggctggcactctgtgcgacgtagtgattatggtggacagccaggagttccacgcccacaggaccgttctcgcctgcaccagcaaaatgtttgagatcctttttcaccgaaacagccaacactacaccctcgatttcctgagcccaaagacctttcagcaaattctggagtacgcgtatacagcaaccttacaggcaaaagcggaagatctggatgatctgctgtacgctgccgagattctggaaattgagtacttggaggaacagtgtctgaaaatgcttgaaaccattcaggcgtctgacgacaatgataccgaggcgaccatggcagatgggggcgcggaggaggaagaagaccggaaagctagatacctcaagaacatttttatctccaaacactcttctgaggaaagcggatacgcatctgttgcaggccaatcactgcccggaccgatggtggaccaaagtccctcagtatctacgagctttggcctgtccgcaatgtctcccactaaagctgccgttgattcactcatgacgataggtcagagtctgctgcaaggcacactgcagccacccgctggtcccgaggaacctaccttggcgggaggagggagacacccaggagtagccgaagtcaagaccgagatgatgcaggtggatgaggtgccttctcaggatagtcccggggccgcagagagtagcatcagcggtgggatgggagacaaagtcgaagaaaggggcaaagagggccccggtacgccgacacggtcgtccgtcattacaagcgcacgggagcttcactacgggcgcgaagaatccgccgagcaagtgccccctcctgccgaagctggccaggcccccacgggtagaccagagcatccagccccccctcctgaaaaacacctcggtatttacagtgtgctgccaaatcacaaggccgacgctgtcctcagcatgcccagctccgttacaagtggcctgcatgtccagcctgctctcgccgtttccatggactttagcacatacggtgggctactcccccaggggttcattcagcgggagctgttttcaaagcttggagagctggcagtcggtatgaaatctgaatctcggactatcggggaacaatgttctgtttgcggggtcgaattaccggataatgaagccgtggaacaacatagaaagttgcacagcggtatgaagacatacggctgcgagctgtgcggaaaacgattcctcgactccctgcgcctgagaatgcacctgctggctcactctgccggggccaaggctttcgtctgtgatcagtgcggtgcgcaatttagcaaagaggatgcactcgagactcacagacagacccacacaggaactgacatggctgttttttgtctgctatgcggtaagagatttcaagctcagtcggcactccagcagcacatggaagtacatgccggcgtgaggtcctatatctgcagtgaatgcaaccgcacttttccctctcacacagcattgaaaaggcacttgcgcagccacaccggcgatcacccgtatgaatgtgagttctgcgggtcttgctttagagatgaaagtacattaaagtctcacaaaagaattcataccggcgagaagccttacgaatgtaatgggtgcggcaagaaattttccctgaaacaccagctggaaacccattacagggtccataccggggagaagccctttgaatgtaaactgtgccatcagcgctcgagagactattcggcgatgattaagcacctcaggacccataacggtgcttcaccctaccaatgtaccatttgcactgagtattgtccttcgttaagttctatgcaaaagcatatgaaaggccataagcccgaagaaatccctcctgattggcggatcgaaaaaacctacctctacctttgttacgtttag

SEQ ID NO: 211727 - DNA, 2022 bp, synthetic construct
  misc_feature 1..2022: note = Description of Artificial Sequence: Synthetic coding sequence
  source 1..2022: mol_type = other DNA
atggacctgaccaagatgggcatgatccagctgcagaaccccagccaccccactgggttgctgtgcaaagctaaccagatgcggctcgctggcaccctgtgcgatgtagtgattatggtggactctcaagaattccatgcacatcggacagtgctggcatgtactagcaaaatgtttgaaatcctgtttcacagaaacagccagcattacactctggacttcttgtcacccaagacatttcagcagatcctcgaatatgcctacacagcaactctccaagctaaggcagaagatctggatgatctgctgtacgcagcagagatcctggaaattgagtatttagaggagcagtgccttaaaatgctggagaccatccaggctagcgacgacaacgatactgaggcgaccatggctgatgggggggcggaggaggaggaagaccggaaggcccgatatctcaagaacatctttattagtaaacattcctcggaagagtccgggtatgccagcgtagccggacaatctctccccggccccatggtcgatcagagtccctccgtgtcaacctccttcgggttaagcgcaatgagccccaccaaggccgccgtcgactctctaatgacgatcggacaaagcctcctgcaaggaacactccagccgcccgctggccccgaagagcccaccctggccggagggggcagacatccaggagtcgctgaggtaaagaccgaaatgatgcaggtggatgaggtcccttcccaagattcaccaggcgccgccgaatcatctatctctggagggatgggcgataaggtggaggaacgaggaaaggaaggaccaggcacaccaacccgctcaagcgtaattacctctgcccgggagctacattatggacgagaagaatcagcagagcaggtgccacctcccgcagaagccgggcaggctcccacaggccgacctgagcatccagccccacctccagaaaaacatctggggatctacagcgtcttgcccaaccataaagctgacgcggtcctgagtatgccctcctctgtgacctcgggcctgcacgtgcagcctgcactggccgtatccatggactttagcacctacggtggcctgttacctcagggctttatccagcgcgagctgtttagcaagctcggggaattggcagtaggaatgaagagcgagagccggactattggcgagcagtgctccgtctgcggagtggagttacccgacaacgaggccgtggagcagcataggaaactccattccggtatgaagacttacggatgcgaactgtgtgggaaaagatttctggactccttgaggctgaggatgcacctgctagcccatagcgcaggagccaaggcgtttgtatgcgaccagtgcggcgcccagttcagtaaggaagacgccttggaaacgcacagacaaactcataccgggactgacatggctgtcttttgtctcctgtgcggcaagaggtttcaagcccaatcagcactgcagcagcatatggaggtgcatgcgggcgtgcggagctacatttgttccgagtgtaatcgcacgtttccgagtcacaccgccctcaagcgtcacctgcgatcacatactggcgatcatccttatgaatgtgaattctgtggcagctgcttccgagacgagtccactctgaagagtcacaagcgtatacatacaggcgaaaagccgtatgagtgcaatggctgtgggaagaagttctctttgaagcaccagctggaaactcattaccgcgtccacacaggcgaaaaaccttttgaatgtaaactttgtcatcagcgctcgagggattactctgcaatgataaaacatctgcgaacgcacaatggggcctccccctatcagtgtaccatatgcaccgagtattgcccatcacttagcagtatgcaaaagcacatgaaaggacataagcctgaggagattccacctgattggcgtatcgaaaagacttacctgtacctttgttacgtatag

SEQ ID NO: 211728 - DNA, 447 bp, synthetic construct
  misc_feature 1..447: note = Description of Artificial Sequence: Synthetic coding sequence
  source 1..447: mol_type = other DNA
atggacctgaccaagatgggcatgatccagctgcagaaccccagccatcccactggcttgctgtgcaaagccaaccagatgcgactagctgggacactctgcgacgtggtaattatggtagattctcaggagtttcacgcccatcgcaccgttctagcttgcaccagtaaaatgtttgagatcctttttcaccggaattcccaacactacaccctggacttcctgtcaccaaaaacatttcagcagatcctggaatatgcttacaccgccacactccaagccaaggccgaggacctcgatgacctgctgtatgccgccgagattctggagatcgagtatttggaggagcaatgcctgaaaatgttggaaaccattcaagcttccgacgataacgataccgaggcgacaatggctgacggaggagcagaggaggaggaggacaggtag

SEQ ID NO: 211729 - DNA, 348 bp, synthetic construct
  misc_feature 1..348: note = Description of Artificial Sequence: Synthetic coding sequence
  source 1..348: mol_type = other DNA
atggacctgaccaagatgggcatgatccagctgcagaaccccagccatcccaccgggttactgtgtaaggctaaccaaatgcgactagctggtactctgtgtgacgtcgtgatcatggtagattctcaggaatttcacgcccacagaaccgttctggcatgcacaagtaagatgtttgaaattctctttcatcgcaacagccagcactacacgctggactttctttcgccaaaaacatttcagcagatccttgaatatgcgtacaccgccaccctccaggccaaggcggaagacctggacgacctgctatacgcagcagaaatcctggagatcgaatacctggaatag

SEQ ID NO: 211730 - DNA, 723 bp, synthetic construct
  misc_feature 1..723: note = Description of Artificial Sequence: Synthetic coding sequence
  source 1..723: mol_type = other DNA
gaggccctgcccgtgcggctgctgcggcccctgctgctgcggccccacttccaggatgcaccacccggggaccctcgtcacggacagggtgcccaggtccccaccctcagacaggaagtgcagcctggaaacctgaagagacacctgaggattcactccggagaaaagccgtatgtgtgtatccactgtcaacggcagttcgcggaccccggtgcgctccagcgtcatgttaggatacacaccggcgaaaagccctgccagtgcgtgatgtgtggtaaagctttcactcaagcttcttccctgatagctcatgtcaggcaacacaccggcgagaagccctacgtctgcgagcgctgcggaaagcggttcgtgcagtcatcccagttggctaaccacattagacaccatgacaacatcagaccacacaaatgctctgtatgttctaaggcctttgttaacgttggagacctgagcaagcacatcatcattcacaccggcgagaagccctacttatgcgacaaatgtgggcgaggtttcaacagggtggataatttgcgttcacacgtgaaaactgtacaccaaggcaaggcaggcattaagatcctcgagcctgaggaagggagcgaggtttccgttgtgactgtggatgacatggtgactttagccaccgaagcacttgcagccaccgccgttacccagctcacagtggtgcctgtgggatag

SEQ ID NO: 211731 - DNA, 2433 bp, synthetic construct
  misc_feature 1..2433: note = Description of Artificial Sequence: Synthetic coding sequence
  source 1..2433: mol_type = other DNA
atggacttcccccagcacagccagcacgtgctggagcagctgaaccagcagagacaactcggattactgtgcgactgcacttttgtggtggatggggttcactttaaggcacacaaggctgtcctggctgcatgctccgagtacttcaagatgttgtttgtggatcagaaggatgttgtgcatttagacatctccaatgctgccggactgggacaagtgctggagtttatgtatacggctaagctgagtctgtccccagagaacgtggatgatgtcctcgcagtggcaacattccttcagatgcaagacatcattacggcctgccacgcacttaagtctctggccgaaccagctaccagcccaggcggcaacgctgaggctctggccaccgaggggggtgataagagagcaaaagaagagaaagtagccacttccacactctcccggctggagcaggcaggtaggagcacccctatcggaccgagccgagatctgaaggaggagaggggcgggcaggctcagtccgctgcctctggagcagaacagacagagaaggccgacgctccccgcgagccacctcctgtagagctcaaacctgatcctacctctggaatggctgcagccgaggccgaagccgccctctcagaatcctcagagcaagagatggaagtggagccagctcgtaagggcgaggaggagcaaaaagagcaggaggaacaggaggaggaaggtgcggggccagcagaagtgaaagaagaaggctcccagcttgaaaatggggaggcgccggaggaaaacgagaatgaagagagcgcggggaccgattcaggccaggaactgggaagtgaagccagggggctgaggtctggcacttacggtgaccggaccgaaagtaaagcgtacggatctgtgattcataagtgcgaggactgtggcaaggagtttacccatactggcaatttcaagcgacatatcagaattcacaccggagaaaaaccatttagttgcagagaatgcagcaaagctttttcagacccggctgcttgcaaggcacatgagaagactcactctcccttgaaaccgtatggatgtgaagaatgcgggaagtcctaccgactgatttctctgctaaatctacataagaaaaggcatagtggggaggccaggtaccggtgtgaggattgtggaaaactctttacgacctccggtaatctgaaacgccaccagcttgttcatagcggagagaagccataccagtgcgattactgcggaagatccttttccgatcctacgtcaaagatgagacatttggagacgcacgacaccgataaagagcataagtgccctcattgcgacaagaagttcaaccaggtcggtaatctgaaggcccacctcaaaatacatatcgccgacggacctcttaagtgccgggagtgcggtaagcaattcactacgtcaggcaatctgaagaggcatctgcggattcattcgggtgaaaaaccatacgtctgcatccattgtcagagacaattcgccgaccccggcgcattacagcgccatgtgcgcatacacacaggtgaaaagccctgccagtgtgtcatgtgcggcaaggctttcacgcaggctagttctctgattgcccacgttaggcagcacactggtgaaaagccctacgtttgcgagagatgcggtaagcgctttgtgcagagtagccagctagccaatcatatcagacatcatgacaatatccggccccacaaatgttcagtttgttcgaaggccttcgtcaacgtaggagatttatccaagcatatcataatccacacaggggaaaaaccatatttatgcgacaagtgtggccgcggcttcaacagagtcgataacctgcggtctcatgtcaagactgttcatcagggcaaagcggggattaaaatcctcgaacctgaggaaggtagcgaagtctccgtcgtgacagtagacgacatggtcactttggctaccgaggccttggctgcaacagcagtcacacaactgactggaccagccaccctgcccgccgtggtgcccgttggtgccgctgttaccgctgacgagaccgaggtcctcaaggccgagatatccaaggccgtaaagcaggtgcaggaagaggaccccaacacccatattctctatgcctgcgatagttgtggagacaagttcctggacgcgaattcccttgcgcagcatgtgaggatccatacagcccaggcactggtgatgtttcagacggatgctgatttttaccagcaatatggccccgggggcacctggcccgcgggacaggttctgcaagcaggggaactggtgttccggcctcgggatggtgcggagggccaacccgctctagccgagacttccccaaccgccccagaatgcccgccccccgcggagtag

SEQ ID NO: 211732 - DNA, 2412 bp, synthetic construct
  misc_feature 1..2412: note = Description of Artificial Sequence: Synthetic coding sequence
  source 1..2412: mol_type = other DNA
atggacttcccccagcacagccagcacgtgctggagcagctgaaccagcagaggcaattgggactgctgtgcgattgtacctttgtggtggatggagtacactttaaggcacataaagccgtccttgccgcttgctccgagtacttcaaaatgctgttcgtggatcagaaagacgtagttcatttggacatctctaacgccgctggactggggcaagtgctcgaattcatgtatactgcaaaactgagtctaagtcccgaaaacgttgatgacgtcctcgccgtggctacatttctgcaaatgcaggacataattaccgcatgccacgctctgaaaagcttagccgagcctgcgacaagtcctgggggaaatgcagaggcacttgccaccgagggcggagataagagagctaaagaggagaaggtcgccacaagcaccttgtcccgcctggaacaggctggaaggtcaacccccattggaccgtcacgagatctcaaggaggaaagaggcggacaggcacagagtgctgccagtggggctgaacagaccgagaaagccgatgctccgagagagccaccacctgtggagctgaaaccagacccaacatctggtatggccgccgctgaggctgaggccgctctcagcgaaagctccgagcaggagatggaggtcgaaccagctcgaaagggagaagaggaacagaaggagcaggaagaacaggaagaggaaggtgctggaccagctgaggtgaaggaggagggctcacagctcgagaatggtgaggctccggaagaaaacgagaatgaggaatccgccgggaccgattcaggtcaagagctgggctctgaagcacgagggctccgctcaggaacctatggagatagaacagagtcaaaagcatacggtagtgtgattcacaagtgcgaggactgtgggaaggagttcacacacacaggaaacttcaaacgacatattcgcatccataccggcgagaaaccattctcctgccgtgaatgcagcaaagcatttagcgatcccgcggcctgtaaggcccacgaaaaaacgcacagcccattgaaaccctatggttgcgaggaatgcggtaagtcataccgcctgatttcccttcttaacctacataaaaagcggcacagcggggaagcccgttaccggtgtgaggactgcggtaaactgttcaccacgtctggaaacttaaagcgtcaccagctggtgcacagcggtgagaagccataccaatgtgactattgcggccgatcattttctgaccccacaagcaaaatgcgtcatcttgaaacccacgacacggacaaagaacacaagtgccctcattgcgataaaaagtttaatcaagtgggaaatcttaaggcccacctgaagattcatattgctgatggacccctgaaatgcagagaatgcgggaaacagttcaccacgtcagggaacttgaagaggcacctgaggatccacagtggggagaaaccctacgtctgtatccactgtcagaggcagtttgctgaccctggggcgctgcagcgccatgtgcgaatccacacgggggagaaaccttgccagtgtgtaatgtgtggcaaagcgtttactcaggcttcctctctcattgcccacgttagacaacacacgggagaaaagccctatgtgtgtgagagatgcggaaagcgctttgtgcaatcttcacaactggccaatcatatacgtcaccacgataatattaggccgcataagtgctccgtttgttctaaggcatttgttaatgtgggagatctgtcgaagcatattattatacatactggggagaagccatacctatgcgacaagtgtgggaggggtttcaatcgcgtcgataatctgcgttcgcacgtgaaaaccgttcatcaaggaaaggctggcataaaaattctcgaaccagaagagggctctgaggtatcagtagtcacagtggatgacatggtaacgctggccaccgaggcattggctgcgaccgccgtgacccaattgaccgtggttccagtgggcgccgctgtgactgccgacgagaccgaggttctgaaggcggaaatttcaaaagccgttaaacaggtccaggaagaggacccaaatactcacatattgtatgcatgtgacagctgtggtgacaagttcctcgatgccaatagcctcgctcagcacgtccgcatacataccgcccaggccctagtaatgtttcaaacagatgccgatttctatcagcagtacggccccggcggcacctggcctgcaggacaggtcctccaagcgggcgaactcgtgtttcgccctcgggacggtgccgaaggacaaccggccctggccgagacatccccaactgcacccgagtgtcctcccccagcagaatag

SEQ ID NO: 211733 - DNA, 633 bp, synthetic construct
  misc_feature 1..633: note = Description of Artificial Sequence: Synthetic coding sequence
  source 1..633: mol_type = other DNA
tgaagcaagcacatcatcatccacaccggcgagaagccctacctgtgcgataagtgtggacgaggctttaaccgagttgataacctccgttcacacgtgaaaacagtccaccagggtaaagctggcattaaaatattagaacccgaagagggctctgaggtgtccgtggtaaccgttgacgacatggtgactcttgctaccgaggcactggcggccacggcagttacgcaactgactggtcccgcgacacttcccgccgttgtccccgtcggagccgctgtgaccgccgatgagactgaggtgctgaaggcagagatctcaaaggcagtgaaacaggtacaagaggaggatcctaacacccacatcctatatgcctgcgattcatgcggcgacaagtttctggacgccaattcgctagcccagcacgtgcgaattcacaccgcgcaggccctcgtgatgttccagactgacgccgacttctatcagcagtatggacccgggggtacatggcctgccgggcaggtactgcaggccggcgagctcgtcttcaggccccgagacggcgccgagggacagcctgcactggcagaaacatcccctactgctcccgagtgtccacctccggccgaatag

SEQ ID NO: 211734 - DNA, 726 bp, synthetic construct
  misc_feature 1..726: note = Description of Artificial Sequence: Synthetic coding sequence
  source 1..726: mol_type = other DNA
tgagaggccctgcccgtgcggctgctgcggcccctgctgctgcggccccacttccaggatgcacccccaggggaccctagacatgggcagggggctcaggtacctacactcaggcaggaagtgcagccaggcaacctgaaacgacacctgcgcatccattccggcgagaaaccctacgtgtgtatccactgtcagaggcaatttgccgacccaggtgctcttcagcgccatgtgagaatccacactggggaaaagccttgtcagtgcgtcatgtgcgggaaggcctttacacaggcatcttcactgatcgctcacgtgcggcagcacacaggtgagaaaccctatgtgtgcgagagatgtggcaagcgatttgtgcaaagttcccagctggcgaaccacatccggcaccacgacaacatccgccctcataagtgtagcgtttgcagcaaagcctttgtgaatgtgggtgacctttctaagcatattataattcacactggcgaaaagccgtacttgtgtgataagtgcggccgtggctttaacagggtcgacaatctgagatctcatgtgaaaaccgtgcaccagggcaaggccggcatcaagattctggagcctgaagagggttctgaggtgagcgttgtaactgtggatgacatggtgacactggccactgaagctcttgcggctacagcggtgacgcagctgaccgtcgttccggtaggctag

SEQ ID NO: 211735 - DNA, 2169 bp, synthetic construct
  misc_feature 1..2169: note = Description of Artificial Sequence: Synthetic coding sequence
  source 1..2169: mol_type = other DNA
atggacttcccccagcacagccagcacgtgctggagcagctgaaccaacagcgacagttgggcctgctgtgtgattgcaccttcgtcgtcgatggcgtgcatttcaaagcccataaagcagtgcttgctgcatgctctgagtacttcaagatgttattcgttgatcaaaaggatgtggtgcacctggacatttccaatgcagcaggcctggggcaggtcctggaatttatgtacacagcaaagctcagtctcagccccgagaatgttgatgatgtgctagcggtagcgcccggggccgagcagacagaaaaagccgatgccccaagagaaccccctcccgtcgaactcaaaccggatcctacctccggtatggctgcagcggaagccgaagccgcacttagcgagagctccgagcaggagatggaggttgagccagccagaaagggtgaggaggagcagaaagagcaagaagagcaggaagaggaaggcgccggacctgcggaagtcaaggaagagggctcccagctggaaaatggtgaggcaccggaggagaatgaaaatgaagagtccgctggaaccgatagcggtcaggagcttggcagcgaagccagaggccttcggtctgggacttacggagacaggaccgagtccaaagcatatggctccgtgattcacaagtgcgaggactgtgggaaggagtttacccatacaggcaatttcaaacgccatatcagaatacacaccggggaaaaacccttcagctgtcgagagtgcagcaaagcattctcagaccccgcagcatgcaaggcccatgaaaagacccattcgccattaaaaccttacggttgtgaggaatgcggaaaaagctatagactgatttcactgctgaacctacacaaaaagaggcactctggcgaggctcggtatcggtgcgaggattgcggcaaattatttacaacttccggaaatctcaagcgccaccaactagtgcattccggggagaaaccttaccagtgcgattactgtggaagaagcttcagtgatcccactagcaaaatgcggcacctcgagactcatgacacggataaggagcacaaatgtcctcactgcgataagaagttcaatcaggtgggcaacctcaaggcgcatttgaaaatccatatagccgacggcccactgaaatgcagggaatgcgggaagcagtttaccacctccggcaatttgaagagacatctcagaatccactccggcgagaagccttacgtttgcatccactgtcagcggcagttcgccgacccaggggcgctccagcgccacgtcaggatccatacaggcgaaaaaccatgccaatgtgtgatgtgcggtaaagcctttacccaggctagcagcttgatcgcgcatgtgagacagcataccggggaaaaaccatacgtgtgtgagagatgcggaaaacgattcgttcaaagctcccaactggcaaaccacatccgccatcacgacaacatccgcccgcacaagtgttctgtctgcagtaaggcttttgtcaacgtaggcgacctcagcaagcacattattattcacaccggtgaaaagccgtacctctgcgacaagtgcggaagggggttcaacagggttgataatcttaggtctcacgtgaaaaccgtccaccagggaaaggctggcattaagatattagagcctgaagagggtagcgaggttagcgtcgtaactgtggacgatatggttacactggccaccgaggccttagccgctacagcagtgacccagctgactgttgttcccgtgggtgcagctgttactgctgatgaaactgaggtgctgaaagccgagatctcgaaagccgtaaaacaagtccaggaggaggacccaaatactcatattctgtacgcctgcgactcatgcggagataagtttttggatgcaaacagcctggcacagcacgtgcggattcacaccgcacaggccctggtgatgttccagaccgatgccgatttttaccaacagtacggacccggtgggacctggcccgcaggacaggtcctccaagcaggtgagctggtgtttcggcccagagatggtgctgaaggtcagcccgcactggcagaaaccagtcccaccgccccggaatgtccccccccagccgagtag

SEQ ID NO: 211736 - DNA, 1530 bp, synthetic construct
  misc_feature 1..1530: note = Description of Artificial Sequence: Synthetic coding sequence
  source 1..1530: mol_type = other DNA
atggacttcccccagcacagccagcacgtgctggagcagctgaaccagcagcggcagcttggcttactgtgtgattgcacattcgtggtggacggcgttcatttcaaggcccacaaggcggtattggccgcctgtagcgaatactttaaaatgctttttgttgaccagaaagacgtggtccatctcgacatttctaatgcagccgggggcgacaagcgcgctaaagaggagaaagtggcaacatccacccttagccggctggaacaagccggtcgatccaccccaattgggcccagtcgggacctgaaggaggagcggggaggccaggctcaatccgccgccagtggggctgaacagactgaaaaggccgacgcgccgagagagccaccccctgtcgagctgaagcccgaccccacttccggtatggccgctgctgaagcggaagccgcactgtcggaaagcagtgagcaggagatggaggtcgagcctgcccgcaaaggagaggaagaacagaaagaacaggaggaacaagaggaagaaggagccggtcctgccgaggtgaaagaagagggctcacagctggagaatggggaagcccccgaggagaacgagaatgaggaaagtgccggaacagactccgggcaggaactggggagcgaggcacgcggcctccgctctgggacctacggcgaccggaccgagagcaaagcctatgggagcgtgattcataaatgcgaggactgcgggaaagagtttacccatacaggtaacttcaaaagacacatacgcatccacacaggcgaaaaacctttttcatgccgcgaatgcagtaaggcatttagcgaccctgcagcatgtaaagctcacgagaagactcacagccccctgaaaccctacggatgcgaggaatgtggcaagagctatcgtttgattagccttctcaacttacataagaagaggcactccggagaagctcgctataggtgtgaggactgcggcaaactgtttacaacatctggaaatctaaagcggcatcaattggttcattctggagaaaagccctaccagtgtgactattgtggccggtcattctcagacccgacaagcaagatgaggcatcttgaaacccatgatactgataaggagcataaatgcccacactgcgacaagaagttcaatcaggtctgtggaccactgcctgaacccgcacctggctcccgaaggtggccccagccccatgcctgtcacgtcgtcgggcgcgctgggtcgaccgctcctgcctctcgctctagtagcgcttgcagccccaggaagcaagcccagcgggagccactccccaggggcagttctaggctgctgtgtggcggccaggcggactccggaagaggtctcgtcctgaaaaagtgggggggcgcagcttatctgtcacctctcggacccggcactagtcccgatcctggagagatcgagccttttaccgacccaggaaaaccagaatcacagctcttcctgtgcggacggggaaggtag

SEQ ID NO: 211737 - DNA, 2166 bp, synthetic construct
  misc_feature 1..2166: note = Description of Artificial Sequence: Synthetic coding sequence
  source 1..2166: mol_type = other DNA
atgatgtgctggccctggcccctgagcagcaagtgccggaccagctccagaccggccatgccatcctctcacctcttaagccgcctgcccgctctcggtgaaatgagacgaccctggcctcagaaggtgtgcccggtccccagccctgggggggataagcgtgcaaaagaggagaaggtggccacgagcaccttgtcccggctcgagcaagccggtaggtccacccccattgggccgagtagggacttgaaggaggagcggggaggccaggcccagagtgctgcgtcgggggccgaacagacggaaaaggccgacgcccctcgggagccccctcccgtggaactcaaaccagatcccaccagcgggatggctgccgccgaggccgaggcggcgctgtccgagagttcagaacaggagatggaagttgagcctgcccggaaaggggaggaggagcaaaaggaacaggaggagcaagaggaagagggcgccgggcccgctgaggtgaaagaagagggctcccagcttgagaacggggaggcccctgaggagaacgagaatgaagaaagcgcaggcacggacagtggtcaggaattaggatcggaagcccgcggtcttcggagcggcacatatggcgacagaacagagtcaaaagcctacggaagtgtgattcataagtgtgaggactgcggaaaagaatttacgcatacaggcaattttaaaagacacataaggattcacaccggcgagaaacctttcagttgcagggaatgttccaaagcctttagcgaccctgcagcatgcaaagcgcatgaaaagacccatagccccttgaagccttatggatgcgaggaatgcggcaaatcttatcgactgatctctctgttgaatctgcacaagaagagacatagcggtgaggcccgctaccgctgcgaagactgtggcaagttgttcaccacatcagggaacctcaagaggcaccagttggtccacagcggagaaaagccctatcaatgcgactactgtggtaggagtttttctgatccaacatccaagatgaggcatttggaaacacatgacactgacaaggaacataaatgtccacactgtgacaagaagtttaatcaagtgggaaacttgaaagcccatctaaagattcatatcgcggatggaccactcaagtgtcgggagtgcggaaaacagttcactaccagtggaaatctaaaacgccacctccgcattcacagcggcgaaaagccctatgtctgtattcactgtcagaggcaatttgcggaccctggagcacttcagcgtcacgtgagaatacatactggcgagaaaccctgccagtgcgtcatgtgtgggaaggccttcacccaagcctcgtccctaattgcccatgttagacaacataccggcgagaagccctatgtttgcgaacgttgtgggaaacgcttcgtacagtcctctcagctggcaaaccacattcgccaccacgataatatccgccctcataaatgcagtgtttgctctaaggcattcgttaacgtcggggacctttctaagcacatcatcatacatactggagagaagccgtacctgtgcgacaagtgtggcaggggctttaatagggttgataacctgcgtagtcacgtgaaaacggtgcaccaaggtaaagctggaataaagattttggagccagaagaaggatctgaggtctccgtcgtgacggtcgatgacatggtgacactggcgaccgaagctctggctgcaacagccgtcacgcaactcaccgtagtccccgtgggcgctgccgtaacagctgatgaaactgaggtgctcaaagctgagatcagcaaggccgtgaaacaagtgcaggaggaggaccctaacacccacatcctttatgcctgtgacagttgtggtgacaagttcctcgatgctaattctctggcccagcacgtaaggatccacacggcccaggccctggttatgtttcagactgacgctgacttttaccagcagtacggacccggaggtacatggcctgctggacaggtgctgcaggctggagagctggtgtttcgaccacgggacggggcagagggccaacctgccttggccgagactagtcccaccgcccctgagtgtccgcctcctgcagagtag

SEQ ID NO: 211738 - DNA, 2007 bp, synthetic construct
  misc_feature 1..2007: note = Description of Artificial Sequence: Synthetic coding sequence
  source 1..2007: mol_type = other DNA
atgaccgagcggatccacagcatcaacctgcacaacttcagcaacagcgtgttagagacactcaacgagcagcggaatagagggcatttttgcgatgtcacggtgcgtatccatggcagcatgctgcgggcacaccggtgtgtccttgccgcgggctccccattcttccaggacaagctgttgctgggctattccgacattgagatcccgagcgtggtgtctgtgcagtccgtacagaaactcatcgattttatgtacagtggggtactgcgcgtctcccagtctgaggcactccaaattctgaccgccgccagcatccttcagatcaaaacggtcattgacgaatgcaccaggatcgtgtcccaaaatgttggggacgttttccccgggattcaggattcgggacaggacactccacgcgggaccccggagagtggcacatctggccaatctagtgacacagagagcggatacctgcagtcacatccacagcactctgtggatagaatttactcagcactatatgcctgttcaatgcagaatggcagtggcgaacgcagtttttattcaggcgccgtggtgtcccaccatgagactgcattgggcttaccgcgcgatcatcacatggaagacccatcttggatcacacgcatccatgagagatcgcaacagatggagcgctatttatccactacccccgagactacacattgtcgcaagcaacctagacccgtacgaatccagacactggtcgggaatatccatatcaaacaagagatggaggacgattatgactactacggccaacagagagtgcagatcttggaacgaaacgaatccgaggagtgcaccgaagatacggatcaggccgagggcaccgagagcgaacccaaaggagagagtttcgactccggtgtcagcagctctatagggactgagcccgattccgtggagcagcaatttggccctggggcggctcgcgactctcaggccgaacctactcaaccggagcaggcggcagaggccccggccgagggaggcccccagaccaatcaactcgagacaggggcttccagcccagaaagatctaatgaggtcgaaatggactccacagttatcaccgtgagcaactctagcgataagagcgtgctgcagcagccaagtgtcaacacgtcgattggccagccgctgccctcaacacagttatatctgcggcagacagagacactcacgagcaacttgagaatgcccttgacccttacctccaatacccaagtgattggaaccgctgggaatacgtacctaccagctctgttcaccacacagcctgcaggctcagggcctaagccctttctttttagcctgccgcagccactggcaggccaacagactcagttcgtaaccgtgtcacagcccggcctgagcacattcacggctcagctgcccgccccgcagccgcttgcatcttccgcaggccattctaccgctagtggccagggggaaaagaagccatacgaatgtacgctttgtaataagaccttcaccgccaagcagaactacgttaaacacatgttcgtccacactggcgagaaaccgcaccaatgctcaatttgttggaggtccttcagcctgaaggactatttgatcaagcacatggtgacccacaccggcgtgcgggcttatcagtgttcgatctgtaataaaaggtttacccagaagtccagtctcaacgtccatatgcgtctgcaccgtggggagaagtcttacgaatgctacatttgcaaaaaaaagttctctcacaaaacccttctggagcgccacgtagctttgcactcagcctccaacggcacgcccccagctgggacaccaccaggggctagagccgggccgccgggagtggtagcatgcacggagggaaccacttacgtttgctccgtttgccccgctaagttcgatcagattgagcagtttaacgatcatatgcgaatgcatgtgagcgacgggtag

SEQ ID NO: 211739 - DNA, 2007 bp, synthetic construct
  misc_feature 1..2007: note = Description of Artificial Sequence: Synthetic coding sequence
  source 1..2007: mol_type = other DNA
atgaccgagcggatccacagcatcaacctgcacaacttcagcaactctgtgctggaaactctaaatgagcaacgaaacagaggtcacttttgcgacgtaactgtgcgcatccacgggtcaatgttgcgtgcccatcgttgcgtgctggcagcagggagcccttttttccaggataagctgctcctggggtattccgatattgagataccaagcgtcgtttccgtgcaatctgtacaaaagttgatcgatttcatgtactccggcgtgctgcgagtgtcgcagtctgaggcactgcaaatcctgacggccgctagcatccttcagataaagaccgtcattgacgagtgcacaaggatcgtgtcccaaaatgtaggtgacgtgttccctgggatccaggattcaggccaggatacccctcggggcacccccgaaagcggcacttcggggcagtcttccgatacagagagtggctatctgcagagtcacccacagcatagcgtggataggatttactcagcgctgtacgcctgctccatgcagaacggctcaggtgaaaggagcttttattccggagcagtcgttagccaccacgaaaccgctctagggctgccccgggatcaccacatggaggatcccagctggatcacacgtatccatgagaggtctcaacagatggagcgttatttgagtaccacccccgagaccacacactgtcggaaacagcccagacctgtacgaatacagacactggtggggaacatccacatcaagcaagagatggaggatgactatgattattacgggcagcagcgtgtacagatacttgaaagaaatgagtctgaagagtgcaccgaggacactgaccaagccgagggtacagaatcagaacctaagggagaaagctttgatagtggtgttagttcttcgataggcaccgaaccggattccgtggagcagcagtttggacccggcgccgcccgggacagccaggcggagcctacgcaaccagaacaagccgctgaggcgcccgccgagggcgggcctcagactaatcagctcgagactggcgcctcaagccctgaaagatccaacgaggtggagatggacagcaccgtaatcaccgtttcgaactctagtgataagagcgtgttacagcagcccagtgtcaatacctcaattggacagcctttgcctagcacccaactctatttgcgccagactgaaacactaaccagtaatcttaggatgccactcaccctcacctctaacacacaagtgatcggaaccgcagggaacacctatctgccagcccttttcaccacccaaccagcaggtagcgggccaaaaccgttcctgtttagcctgccgcagcctctggcaggccagcaaacacagtttgtcaccgtcagccagccggggctttccacttttaccgctcagctgcctgcccctcagcctcttgcctcctctgccgggcattccactgcttctggtcagggcgaaaagaagccatacgaatgtaccctctgtaacaaaacctttaccgccaaacaaaattatgtgaagcacatgtttgttcacactggcgagaagccacatcagtgcagcatatgttggcgatcctttagtcttaaggactatctaataaagcatatggtcacccataccggcgtgcgcgcctatcagtgctccatttgtaacaagagatttactcagaaatccagcctgaatgttcacatgaggctacaccgcggggagaagagctacgaatgttatatttgcaagaagaaattcagccacaaaactctccttgaaaggcacgtcgctcttcacagcgcttccaacggtacaccacctgccggaacccccccaggagcgcgcgcgggccccccaggggtcgtggcgtgcaccgagggcaccacctacgtctgcagcgtctgtcccgctaagtttgaccagatagaacagtttaatgaccacatgcgcatgcatgtgagcgacggatag

SEQ ID NO: 211740 - DNA, 2007 bp, synthetic construct
  misc_feature 1..2007: note = Description of Artificial Sequence: Synthetic coding sequence
  source 1..2007: mol_type = other DNA
atgaccgagcggatccacagcatcaacctgcacaacttcagcaacagcgtgctggagacacttaacgaacagcggaaccgcggccatttctgtgatgttacggtaagaatacacggttcaatgctgcgggcgcaccgctgcgtgctggctgccggcagtccctttttccaagacaaactcctgctcggctactctgatatcgaaattccttcagtggtgagcgtgcaaagcgtgcaaaagttgattgattttatgtatagcggggtgttgagggtctctcagagcgaggctctgcaaatcctgactgccgccagcatcctccagattaaaaccgtaatcgacgaatgtaccaggatcgtctctcaaaacgttggtgacgtgtttcctggaatccaggattctggccaggacactccacgtggcacacccgaatcaggcacctccggccaatccagtgacacagaatctgggtatctgcaaagtcatcctcagcactctgtggaccgcatctattccgccctttatgcatgcagcatgcagaacggatctggcgagcggagtttttactctggggcggtcgttagccatcacgagaccgctctcggcttgccaagagatcaccatatggaggacccctcatggatcaccagaattcatgagcggtctcagcagatggagcggtacctgtctactacgccggagaccacgcactgcaggaaacagcctcgtcctgtccgtatccagactcttgtgggcaacatccacataaaacaagagatggaggatgactacgactactatgggcagcaaagagtgcaaattctggaacgaaatgagtctgaggaatgcaccgaggacaccgatcaagcagagggcactgaaagtgaacccaagggtgagagtttcgatagcggagtgtctagcagtatcgggaccgaaccggatagtgtagagcagcagttcggccctggggccgcgcgggactcgcaggccgaacctactcagccagagcaagcggccgaggctcccgccgagggaggtcctcagaccaatcagttagagactggggcatcctctcccgagcggtctaacgaggtggagatggactcaacagttatcaccgttagcaattcttccgataaaagtgtcctgcagcagccatccgtcaatactagcatcgggcaaccgttacctagtacccaactatacctgcgccagactgagacactcacaagcaacctcaggatgccgttgacgctgacgagcaacacacaggtgatcggaaccgcaggcaatacctatttgcccgctctgtttactacacagcctgcaggaagtggccccaagccatttttgttttctctgcctcagccgctggcgggccagcagactcagttcgtgacagtgagccagccaggcctgtcgacctttactgcccagctaccagcaccccaacccttagcctctagcgccggtcatagcactgcaagtggccagggagagaagaagccgtacgaatgtacactgtgcaacaaaacttttacagcaaaacagaattatgttaagcacatgtttgtgcataccggagagaaaccccaccagtgttctatttgttggagatcattttctctgaaagattaccttattaagcatatggtaacgcacaccggcgttcgcgcataccagtgttcaatctgcaacaagcgtttcacacagaagtcgtctctgaacgtccatatgcgacttcaccgtggcgagaagtcctacgaatgttatatttgcaagaaaaaattttcccataagaccctacttgaacgtcatgttgccctgcacagtgcctcgaacggcaccccaccagcaggcaccccacccggcgcaagggcaggtcctcccggcgtggtggcctgtaccgaaggcactacgtatgtgtgcagcgtgtgcccagcaaagttcgatcaaatcgagcagttcaacgaccatatgcgaatgcacgtcagcgacgggtag

SEQ ID NO: 211741 - DNA, 2007 bp, synthetic construct
  misc_feature 1..2007: note = Description of Artificial Sequence: Synthetic coding sequence
  source 1..2007: mol_type = other DNA
atgaccgagcggatccacagcatcaacctgcacaacttcagcaacagcgtgttagaaaccctcaacgagcagcggaacaggggccacttctgcgatgttactgtaaggattcatggctctatgctgagagcccaccggtgtgtattggctgccggctcccccttttttcaggacaagctcctgctggggtattccgatatcgagataccaagtgtcgtttctgtccaaagtgtacagaaactgatcgatttcatgtactctggcgtgcttagggtatctcagagcgaggcacttcagattttgacagcagcctcaatcctgcagataaaaacagtgatagatgagtgcacccggatcgtatcgcaaaacgtcggcgacgtgttccccggcatccaagatagcggccaggataccccacggggaacccccgaatctgggacatccggccaaagtagtgatacagaaagcgggtacctgcagagtcatccacaacattcagtggaccgaatctactcagcactgtatgcctgcagcatgcaaaacgggagtggggaacggtcgttctacagcggggccgtggtctcccatcacgaaacagctctcggactcccgagggaccaccatatggaggaccccagctggatcacacgcatccatgaaagaagccagcagatggagcgctatctgagtactactcctgagaccacacattgtcggaagcagccccgaccagtccggatccagacattggtgggcaacatacacatcaaacaggaaatggaggatgattacgactattatggtcaacagagagttcaaatcctcgaacgtaacgagtccgaagagtgcaccgaggacactgaccaagcagaagggactgaatctgaacccaagggcgaaagcttcgactctggcgtcagttccagcataggcaccgaacccgacagtgtggagcaacaattcggcccaggcgcagcacgcgattcccaagcggagcccacacagcctgagcaggccgcagaagctcccgctgagggcggcccccagaccaaccagttggaaacaggtgcatcctctccagaaagatccaatgaggtagaaatggactctactgtgattacagtaagcaattcttctgacaaatcggttctgcagcagccaagcgtgaataccagtatcggacaacctctgcctagtacgcagttatatctgagacagactgagacgttgacatcaaatctgcgaatgccccttacactgactagcaatactcaggtcattgggactgctgggaacacatacttgccagcactattcacaacccagccggctggcagcggccccaaacctttcttgttttccttgccacaaccactggcaggccagcaaactcaattcgtgacagtcagtcagcctgggctcagcactttcacggcacagttgccggccccccagccgctggcttcttccgcagggcactctaccgcatcggggcagggcgagaagaaaccctatgagtgcaccctatgcaacaagacgttcacagccaaacagaactacgtcaagcatatgtttgtgcacacgggtgaaaagccccatcaatgctcaatctgttggaggagctttagcctgaaggattacctgatcaagcatatggtaacccatactggcgtgcgggcttaccaatgcagcatttgcaacaaacgtttcacccagaagagctctctgaatgtccatatgcgtctccaccgaggggaaaagagctatgagtgttacatctgcaagaagaaattcagccataaaacgctcctagaacgccacgtagcgcttcatagcgccagcaatgggacccctccagctggcactccccccggcgcacgggccggcccacccggagtggtggcatgtactgaagggaccacttacgtgtgttcagtctgtcctgccaaatttgaccagattgagcaattcaacgaccacatgcggatgcacgtgtccgacggctag

SEQ ID NO: 211742 - DNA, 174 bp, synthetic construct
  misc_feature 1..174: note = Description of Artificial Sequence: Synthetic coding sequence
  source 1..174: mol_type = other DNA
atgaccgagcggatccacagcatcaacctgcacaacttcagcaactctgtactggaaaccctcaatgagcaacgcaatcggggacatttttgcgacgtgacggtaaggatacacggttccatgttgcgcgcacaccgctgtgtgttagcagcaggttcccccttttttcaatag

SEQ ID NO: 211743 - DNA, 2007 bp, synthetic construct
  misc_feature 1..2007: note = Description of Artificial Sequence: Synthetic coding sequence
  source 1..2007: mol_type = other DNA
atgaccgagcggatccacagcatcaacctgcacaacttcagcaactctgtgctggagacactcaatgagcaaagaaaccggggtcacttctgtgacgtgaccgtgcgaattcacggctcgatgttgcgggctcaccgttgcgtgttggctgccgggagcccattcttccaagacaagctgctgcttgggtactccgacatagagattccctcagtcgtgtctgtgcagtctgtccagaagttaatcgacttcatgtactccggggttctgcgagtcagtcagagcgaagcgcttcagatcctgaccgcagcatctatccttcagatcaaaacggtaatcgatgagtgtacccgtattgtttcccaaaatgtcggagacgtattccctggcatccaggactctggccaagatacaccacgcggcactccagaatctgggacctccggtcagagcagcgatacagaatccgggtacctccagtcccacccacagcattctgtggaccgaatttactccgccttgtatgcctgcagtatgcagaatgggtcaggcgagcgcagcttctatagtggagcagtggtatcacaccatgaaaccgcgctgggtttgccaagggaccatcacatggaagacccctcttggataacacggattcacgagcgaagccagcaaatggagaggtacctttctaccaccccggagaccacacattgtcgtaagcagccaaggcccgtgagaattcagacactggtgggcaacatccatatcaagcaggaaatggaagatgactacgactattacgggcagcagcgcgtgcagattctggagcgcaacgaatcagaggagtgcaccgaggacacagaccaggctgaaggtactgaatctgaacccaaaggtgaaagctttgactccggagtatccagcagcatagggaccgagccagattctgtcgagcaacaatttggtccaggggcagctagagattcacaggcggaaccaactcagccagagcaggccgccgaagccccagccgagggggggccccagacaaatcagctggagacaggcgcaagttctcccgaacgatcaaatgaagtggaaatggacagtaccgtgataacagtgtctaattcaagtgataaatcagtcctgcagcagccgagtgttaataccagcatcgggcagcccctgccatccacccagctctacttgaggcagacagaaactctgacatccaatctccggatgcccctgacactgacctccaacacccaggtgattggcactgcgggaaatacatatctccctgccttgttcactacacagcctgcaggatccgggcccaagccatttttgttctcgttgccgcagcctttggccggtcagcagacgcagttcgtgacggtgtcccagccaggcctttcaacattcactgcacaactgcctgccccccagcccctggcctccagcgccggacacagcacagcatccggccagggggagaaaaagccgtacgagtgtacattgtgcaacaaaacatttacagccaagcagaactacgtgaaacacatgttcgtccacaccggagaaaaaccacaccagtgcagtatttgctggaggagctttagcctgaaagattatctgattaagcacatggtgacacataccggcgtgagggcttaccagtgctcgatatgcaacaagcggtttacccaaaaatcatccttgaacgtgcacatgcgacttcaccgcggggagaaatcctatgagtgttacatttgtaagaaaaagttttcacacaagacgctgctagagcgccacgttgcactgcatagtgcaagcaacgggacacctcctgctggcactccgcctggcgcaagggcagggcctccaggagtggtagcttgtacggaaggcactacttatgtgtgctccgtctgtccggcgaagtttgaccagatcgagcagtttaacgaccacatgcggatgcacgtaagcgacgggtag

SEQ ID NO: 211744 - DNA, 2226 bp, synthetic construct
  misc_feature 1..2226: note = Description of Artificial Sequence: Synthetic coding sequence
  source 1..2226: mol_type = other DNA
atgctggagcggaagaagcccaagaccgccgagaaccagaaggcctcagaggagaacgaaattacacaaccagggggctctagtgccaaacccggacttccatgcctgaatttcgaagctgttctttcacccgacccagccctgattcacagcacgcattccctcactaattcccacgctcacactgggtcgtccgattgtgatatttcgtgtaagggtatgactgagaggatccatagtataaacctgcataattttagcaactccgtattagaaacgctcaacgagcagcgcaacaggggccatttctgtgacgtgacagtgaggatccacggctccatgctcagagcccatcggtgcgtcctcgcagcaggtagccctttcttccaggacaaactcctgctcggatatagcgatattgagatcccctcagtcgtatctgttcagagcgtgcagaagttaattgacttcatgtactctggggtgttgcgcgtgagtcagagcgaagcactgcaaatacttaccgctgccagcatcctgcagatcaagaccgttatcgacgagtgtacccgtatcgtatctcagaatgtcggtgacgtcttccctggtatacaggatagtggccaggacacaccccggggcacacctgaaagtggaacttctggtcagtcctctgatacagagagcggatacctgcagtcacaccctcagcacagcgtagacagaatctattcagccctgtacgcttgcagcatgcagaatggcagtggtgagaggtccttttattctggcgccgtcgtgtcacaccatgaaaccgccctgggtctaccccgcgaccaccacatggaggaccccagctggattacccgcattcacgagaggtcacagcagatggagagatacttaagcactaccccagaaaccacccattgccgcaaacagccgaggcccgtgcgaatccaaactctggtcggaaatatccatatcaaacaggagatggaggatgattacgactactatggtcagcagagagtgcaaattctggagaggaacgagtctgaagaatgcacagaggacacggatcaggccgagggtacagagtcagaacccaaaggggaatcttttgactctggagtttcctcctcaatcggcactgagccagactcagttgagcagcaatttgggccaggggctgctcgcgactcacaggccgaacctacccaacctgagcaagcagcagaagcccctgccgaaggagggccgcagactaatcagctcgagaccggagccagcagtcccgagaggtcgaacgaagtggaaatggactccactgtgattaccgtgtccaattcatcggataaatccgtcctgcagcaaccatctgtaaatacgtccatcggacagcccctgccctctacacagttgtatctgagacagacagaaaccctgacctcaaacctgaggatgcctctgacgctgactagtaatactcaagttatcgggactgctggcaatacctatctgccagcactgttcacgacgcaacccgccggctctggtcctaagccctttctgttttcactaccccaaccactggcgggccagcagactcagtttgtcactgtgtcacagcccggactgagcacatttacggcgcaattgccagctccccagcctctcgcttcttcggccggacacagcactgcctctgggcagggtgaaaagaagccctatgagtgcaccctatgcaataaaactttcacagcaaagcagaactatgtgaaacacatgttcgtccacacaggtgaaaaacctcatcagtgcagcatttgctggagatcgttttcactcaaagattacctgatcaaacacatggtaacccacacaggcgtaagagcataccaatgcagcatctgcaacaagaggtttacacaaaaatctagcttgaatgtgcatatgcgtcttcaccggggagaaaaatcctatgaatgttacatatgtaaaaagaaattctcgcataaaacactcctagaacgacacgtggctttacactcagctagcaatggcacccctcccgcaggtactcctcctggggctagagcaggccctcccggcgtggtggcctgcactgaaggcaccacctacgtgtgctccgtatgtccagcaaaattcgaccagattgaacaattcaatgatcatatgcggatgcacgtgtccgatggctag

SEQ ID NO: 211745 - DNA, 2007 bp, synthetic construct
  misc_feature 1..2007: note = Description of Artificial Sequence: Synthetic coding sequence
  source 1..2007: mol_type = other DNA
atgaccgagcggatccacagcatcaacctgcacaacttcagcaactctgttctggagaccttgaatgaacagagaaaccgtggacacttctgtgacgtaactgtcagaatccatgggagcatgttgagagcccaccgatgtgttctcgccgccgggtcccccttctttcaagacaagctgttgctaggctatagcgacattgagattcccagcgtggtgagtgtccagtccgtgcagaagttgattgacttcatgtactctggggttttgcgcgttagtcaatccgaagccctgcagatattgacagccgcctcgatactgcagattaagacggtgatcgatgaatgcacacgcatcgtgagccagaacgtcggagatgtcttcccagggatccaggactcaggtcaggacactccgcgcgggacacctgaaagcggaaccagcggccagagctccgacacggaatccggttacctccagtcgcacccccagcactctgtcgatcgcatctactctgccctgtacgcgtgttctatgcagaatggatcgggagagaggtccttctacagtggtgccgtggtgagccaccacgagaccgctctcgggctaccacgggatcaccacatggaggatccctcatggatcactagaattcacgagagatcccaacagatggagagatatctatctacaactcccgagaccactcactgtaggaaacagccccgcccggtgcgcattcaaaccctggtcggcaatatacacattaagcaggagatggaagatgattacgactactatggtcagcaacgcgtccagatccttgaaagaaacgagtcggaggagtgtactgaggatacggaccaggcagagggcaccgagagcgaaccaaagggtgagagtttcgacagtggcgtgagtagtagcattggaacggagccagacagcgtggagcagcagttcggtcccggcgcagctcgggacagccaggccgagcctacccagcccgaacaggccgccgaagcaccggcagaggggggcccacaaaccaatcagctggaaacaggcgcatcttctcctgaaagaagcaatgaagttgagatggacagtaccgtgataaccgtgtccaattcatcagataaaagtgtactgcagcagccatccgtgaacacctctattggtcaaccacttccgagtacccaattgtacctcagacagactgagaccctgacctccaatctgcgaatgcctcttactctgacgagtaacacacaagtgatagggacagctggcaatacctatctaccagccctgtttacaacccagcctgcaggaagcggccctaaaccctttctgttcagcctgccgcagcccctggctggccaacaaacccagttcgtcacagtgtcccagcctggccttagcaccttcacggctcagctccccgcgccccaacctttagcatcttctgcaggacactccacagcgtcaggacaaggcgagaagaagccgtacgagtgcacactgtgcaataagacttttactgccaaacaaaactatgtaaagcacatgtttgtgcataccggggagaagccacaccagtgttccatctgttggagatctttttctctgaaggattacctgattaaacacatggttacccatacgggagttcgcgcgtaccagtgttccatttgcaataaacggtttacccagaagagctcgctaaacgttcatatgcgtcttcaccggggcgagaagtcatatgagtgctacatctgtaaaaaaaagttttcccataaaaccctcctggagagacacgtcgctctccactcagcttccaacggaacaccacctgcgggtaccccaccaggcgctcgcgccggcccacccggcgttgtggcatgtactgagggtactacctatgtttgttcggtgtgtcccgctaagttcgatcagatcgagcaatttaatgatcatatgcggatgcacgtctcggacggctag

SEQ ID NO: 211746 - DNA, 60 bp, synthetic construct
  misc_feature 1..60: note = Description of Artificial Sequence: Synthetic coding sequence
  source 1..60: mol_type = other DNA
atgctggagcggaagaagcccaagaccgccgagaaccagaaggccagtgaggagaattag

SEQ ID NO: 211747 - DNA, 489 bp, synthetic construct
  misc_feature 1..489: note = Description of Artificial Sequence: Synthetic coding sequence
  source 1..489: mol_type = other DNA
atggccgagaccgtggccgacacccggcggctgatcaccaagccccagaaccttaatgatgcctatgggccacccagcaactttctcgaaatagatgtcagcaacccacagacagttggtgtgggtcgagggagattcaccacatacgagatcagggtgaagacaaacttaccaattttcaagcttaaagagagcacagtaaggcgtcggtattctgacttcgagtggcttaggagcgaactggagcgcgaaagcaaggtagttgtgccccccttgcccgggaaagcatttctacggcagctgccctttaggggagatgacgggatcttcgacgataactttatcgaagaaaggaaacagggcctggaacaatttatcaataaagtggctggccacccactcgctcagaatgagagatgtctccacatgttcttgcaggacgagatcattgacaagagctatacgcctagtaaaattcggcacgcctag

SEQ ID NO: 211748 - DNA, 1308 bp, synthetic construct
  misc_feature 1..1308: note = Description of Artificial Sequence: Synthetic coding sequence
  source 1..1308: mol_type = other DNA
atggacaccgccagccacagcctggtgctgctgcagcagctgaacatgcagagggaatttgggtttctgtgtgattgtaccgtcgcaatcggcgacgtctactttaaggcccacagagctgtgttggccgcattctctaattattttaaaatgatctttattcatcaaacttccgagtgcatcaagatccagccgactgacatccagccggatattttcagctacctgcttcatatcatgtatactgggaagggtccaaagcagatcgtggaccactcccgcctagaggaggggatccgattcttacatgccgactacctgtcgcatatcgcaaccgagatgaatcaggtgttttcccctgagacagtgcagtcttcaaacctgtatggtatacaaatctctacaacacagaagacggtggtcaagcaggggcttgaggttaaggaagcccctagcagtaactctgggaaccgagccgctgtacagggcgaccatcctcaactgcagctatcgttagcaatcggcttagacgacgggacggccgaccagcagcgggcgtgtcccgctacccaggcactcgaagaacaccagaagccgccagtcagtatcaagcaggaacgttgcgatcctgagtcagttattagccaatcccatcccagtccaagctctgaggtaaccgggcccaccttcacagagaacagcgtcaagatacacttgtgccactattgtggagaaagatttgatagtaggtcaaacctcaggcagcatctgcatacgcatgtatccggcagtctgccgttcggcgttcctgccagcattctggagtccaacgacctcggcgaggtacatcctctaaatgagaacagcgaagctctggaatgccggcgcctgagcagctttatcgttaaagaaaacgaacagcagccagaccacactaacagggggaccaccgaaccacttcagatcagccaggtctcgctgatttcaaaggatactgaacccgtcgagctaaattgtaacttctctttttcacgaaaacgtaagatgtcatgtacaatctgtggacataagttccctagaaaaagccagctgcttgagcatatgtatactcacaagggcaagtcttataggtacaaccggtgtcagcgattcggtaacgctttggcacagcgctttcaaccatactgtgattcctggagcgacgtatccttgaagtctagcagactctctcaggagcacctggaccttccatgcgctttagagtcagagctgacacaagagaacgttgacaccatactggtcgagtag

SEQ ID NO: 211749 - DNA, 1308 bp, synthetic construct
  misc_feature 1..1308: note = Description of Artificial Sequence: Synthetic coding sequence
  source 1..1308: mol_type = other DNA
atggacaccgccagccacagcctggtgctgctgcagcagctgaacatgcagcgcgagttcggatttctgtgcgattgcacagtagcaatcggggacgtttactttaaggctcatcgggccgtgctggctgcgttctccaattatttcaaaatgatctttatccaccaaacatccgagtgtattaagattcagcctaccgatattcagcccgacatctttagttatctactccacatcatgtatactggcaagggcccgaagcagatcgttgatcacagccgccttgaagaaggtatacgtttcctgcacgcagattatttgagtcacatcgcaacggaaatgaatcaggtgttctcgccggaaactgttcagagctccaacctgtatggcattcagatttccaccacccaaaaaacagttgtgaaacagggcctggaagtcaaagaagccccaagcagcaactcaggtaatagggccgccgtgcagggagaccatccacagctccagttaagcctggcaatcggccttgacgacggcactgccgatcagcaacgggcctgtccagcaacacaggccctggaggaacaccagaaacccccggtgagtataaagcaggagcgctgcgaccccgagtcagtgatatcccagagtcacccttcaccatctagtgaagtcaccggccccacctttactgagaatagcgtcaagattcatctgtgtcactactgcggcgagcgattcgacagccgcagcaacttgcgccagcatctacacactcatgtgtctggttctctccccttcggagttccagcgtcaatcctggaatctaacgatctgggggaggtgcatcccctgaatgaaaatagtgaggctctcgagtgcaggcgccttagttcatttatcgtgaaggagaatgaacagcaaccagaccacacgaaccgcggaacaaccgagcctcttcagattagccaggtaagtctgatctcaaaggacaccgagcccgttgagctgaactgcaacttctccttctcacgcaagcggaaaatgagttgtaccatctgcggccataaatttccgcgtaaatcccaattgcttgaacacatgtatacccataagggcaaaagttataggtacaataggtgccagcgctttgggaacgcacttgcgcagcgttttcagccctactgcgatagttggagcgacgttagcctcaaatcttcgaggttgtcccaggaacacctagacctgccctgcgccctcgagagcgaactcacgcaggagaacgtcgatacaatcctggtggagtag

SEQ ID NO: 211750 - DNA, 1464 bp, synthetic construct
  misc_feature 1..1464: note = Description of Artificial Sequence: Synthetic coding sequence
  source 1..1464: mol_type = other DNA
atgagcctgccccccatccggctgcccagcccctacggcagcgacaggctggtacaattggcagccagactgcggccggcgctgtgcgacaccctgattactgtcggcagccaagagtttcctgcgcactccctggtgttggccggggtgtctcaacagctgggccgcaggggccagtgggccttgggcgaaggaatctcacctagcaccttcgcacagctcctgaacttcgtgtatggagaatctgtggagctgcagccaggtgagctgagacctctgcaagaagcagccagggccctcggggtgcagtcactagaggaggcatgttggcgcgcgagaggagaccgcgccaagaagcctgatcctggcctgaaaaaacatcaagaggagcctgaaaaaccttcccgcaacccggaaagggaattaggtgatcccggagaaaagcagaagcccgagcaagtctcaaggactggcggccgggaacaggaaatgttgcacaagcatagtcctcctcggggccgtccagagatggccggcgccacccaggaggctcagcaggagcagactagaagcaaggaaaaacgtctgcaggctcctgttgggcaacgaggagccgacggcaagcacggggtgctaacctggctgcgggaaaaccctggtggatctgaagaatccttgcgcaaactgcccgggcctctcccacctgcgggtagtctgcaaactagcgtgacacctaggccctcatgggccgaggctccttggttagtcggcggacagcctgccttgtggtccatcctgcttatgccgccaagatatggaatccccttctatcacagtacccctacaactggcgcatggcaggaagtgtggcgggagcaacgaattccgctgtctcttaacgcgcccaaaggactctggtcacagaaccagctggcaagctcatccccaactcccggctctctgccccagggacccgctcagctttccccaggagagatggaggaatcagatcaaggacacacaggcgcactcgcaacctgtgccggccatgaggacaaagctggctgtccacctaggcctcacccaccccccgcaccccctgcacgctcacgcccctacgcttgttcagtgtgtggtaaaagattcagcctgaaacaccagatggagacgcattatagggtgcacactggtgagaagccgttttcctgcagtctatgccctcaacgctcccgagatttcagtgctatgacaaaacacctcaggacccacggagctgcaccctacagatgctccctgtgcggcgcaggttgtccttccctggctagcatgcaggcacacatgaggggccacagcccctctcagttaccccccggatggactatccgcagtacctttctttactcttctagtagaccttccagaccctccaccagcccctgctgtccctctagctctacaacttag

SEQ ID NO: 211751 - DNA, 1464 bp, synthetic construct
  misc_feature 1..1464: note = Description of Artificial Sequence: Synthetic coding sequence
  source 1..1464: mol_type = other DNA
atgagcctgccccccatccggctgcccagcccctacggcagcgaccgcctcgtccagttggctgcgaggctacgacccgctctatgtgacacgcttattactgtgggttcgcaggaattccctgcccactcgctggtgcttgctggggtatcacagcagttaggacggaggggccaatgggctctgggcgaggggatctcaccaagcacatttgcacagctgctcaatttcgtgtatggcgaaagcgtggagcttcagcctggcgaattgaggccacttcaagaggccgcccgagcgctgggtgtgcagtcattagaagaagcttgctggcgcgcgaggggggacagggctaagaagccggatccaggcctgaagaaacatcaagaagagccagaaaagccttccaggaatccagagagggagctgggcgaccctggagagaagcagaagcctgaacaggttagccgcaccggcggccgcgagcaggagatgctgcacaagcacagccctcctcgagggaggcctgagatggcgggcgccacgcaggaggctcaacaggaacagacgcgctccaaggaaaaaagactgcaggcacccgtcggccagagaggcgccgacggtaagcatggtgtactgacttggctccgggagaatccaggggggtcagaggaaagcctgcgcaaactcccgggtccactacctcccgctggctccctacaaacatcggttaccccaaggccctcatgggcagaggcaccatggctggtgggcgggcagcctgctctctggtccatcctactgatgccacctagatacggtattcctttttaccactctacgccaactaccggagcctggcaggaggtgtggcgcgagcagcgcatcccactcagcctgaatgctcctaaaggattgtggagccaaaaccagcttgcgagctcttctcccacgcccgggagcctcccccagggccctgcccagttgagcccgggtgaaatggaagaatctgatcaggggcacacaggagcactcgctacgtgcgccgggcacgaagacaaagccgggtgtccaccaaggccccacccgcctccagccccaccagcaagatcaaggccgtacgcctgctccgtgtgcgggaagcgcttcagtcttaagcaccagatggaaactcactaccgggtgcacaccggagagaagcctttctcatgttctctgtgcccacaacggagccgcgatttctcagcgatgaccaagcatttgcgcacgcacggtgctgcaccctataggtgctcactctgtggagccgggtgcccgtctctcgcttctatgcaggcccacatgagggggcacagtccgagccagctcccacctggctggaccatcaggagcactttcctctattcaagcagcagaccaagcaggccaagtacttctccttgttgtcctagcagcagcactacatag

SEQ ID NO: 211752 - DNA, 2019 bp, synthetic construct
  misc_feature 1..2019: note = Description of Artificial Sequence: Synthetic coding sequence
  source 1..2019: mol_type = other DNA
atggagagccggaagctgatcagcgccaccgacatccagtacagcggctcactgctcaattccctgaatgagcaacggggtcacggattgttttgcgacgttacggtgatcgtcgaagaccgtaagttcagagctcacaagaatatattgtccgcatcttcaacctacttccaccagcttttctctgtagccggccaggtcgtggaattatcctttatccgcgctgaaattttcgcagagattttgaactacatttactcttccaagatcgtccgggtgagatccgacttgctggacgagctcatcaagtcaggccagctgctcggggtgaaattcatcgccgaactgggagtgcccttgagtcaggtgaagagtatctctggtacagcgcaggacggaaacactgagccacttcctccggacagcggcgataagaatcttgttattcagaagtctaaggacgaggcccaggacaatggcgctactatcatgccaataattaccgagtcgttctcattaagcgccgaagattatgaaatgaagaaaattattgtgaccgatagcgacgacgacgacgacgatgtaatcttctgctcagagattctaccaacgaaagagactctccccagcaacaacacagtggctcaggtgcagagcaacccaggaccagtcgccatatcagacgttgccccatcagcgagtaacaactcacccccccttaccaatataacccccacccagaaactaccaacacccgttaatcaagcgacccttagccagacacagggcagtgaaaaactcctcgtctcctctgcccctacacatttaacaccgaacatcatcctgctgaatcagacccctctgagcacacccccaaacgtgtcttcctctcttccgaaccatatgccatcatcaattaatttgctggtccagaaccagcagacacccaacagcgctatcctgacaggcaataaagctaatgaagaagaggaggaggagatcattgatgacgatgacgataccatatcctctagtccggattctgcagtatccaacacctctcttgtgccccaagccgatacaagccagaataccagcttcgacggctcattgatccagaaaatgcaaatcccaaccttgctgcaggaacccctctcgaacagcctgaagatttcagatatcattactcgtaatactaacgatcccggcgtcggtagtaagcacttgatggaagggcaaaagatcattacactcgacaccgctacggaaatcgagggcctgagcaccggctgcaaggtgtacgctaacatcggagaagacacctacgacatcgtgatccccgttaaggatgacccagatgagggcgaagcccgactcgagaacgaaattccgaaaacttccggctccgaaatggccaacaagcgaatgaaagtgaaacacgacgatcactatgagctgattgtggacggccgtgtttactatatatgtatcgtgtgcaagaggtcttacgtatgcctgacaagcctgcggcggcacttcaatatccactcatgggaaaagaagtatccttgtcggtactgtgaaaaagtattccccctcgccgaataccgtactaagcatgaaattcaccacactggcgagaggcggtaccagtgcctcgcttgtgggaagtcttttattaactaccaatttatgtccagccacataaagagtgtgcacagccaagacccgagcggcgattcgaaactttatcgcctccacccgtgtcgaagcctgcaaatcagacagtacgcatatctgagcgatcgtagctccacaatacccgcaatgaaggacgacgggatcggatacaaagtggacaccggcaaagaaccccccgtggggaccactactagtacacagaacaagccaatgacatgggaagacatttttatacaacaggaaaacgattctatcttcaagcaaaacgttactgacgggagcactgagttcgaatttattattcctgagtcttattag

SEQ ID NO: 211753 - DNA, 2019 bp, synthetic construct
  misc_feature 1..2019: note = Description of Artificial Sequence: Synthetic coding sequence
  source 1..2019: mol_type = other DNA
atggagagccggaagctgatcagcgccaccgacatccagtacagcggatcgctcctcaattccctgaacgagcagcgcggtcacggcttgttttgtgacgttaccgtgatcgtcgaagatcgaaagtttagggctcacaagaatatcctttcagcttcgagcacgtattttcaccagctcttcagtgtcgccgggcaggtggttgagctaagcttcattcgcgctgaaatcttcgctgagatcttaaattatatctactcaagcaaaattgtgcgggtgaggtcagacttgctggatgaattaatcaaaagtggccagctcttgggggtcaagttcattgcagagcttggcgtaccactctcccaggtcaaatcaatctccggcaccgcccaggacgggaataccgaaccgttgcctcctgattctggcgacaagaacttggtcattcagaagagtaaagatgaggcccaagataacggagccaccataatgcccatcatcacagagagtttcagcctgtcagccgaagattatgaaatgaaaaagatcattgtaacagatagcgacgacgacgacgatgacgtcatcttttgctctgaaatactaccaacaaaggaaaccctaccgtcaaataataccgtggcgcaggtccagtcaaatcctggtcctgttgccattagcgatgtcgcaccctccgcctccaacaacagccctcctctcacaaacattacaccaacacagaagctgccaacgcctgtaaatcaggctactctgagccagactcagggctcagaaaagctgttggtttcctcagcacccacccacttaacacctaatattattctgctgaaccagacacccttgtccaccccgccgaatgtgagctctagcctccccaaccatatgccgagcagcattaatctactggtgcagaatcagcaaacacctaactccgctatcctgactgggaataaggcaaatgaggaggaggaagaggaaattattgacgacgacgacgacacgatttcatctagcccggactctgccgtgtccaacacaagcctggttccacaagcagacacatcccagaatacaagttttgacggcagcctgattcagaaaatgcaaattcctacattgctccaggaacccctgtccaacagcctgaaaatttctgatataataactcgcaacactaacgacccaggagtcggctcaaaacacctgatggaggggcagaagattataacactcgacactgccacagagattgaaggactgtccacagggtgcaaggtatatgctaatatcggggaggatacctatgatatagtcattcccgtgaaggatgatcctgatgagggtgaggcaaggcttgagaatgagatccctaagacttccgggtccgagatggcaaataagagaatgaaggtcaaacatgatgaccattatgaactgattgtcgatggacgggtgtactacatctgtatagtctgtaaaaggtcctacgtatgcttgacaagcctgcgcaggcactttaatatacatagttgggagaaaaagtacccctgtaggtactgtgaaaaggtgtttcccctcgcggaatacaggaccaaacacgagattcaccacacgggggaacgtaggtaccagtgtcttgcctgtggtaaatcattcatcaactaccaatttatgtcttctcatatcaaatcagtgcacagccaggacccgtctggcgacagcaaactgtatcgtcttcatccctgccgtagcctccagatcaggcagtatgcttatctgtctgatcgctctagtaccatcccggcaatgaaggatgatggtattggttacaaagtagatacaggaaaggaaccgcctgtcggcacgacaacttccacacaaaataaacctatgacatgggaagatattttcattcagcaggagaatgatagcatcttcaagcagaatgttacagatggcagcacagagtttgagttcattatcccggagtcctattag

SEQ ID NO: 211754 - DNA, 2019 bp, synthetic construct
  misc_feature 1..2019: note = Description of Artificial Sequence: Synthetic coding sequence
  source 1..2019: mol_type = other DNA
atggagagccggaagctgatcagcgccaccgacatccagtacagcggatcactcctgaacagtcttaacgaacaacgaggccacggcctcttctgtgatgtcacagtcatcgtggaagacagaaagttccgcgcacataagaacatcttatccgcatctagcacatacttccaccagttgttctcagtggccggtcaggttgtggaactatcctttattcgggccgagatatttgctgaaatcttgaactacatctattctagcaagatcgtccgtgtgaggagtgatctgctcgacgagttgatcaagagcggccagttgctaggcgtgaagttcattgctgaattgggagtgcctctttcacaggttaagtcaatctccggtaccgcccaggatggtaacaccgaacccctaccccccgactcgggcgataaaaatctggtcatccagaaaagtaaggacgaagcacaggataatggagcaacgatcatgcccatcattacagagtcattctctctgagcgcggaggattatgagatgaaaaagattatcgtgacagatagcgacgatgatgacgacgacgtgatcttctgctcagaaattttacctaccaaggaaaccctcccttccaacaacaccgtagcccaggtgcagtctaacccaggcccagtggccatctctgacgtggcgccgagcgcctcaaacaacagtccccctctgactaatatcaccccaacacagaaacttccaacgcctgtgaaccaagctactttgtcccagacccaaggcagtgaaaagttgctagtgtctagcgcgcccacccacctaacgcccaacattatactgctgaaccagacccctttgagtacaccccccaatgtctcttcaagcctgccaaaccatatgcctagctcaataaacctgcttgtgcagaaccaacagaccccaaatagtgctattctaactggtaacaaggctaatgaggaagaggaggaagaaattatcgatgacgacgatgacacaatatcatcttctcccgattccgccgtcagtaataccagcctcgtgccccaggccgacacctcacagaatacttcttttgatggcagcctgattcagaagatgcagatccctaccttactgcaggagcccctgagcaacagtttaaagataagcgatatcataacacgcaacacaaacgaccctggcgtaggaagcaagcacctcatggagggccagaagattattacactggataccgcaactgaaattgaaggcctcagtacaggctgcaaggtgtatgcaaatattggagaagacacgtatgatatagtcatacccgttaaagacgacccagacgagggagaggccaggcttgaaaatgaaatcccgaaaacctcaggaagtgaaatggccaataaacggatgaaggtaaaacatgatgaccactacgagcttattgtggacggccgcgtgtattatatctgcattgtgtgcaaaaggagctacgtgtgcctgaccagcttgcgtagacacttcaacatccacagttgggagaaaaagtacccctgccgttattgtgagaaggtgttccccctggccgaataccggaccaagcacgagattcaccacaccggggaacgaaggtatcagtgcctggcttgtggcaagtcctttatcaactaccagttcatgagcagccacataaagtccgtgcactcccaggacccttccggggatagtaagttgtaccgacttcacccttgcaggtcgctgcagatacgtcagtacgcctatctgagcgaccggtcgagtaccatcccagcaatgaaggacgacggcatcggctacaaagtggacacaggaaaagaacctcctgtaggcacaactactagcacccaaaacaagcccatgacctgggaagacatctttattcagcaggagaacgattctatcttcaagcagaatgtcacagatgggtccacggagtttgagttcatcattccagagtcctattag

SEQ ID NO: 211755 - DNA, 1515 bp, synthetic construct
  misc_feature 1..1515: note = Description of Artificial Sequence: Synthetic coding sequence
  source 1..1515: mol_type = other DNA
atgagcgtggagatggacagcagcagcttcatccagttcgacgtgccagagtacagcagtaccgtcctgagccagctcaacgaattgcgtcttcaagggaagctgtgcgacatcatcgtgcacattcagggacagcctttccgagcccacaaggccgttttggccgcttccagcccatacttcagagatcacagcgcactttccacaatgagcggactcagtatatctgttataaagaatccaaatgtattcgagcagttactgagcttttgctataccggtcgcatgagtctacagctcaaggatgtggtgagctttctcacagctgcctcctttctgcagatgcaatgcgtgatcgacaagtgtacccagatcttggaatcaatccactccaagatcagtgtgggggatgtggacagtgtgacagttggagcagaggaaaaccccgagagtagaaacggcgtgaaggatagctcgttttttgccaacccagtcgagatcagccctccttattgtagtcagggccggcagccaaccgcttccagtgatttaaggatggaaaccacgccttctaaagccctacgctctcgtctacaggaggagggacattccgatcgcggatcaagcggctcagtgtccgaatatgaaattcaaatcgagggggatcacgaacagggcgatctgctggttagagagagccagattactgaggtgaaggtcaaaatggaaaagagcgacagacccagctgctccgacagctcgagtctgggagatgacgggtatcacacagagatggtggatggggagcaggtggtagccgtcaacgtcggcagctacggcagcgtattgcaacacgcctattcatacagtcaagcagcatctcagcccactaatgttagcgaggcttttggcagcctgtctaacagtagccctagtagatccatgttatcctgttttagggggggccgggccaggcagaaaagggccctgtcggttcacctgcatagcgacctgcaagggcttgtgcagggctccgacagcgaggccatgatgaacaaccctggatacgagtccagccctcgcgaacgatctgccaggggccattggtatccgtacaacgagagactaatctgtatatattgcgggaagtcttttaaccagaaaggctccttggaccgccacatgcggctgcatatggggattacaccattcgtctgtaaattctgcggtaagaaatacactagaaaagatcagttagaataccacatcagggggcacacagatgacaagcctttcagatgcgagatttgcgggaagtgcttcccttttcagggcaccctgaatcagcacctgcggaagaatcaccccggagtggctgaagttaggagtcgcatcgagagcccagagagaactgatgtctatgtggagcagaagctggagaatgatgcttctgcttcggagatgggacttgatagcaggatggaaattcatacggtttcagatgccccggattag

SEQ ID NO: 211756 - DNA, 1503 bp, synthetic construct
  misc_feature 1..1503: note = Description of Artificial Sequence: Synthetic coding sequence
  source 1..1503: mol_type = other DNA
atggacagcagcagcttcatccagttcgacgtgcccgagtacagctctactgtgctgtctcagctcaatgaactgcgcctccaggggaaactctgcgacataatcgtgcacattcagggacagcctttccgcgcccataaagccgtcctcgcagctagtagtccctacttccgggaccactcggctctgagcaccatgtcgggactcagcatctctgttatcaagaatcccaatgtgttcgagcagctgctgtcattttgctacactggacgaatgagcctccagctgaaagatgtggtgtcttttttaaccgccgcctccttcctccagatgcagtgtgtgatcgataagtgcactcagatactggagagtatccatagcaaaatcagcgtcggggacgtggacagtgtcaccgtcggtgccgaggaaaaccccgaatccaggaacggtgtcaaagactcttccttcttcgcaaaccctgtggagatctcgcccccgtattgttcccaggggcgacagcctactgccagcagtgacctacgcatggaaaccacaccatcaaaagctttgcgctccagactccaggaggaagggcactcagacaggggctccagtgggagcgtcagcgaatatgagattcagattgagggtgatcatgagcagggagatctactggtacgcgaatctcagatcaccgaggtgaaggtgaagatggaaaagtccgacagaccttcttgtagtgattcttcaagcctcggtgacgacggctatcatactgaaatggtggatggcgaacaggtggtggccgtgaatgtgggctcttatggaagcgtgctgcagcacgcatattcgtacagtcaggctgcctcacagcccacgaatgtgtcagaggcctttggctcactttccaactcctctccatctcgcagcatgctgtcatgtttccggggaggccgcgcacgacaaaaaagggctctgagtgtgcatctgcactctgaccttcagggactagtgcaggggtcagactcagaagcaatgatgaataatcctggatacgaatctagtcctagggagcgctctgcccgcggccattggtacccgtataatgagcggctgatttgtatatactgcggcaaatcatttaaccagaaaggctccttagacaggcatatgcgattacacatgggaattactcccttcgtgtgtaagttttgcgggaagaaatacaccagaaaggaccagttagaataccatattcgtgggcatacagatgacaaacctttcaggtgcgaaatatgtggaaagtgcttcccattccaaggcactttgaatcagcacctgaggaagaatcaccccggggtggccgaggtgaggtcacggatcgagagtcctgagcgaaccgacgtgtatgtggagcagaaactcgaaaacgatgcaagtgcctctgaaatgggtcttgactctcgtatggaaatccatacagtgtcagacgctcctgactag

SEQ ID NO: 211757 - DNA, 3591 bp, synthetic construct
  misc_feature 1..3591: note = Description of Artificial Sequence: Synthetic coding sequence
  source 1..3591: mol_type = other DNA
atgatgaccgtgatgagcctgagccgggacctgaaggacgacttccactctgatactgttctgtccattcttaatgaacaaaggatcagaggtatcctctgtgacgtgaccattatcgtggaggacacaaaattcaaggctcactcaaatgtgctggccgctagtagtctttatttcaagaatatcttctggagccacactatttgcatcagcagtcacgtgttagagctggacgatctgaaggccgaggtgttcaccgagattttaaactacatctattcaagcacagttgtcgtaaaacgacaggagactgttaccgatctggccgcggctggcaaaaagctggggatatcctttttggaggacctgactgacagaaacttctctaactcacccgggccgtacgtcttttgcattacggagaagggcgtcgtgaaggaagagaaaaacgagaaacgacatgaagaaccagcaatcactaacgggcccaggataacgaatgcattcagcataattgagaccgagaattccaataacatgttttccccactcgatctacgggcgtcctttaagaaagtgagcgactcaatgcgaactgcctctttatgcctagagcgcaccgacgtctgccacgaagctgagccagtgaggaccctggcagagcattcttatgcagtgagtagtgtggcagaggcgtaccggagccagcccgtgcgcgagcacgatgggtccagccctgggaacacaggaaaggagaattgcgaggctctggcggctaaacccaaaacttgccgcaagcctaagacgttctccatcccccaagattccgattccgcgactgagaacatccctccccctcccgtcagtaatctggaggtcaatcaggaaaggagcccacaacccgccgctgtgttaacaaggagtaagagccctaataacgagggtgatgttcatttttcacgagaggatgagaaccaaagcagcgatgtcccaggcccccctgccgccgaagttcctcctctagtctataattgttcctgctgttctaaggcgttcgactcttccaccctactcagcgcccacatgcagttgcacaaaccaacacaagagccgttggtctgcaaatactgcaataaacagtttacaactctcaacaggctagatcggcacgagcagatttgtatgcgatccagtcatatgcctatacctggagggaatcaaagatttctagagaattatcctacaataggtcagaacgggggatcattcacaggccccgagccactgctgtctgagaatcggatcggagaattctcttctaccggcagcacactgccagatacagaccacatggtgaagtttgtgaatggccagatgctctatagctgtgtggtttgtaaaaggtcatacgtcacactgagttcactcagacgccacgctaatgtgcactcctggaggaggacctatccatgtcattactgcaataaagtttttgccttggctgagtaccgaacccggcacgagatctggcataccggagagaggagatatcagtgcatcttctgcttagaaaccttcatgacttattatattttaaagaaccaccagaaatcatttcacgcaatcgaccaccggttaagtatttctaaaaaaacggctaatggaggcctcaaaccttcagtgtacccttacaagctgtatagattgttgccgatgaaatgtaagagggctccttataaatcttacaggaatagctcatatgagaatgccagagaaaacagccagatgaatgagtcggctcccggcacctatgtggtacagaacccccacagctcggaactgccaactctgaattttcaggatacagtcaatactctgactaatagccccgctatcccactggagacatctgcctgtcaggacattccaacaagcgcgaatgtgcagaatgccgaaggaacaaagtggggcgaggaggccctgaagatggatctagataataacttctactcaacagaggtgtcagtctcctctactgagaatgcagtgtcctctgaccttcgggccggagacgttcccgttctctctttatctaatagcagcgagaacgcagcatctgttatatcgtacagtgggagcgcacctagcgtcatcgtccatagcagtcaatttagcagcgtgatcatgcatagtaacgcgatcgctgcaatgaccagtagcaaccaccgagccttcagcgacccagcggtgtcccagtctctaaaggacgattcaaaacccgagccggacaaggttgggaggtttgcttcacgccctaagagtatcaaagagaaaaaaaaaaccacgtctcatactagaggggaaatccctgaagaaagtaattatgtcgccgatcccggcggctctctcagtaaaacaaccaacattgcagaggaaactagcaagatcgaaacatatattgcgaaaccagcccttcctggtacaagcacaaatagcaatgtcgctcctctatgtcagattactgttaaaatcggcaacgaggccatcgtcaagcgacacattctcggctcaaagctgttttacaagaggggcagaagacctaaatatcagatgcaggaagaaccactgccgcagggaaatgaccctgagccctccggggactcgcccttaggtctatgccaaagcgaatgtatggagatgtccgaggtgttcgacgatgcaagcgaccaagatagtaccgataaaccatggagaccttattacaattacaagcccaaaaaaaagagtcgccagctgaaaaaaatgagaaaagtcaattggcggaaggagcacggcaaccggtccccgtcacacaaatgcaaatatcccgccgagcttgattgcgctgtgggaaaagccccacaggataagccctttgaagaagaagagacaaaagagatgccaaagctccaatgcgagctgtgcgacggcgataaagcagtaggcgcaggtaatcaggggcgcccccatagacacctaacctctcgcccctacgcgtgtgagctgtgcgccaagcagttccaatccccatccaccttgaagatgcatatgcgctgccacacgggagaaaagccatatcaatgtaagacatgcgggcgctgtttcagcgttcaggggaatctccagaagcacgagagaatccacctcgggctgaaggaatttgtttgtcaatattgcaacaaagcatttaccttgaacgaaactctgaagatacatgagagaatccacaccggagaaaaaaggtaccattgtcagttctgttttcaacgcttcctgtatctgtcaacaaagaggaatcatgagcaacggcacatacgcgaacacaacgggaagggctacgcttgcttccagtgccccaagatttgcaaaaccgccgccgccctggggatgcaccagaagaagcatctgtttaaatctcccagccagcaggaaaaaattggcgatgtctgccatgagaactctaaccccctcgagaaccagcatttcatcggcagcgaagataatgaccagaaggacaacattcagaccggcgttgaaaatgtcgtcctctag

SEQ ID NO: 211758 - DNA, 3588 bp, synthetic construct
  misc_feature 1..3588: note = Description of Artificial Sequence: Synthetic coding sequence
  source 1..3588: mol_type = other DNA
atgaccgtgatgagcctgagccgggacctgaaggacgacttccacagtgacactgtgcttagcattctgaatgagcagcgtatacgcggtattctctgtgacgtcaccataatcgtagaggacacaaaatttaaggcccacagcaatgtcttggcagcatcctccctgtacttcaagaacatattctggtcccacaccatttgtatcagcagccacgttctggagctggacgatttaaaggccgaagtgtttactgaaatcctgaactatatttacagctccactgtggtggtgaaaagacaggagacggtcaccgacctggctgccgccgggaagaagttggggatttcatttctggaggacctgacagacaggaacttctcaaactcaccaggaccctatgtgttctgtatcacagaaaagggggtcgtaaaggaagaaaagaacgaaaagcgacacgaagagcccgcgatcactaacggtccccggatcaccaacgctttctctattattgagacagaaaattcaaacaacatgttctcgcctctggacttgcgcgcttctttcaagaaggtctccgactcaatgagaaccgcgtccttgtgccttgagagaaccgatgtgtgtcacgaagccgagcctgttcgaactcttgccgagcacagttatgcagtttctagcgtcgccgaagcataccggagccagcccgtacgggagcacgatggctcgagcccaggcaacactggaaaggagaactgcgaggccctcgctgcgaaaccaaagacctgccggaagcccaagacgttttccatccctcaggacagcgacagtgccacagagaatatcccacctcctcccgtaagcaatttagaagtcaatcaagagagatctccccagccagccgccgtcctgacccgttcaaagtcccccaataacgaaggtgacgtgcatttctctcgcgaggatgaaaatcagagttcagatgtgccaggaccccctgccgccgaggtgccacccctcgtgtacaactgttcctgctgcagtaaggccttcgactctagcacactgctgtcagctcacatgcagttacacaagcccacccaagagccgctggtgtgcaagtattgcaataagcagttcacgacactcaaccggctggatagacacgagcagatctgtatgcgttcttcccacatgcccatccccggaggaaatcagaggttcctggaaaactatccaaccatcggccaaaacggaggctcctttactggcccggagccactgcttagcgagaatcggatcggtgagttttcttccacgggcagcacactgcctgatacagaccacatggtcaagttcgtgaacggtcagatgctatatagttgcgtagtgtgtaaacgttcatacgtgacactttcttcgctgcgtaggcacgccaacgtgcattcatggcgtcgaacgtatccgtgtcactattgcaataaagtgttcgctttagccgagtaccgtactcggcacgagatctggcacacaggagaaagaaggtaccagtgcatcttctgtttggaaacctttatgacctactatatcttgaagaatcaccagaagtcattccacgctatcgatcacaggctgagcatctccaaaaagactgccaatggagggcttaagcccagcgtgtacccatataaactctaccgcctcctgcctatgaagtgtaaaagagccccatataagtcttaccgtaatagcagttacgagaatgcccgagaaaattcacagatgaacgaatctgcaccaggcacatatgttgtccaaaatcctcacagctcggaattaccaaccctgaattttcaggataccgtgaacacgcttacaaactccccagctattccgctggaaacctccgcctgtcaggatattcccacatccgctaacgttcagaatgcagagggcactaaatggggtgaggaggcgcttaaaatggatctggataacaacttctatagcacggaggtgtctgtgtcgtctactgaaaacgctgtgagttcagacctgagagccggcgatgtacctgtcctgtctttgtccaacagttctgagaacgcggccagcgttatatcatactcaggatcggctccctcagtgattgtgcactcctcccaatttagtagcgtcattatgcactctaatgccattgccgccatgacatctagcaaccatagagctttctcagatcccgctgtcagtcagtctctgaaagatgattccaagccagaacctgacaaagtcggcagatttgccagccgaccaaagtcaatcaaggagaagaaaaaaacgactagccacacacggggagaaatcccagaagagagtaattatgtcgctgatcctggcggcagtctgtccaagaccacaaatatagccgaggagacgagtaagattgagacatatatcgcaaaaccagctctgccagggaccagcacgaattctaatgtggcacctctttgtcagataactgtgaaaataggaaacgaagccatagtgaaaagacacattctcggttccaaactgttctataagcgaggcagaaggcccaagtaccagatgcaggaggagcctctcccccagggaaacgatcccgaaccgagcggggatagccccctcggtctgtgccaatccgagtgcatggagatgtcagaggtatttgacgatgccagtgatcaggattcaaccgacaagccctggaggccgtactacaactacaagcccaaaaagaagagccgccagctcaagaaaatgaggaaggtcaattggagaaaggagcacggtaaccgcagtccgtcacataagtgtaaatatcctgcagagctcgattgtgccgttggaaaggctcctcaggacaaaccatttgaagaagaagagaccaaagagatgcccaaactgcaatgtgagctgtgcgatggggacaaggcggtgggcgccgggaaccagggcagaccacaccgccatctgacatctcggccgtatgcctgcgaactgtgcgctaagcagttccagtctcccagcacactgaagatgcatatgagatgccacacaggggagaaaccataccagtgcaaaacgtgcgggagatgctttagtgtccagggcaatcttcagaaacatgagaggattcatctgggcttaaaagaattcgtatgccagtactgcaacaaagcctttactctaaatgagacactcaaaatccacgagagaatccatacaggggagaaaaggtatcattgtcagttctgctttcagcgatttctgtatctgtctaccaaaaggaatcacgaacagcgacatatccgggaacacaacggaaagggatacgcttgcttccaatgcccgaagatctgcaagaccgccgccgcgttaggaatgcaccaaaagaaacacctgttcaaatccccatctcagcaggagaagattggcgacgtttgtcacgagaattcaaatcccttggagaaccagcattttatagggtctgaggacaatgatcagaaagataatatccagaccggagttgagaatgtggtgctttag

SEQ ID NO: 211759 - DNA, 105 bp, synthetic construct
  misc_feature 1..105: note = Description of Artificial Sequence: Synthetic coding sequence
  source 1..105: mol_type = other DNA
atgaccgtgatgagcctgagccgggacctgaaggacgacttccactcagacacagtcctctcaatcctgaatgaacagaggattcgggggatcctgtgcgattag

SEQ ID NO: 211760 - DNA, 285 bp, synthetic construct
  misc_feature 1..285: note = Description of Artificial Sequence: Synthetic coding sequence
  source 1..285: mol_type = other DNA
atgaccgtgatgagcctgagccgggacctgaaggacgacttccactcagacacggtcttaagtattctgaatgaacagagaattcgggggatactgtgcgatgtgaccattattgttgaagatactaagtttaaggcacactccaacgttcttgccgccagcagtctgtacttcaaaaacatcttctggagtcatacgatttgcatcagcagccacgtgttggaactggatgacttgaaggcagaagttttcacagagattcttaactacatctactcaagctag

SEQ ID NO: 211761 - DNA, 357 bp, synthetic construct
  misc_feature 1..357: note = Description of Artificial Sequence: Synthetic coding sequence
  source 1..357: mol_type = other DNA
atgaccgtgatgagcctgagccgggacctgaaggacgacttccactcagacaccgtgttatctattctaaatgaacagaggatcagaggaatcctctgtgacgtcacaattatcgtggaagacactaagttcaaggctcatagtaacgttctcgctgcttccagcctctatttcaagaacattttttggtcccacactatttgcatcagctctcacgtcctcgaactggacgacctgaaggcagaagtgttcacagaaatcctgaattacatatattcctcaacggtggtcgttaagcggcaagagacagtaaccgacctggccgctgccggcaagaagttggggatcagcttttag

SEQ ID NO: 211762 - DNA, 336 bp, synthetic construct
  misc_feature 1..336: note = Description of Artificial Sequence: Synthetic coding sequence
  source 1..336: mol_type = other DNA
atgaccgtgatgagcctgagccgggacctgaaggacgacttccacagtgacacagtactctcaatcttgaatgaacagaggatacgcggtattctgtgcgacgttaccatcattgttgaagataccaaattcaaggctcatagtaatgtcctcgccgcaagcagtctctatttcaagaatattttctggagtcatacaatttgcattagttcccacgtcttggaattagacgacctgaaggccgaggtgtttacggagatcctgaactacatatacagctccactgtggtggttaagaggcaggagactgtgactgatctggcggccgcgggctag

SEQ ID NO: 211763 - DNA, 453 bp, synthetic construct
  misc_feature 1..453: note = Description of Artificial Sequence: Synthetic coding sequence
  source 1..453: mol_type = other DNA
atgaccgtgatgagcctgagccgggacctgaaggacgacttccactctgacacggtgctgtctatcctgaatgagcagagaatcagggggattctctgcgacgtgactatcatcgtcgaagatactaaatttaaggcccacagcaacgtgctggcagccagcagcctctatttcaagaacattttctggtcacacactatatgcatttcgagccacgttcttgagctggacgacctcaaagccgaggtgtttaccgagatcctgaactacatttactcctccacagtggtggtgaagcggcaagagaccgtgactgacctggcagctgctggaaagaaactcgggataagcttcctcgaggaccttacagatcgaaacttcagtaattcaccgggaccatacgttttttgcattacggagaaaggagtggtaaaggaagagaaaaatgagtag

SEQ ID NO: 211764 - DNA, 2316 bp, synthetic construct
  misc_feature 1..2316: note = Description of Artificial Sequence: Synthetic coding sequence
  source 1..2316: mol_type = other DNA
atgaccgtgatgagcctgagccgggacctgaaggacgacttccacagcgacacagtactaagcatcctgaacgagcagcgcattcgaggcattttgtgtgatgtcactattatagtcgaagatacaaagtttaaggctcattccaacgtcctggcggcctccagcctgtattttaaaaatattttctggagtcacacaatctgcattagctcccacgtgctcgagttggacgatttgaaggcagaggtgttcaccgagattctgaattacatatattcctccacggtggttgtgaagcgacaggagacagttacagacctggccgcagcaggtaagaaattgggcatctctttcctggaagacttgaccgatcggaacttctcaaatagtccaggaccatatgtgttttgcattacggagaagggggtcgtgaaagaagagaaaaatgagaaacgtcacgaggaacctgccataacaaatggcccccgaattacaaatgctttttcaataattgagaccgaaaactctaacaacatgttctcacctcttgaccttcgggcaagttttaaaaaagttagcgactccatgaggaccgcttctctttgcctagagaggactgacgtgtgtcacgaagccgagccggtgagaacacttgcggaacactcgtacgctgtaagcagcgtggctgaagcctacagaagtcagcccgtacgcgaacacgacggaagctctccaggtaacaccggtaaggagaactgtgaggctctcgctgctaagcctaaaacatgtagaaaacccaagactttctctatcccccaggactccgactcggccactgaaaatataccacccccgcccgtctccaacctggaagttaaccaggaacggagtccgcagcctgccgcagttctaacacggtcaaagtcaccaaacaacgagggagatgtgcatttctcacgcgaagacgaaaaccagtcatctgatgtgccgggtccgccagccgcggaagtgccaccacttgtgtacaattgtagctgctgttcaaaggcttttgactcatctactctcctcagcgctcatatgcagctccacaaacccacgcaggaaccgctcgtgtgtaaatactgcaacaagcagtttaccacactgaacaggctggatcggcacgagcagatttgcatgcgctctagccatatgcccatacccggcggtaaccagaggttcctagagaactaccccaccataggccagaatggtggatctttcaccgggcccgaacctcttttatccgagaatagaataggcgagttctccagtacgggttctactctcccggatacagatcatatggttaagttcgtcaacgggcaaatgctctattcctgcgtcgtgtgtaaacggtcttacgtgactctcagcagtttgcgtagacacgcaaacgtgcacagctggagaaggacttacccttgtcattattgtaacaaggtgtttgcactggcggagtaccgaacccgccacgaaatctggcacacgggcgaacggcgatatcaatgcatattttgtctggaaacattcatgacctactacattctaaagaaccaccagaagagctttcacgccatcgaccacagactgagtatttcaaaaaaaactgccaacgggggcctgaaaccctctgtctacccctacaaactttaccgtcttctgccaatgaagtgtaaaagggccccttacaagagctaccgcaacagcagctatgaaaatgcacgggaaaacagtcaaatgaacgagtccgctcctggaacctacgtggtgcaaaatcctcatagcagtgagctgcctacactcaacttccaagacacagttaacacactcactaattcaccggccataccccttgagacatccgcctgtcaggacatccctacttcagctaatgtccagaacgcggagggcaccaaatggggggaggaagcactgaagatggatttggacaataacttctacagcactgaggtctctgtttcctccaccgaaaacgccgtgagtagtgacctgcgcgcaggagacgtccccgtgctgagtctgtctaactcgtccgagaatgcagcttcagtgatctcctactctggctccgctccaagcgtcattgttcattcgtctcaattcagttctgttattatgcactccaacgccatcgcggccatgacatcgtccaatcacagagcattctccgaccctgcagtgtcacagtctctaaaggatgactctaaacctgaacccgacaaggtcggcaggttcgcaagccgcccgtag

SEQ ID NO: 211765 - DNA, 441 bp, synthetic construct
  misc_feature 1..441: note = Description of Artificial Sequence: Synthetic coding sequence
  source 1..441: mol_type = other DNA
atgaccgtgatgagcctgagccgggacctgaaggacgacttccactctgacacggtgctcagcatcctgaacgagcagaggataaggggcatactgtgtgacgttactataatcgtggaagataccaagttcaaagcacacagtaacgtgcttgccgctagtagtctatattttaaaaatatcttctggtctcataccatttgcatctcctcccatgttttggagttagacgatctcaaggccgaggtgtttactgaaatcctcaactatatttacagcagcaccgtggtggttaaacggcaggagacagtgacagacctcgcggcagccggcaagaaactgggtataagttttctggaggatctgacagacagaaacttctccaatagtccagggccctacgttttctgcattaccgagaaaggcgttgtgaaggaatag

SEQ ID NO: 211766 - DNA, 633 bp, synthetic construct
  misc_feature 1..633: note = Description of Artificial Sequence: Synthetic coding sequence
  source 1..633: mol_type = other DNA
atgaccgtgatgagcctgagccgggacctgaaggacgacttccacagtgacactgtgctcagcatacttaacgagcagaggattagggggatactttgtgacgtgacaatcatagttgaggatacaaaattcaaagcacacagtaacgtcctggcggcctcatccctttatttcaagaacatattctggagtcacaccatctgtattagtagccatgtgcttgagctggacgatcttaaggcagaggtattcactgagatcctgaactacatttactctagcacagtcgtggtaaagagacaagaaacagtcacagacctggctgccgccggtaaaaagttggggattagctttctagaagacctgacggataggaactttagcaactcaccaggaccatatgtgttttgtatcacggagaagggcgtggtaaaggaagagaagaacgaaaaaaggcacgaggagcccgcgattacgaatggaccaagaatcacaaacgcgttcagcatcatcgaaaccgaaaactctaacaacatgttttcaccacttgatctgagagccagcttcaagaaggtaagcgacagcatgcggacggcgagcctgtgcttggaaaggaccgatgtatgccattag

SEQ ID NO: 211767 - DNA, 327 bp, synthetic construct
  misc_feature 1..327: note = Description of Artificial Sequence: Synthetic coding sequence
  source 1..327: mol_type = other DNA
atgaccgtgatgagcctgagccgggacctgaaggacgacttccactctgatacagtcctctctatcctgaatgagcagcgcattcgggggatcctctgcgatgtaacaataatcgtagaagataccaagtttaaggcccactctaatgtgctggccgcctccagcctgtattttaaaaacatattctggagccacactatctgtatctcatctcacgtgttggagctcgacgatctcaaggctgaagtgtttacagagatactcaattacatttactcttccacagtggttgtgaaacgccaggaaacagtgacagatctcgcctag

SEQ ID NO: 211768 - DNA, 213 bp, synthetic construct
  misc_feature 1..213: note = Description of Artificial Sequence: Synthetic coding sequence
  source 1..213: mol_type = other DNA
atgaccgtgatgagcctgagccgggacctgaaggacgacttccactcagatacagtgctcagtattcttaacgaacagcgcattagaggaattctgtgtgacgtaaccatcatagttgaggatactaaatttaaagcccatagtaatgttcttgccgccagcagcttgtatttcaagaacattttctggagtcatacgatttgcatcagctag

SEQ ID NO: 211769 - DNA, 3588 bp, synthetic construct
  misc_feature 1..3588: note = Description of Artificial Sequence: Synthetic coding sequence
  source 1..3588: mol_type = other DNA
atgaccgtgatgagcctgagccgggacctgaaggacgacttccactctgacaccgtacttagcatcctgaatgagcaaagaattaggggtatcctttgcgatgttactatcattgtggaggataccaagtttaaagcacacagcaacgtcctcgctgcatcctctctgtactttaagaatatcttttggagtcacaccatctgtattagctcccatgtgcttgagctcgacgacctgaaggcggaggtgtttaccgaaattctaaattacatctactccagtacagtcgtggttaagagacaggagaccgtgacagaccttgccgctgccggcaaaaaactgggaatcagtttcctggaagatctaacagatcgaaacttctccaactctcccggaccctatgtcttctgtattacagagaaaggggtggtgaaggaggaaaaaaatgaaaaacggcatgaggaacccgccattacaaacggaccaaggatcaccaatgccttctccataatcgagactgaaaattcaaataacatgttctcccccctagacctgagggcaagttttaagaaagtgtccgactcaatgcgtaccgccagcctgtgtctcgagcgcacagatgtctgccatgaggctgagcccgtcaggactctcgccgagcacagctacgccgtctccagcgtcgccgaggcctaccgatcacagcccgtccgcgagcatgacggcagctcacctggtaatactggtaaggagaactgtgaggcgctggcagctaaacccaagacttgtcggaagccaaaaaccttctccattccacaggactcagactccgctacagagaacatcccaccccctccagtgtccaatctggaagtcaaccaggaaaggtctccgcaaccagctgccgtgctgaccagatctaaaagcccaaacaacgagggcgacgtgcatttttctcgcgaagatgagaaccaatcttccgatgtcccaggcccacctgccgctgaagtcccacctctggtttataactgtagttgctgttcaaaggcatttgactcgagtacactgctgtccgcacacatgcagctgcataaacccacccaggagcctctcgtctgtaagtactgcaacaagcagttcaccactctgaacagattggaccgtcatgaacagatttgcatgcgctcttcacatatgcccattccgggaggcaatcagcgcttccttgaaaattatccgacaattggtcagaacggtggctcctttactggccctgaacccctcctgtcggaaaacagaattggcgaattctcatcaacaggctctaccctcccagacactgatcacatggtgaagtttgtcaatggccagatgctgtacagctgcgtggtatgtaaaaggtcctatgtcactctatcatccctgaggcgccatgcgaatgtccattcctggcgcagaacctatccctgccattattgcaacaaagtgtttgccctcgctgagtatagaaccagacacgaaatttggcatacaggggagcgacgttaccagtgtatattctgtttagagacttttatgacctattatattctaaagaaccaccagaagtccttccacgccatcgaccatcggctaagtattagcaaaaagaccgctaacggtggtctcaaacccagcgtgtacccctataagctatatagattactgccaatgaaatgcaagcgggcgccctacaaaagctatagaaattcctcgtatgagaatgctcgcgagaattctcagatgaatgaatcagccccaggaacttacgttgtccagaatccacattcttcagagctcccaactttaaattttcaagacacggttaatactcttacaaactcaccggcgatcccgctggagacctccgcatgtcaagacattccaacaagcgccaacgtgcagaacgctgaaggaactaagtggggtgaagaagctctcaagatggatctggacaataacttttactctactgaagtcagcgtgagctcaaccgagaacgccgtgtcttctgatcttagagctggtgacgtcccagtactaagcctaagcaactcctccgagaacgccgcttcggtgattagctacagcggttcggccccatcagtgattgtccattccagtcagttttcctctgtgatcatgcactccaatgctattgctgcaatgacctcaagtaaccaccgtgcgttctctgatcccgccgtttcacagtctcttaaggacgatagcaagcctgagccggacaaggtaggacggttcgcatcccgcccaaagagcattaaggaaaaaaaaaagaccacttctcatactagaggggagatccccgaggagagcaactacgtggctgaccccggcggttctctgagtaagactacaaacatcgccgaggaaacgtccaaaatcgagacgtacattgctaagccagccttgccaggcacctctacaaacagtaatgtggcacccctctgtcaaatcacagtgaagatcggtaacgaagctatcgtgaaacgccatattttggggtctaaacttttttacaaacgaggtcgccggcccaagtaccagatgcaagaggaaccgctgccacagggcaacgatccagagcctagcggcgattctccacttgggctgtgccagagcgagtgcatggagatgtccgaagtgtttgatgacgcttctgatcaggacagtactgacaaaccttggcgaccatactataactacaagccaaagaagaagtcaagacagctgaagaaaatgcgaaaagtgaattggcggaaagagcatggcaacaggagccctagccacaagtgtaaatacccggccgaactggactgcgcagttggtaaggctccacaagataagccatttgaagaggaggaaacaaaagagatgccaaagcttcagtgtgagctatgcgacggggacaaagcagtgggggcggggaaccaggggaggcctcataggcatctcactagtcgaccctacgcctgtgagctgtgcgctaagcagttccagagcccatcaactctgaaaatgcacatgcggtgccacacgggcgagaaaccttaccagtgcaaaacatgtggcaggtgtttctctgtccagggaaatctccagaaacacgaacggattcaccttgggctgaaggagtttgtgtgtcagtattgcaataaagccttcactctcaatgagaccttaaaaatacatgaacgcattcacacaggcgagaaaaggtaccattgccagttctgctttcagagatttctctacctctcgaccaagagaaatcacgaacagcgccacatccgggagcacaacggcaagggctatgcttgctttcaatgtccgaagatctgtaagacggccgcggccctgggtatgcatcagaagaagcatttgttcaagtccccctcacagcaggagaaaattggagatgtctgccatgagaacagcaatccccttgaaaaccagcatttcatcggcagtgaggacaatgaccaaaaggacaatatccaaactggtgtggagaatgtggtcctttag

SEQ ID NO: 211770 - DNA, 3042 bp, synthetic construct
  misc_feature 1..3042: note = Description of Artificial Sequence: Synthetic coding sequence
  source 1..3042: mol_type = other DNA
atgcccccccccgccgaggtgaccgaccccagccacgcccccgccgtgttgagacaactaaacgagcagaggttacgagggctattctgcgacgtgaccttaattgcgggagacacaaagttccctgcccatcgaagcgtgctggcggcatcatctccattctttcgcgaggccctgctcacttccgcacccctgccgctgcctcccgcaactgggggggcggcacccaatcccgccaccacgactgcggcttcttctagttcctcttcaagcagcagtagctcttcctcatcctcttccgctagttcttcctcatcatcatcgtcatcaagccctcccccagccagccccccagcctcctccccaccacgcgtgttagaactgcctggcgtcccagcagccgctttcagcgatgtattgaacttcatctactcagccaggcttgcactgcccggaggaggtggagacggggctgctgtggccgaaatcggcgccctggggaggaggcttggcatctcccggcttcagggccttggtgagggcggagacgcctgggtcccccctacacctgcccccatggcgacctcccaacccgaggaagattcatttggccctggaccacgacccgccggtgaatgggaaggcgaccgcgccgaggcgcaggcccctgatcttcaatgctccctcccacggcgtcctttgccttgtcctcagtgtggaaagagctttatccacccaaaaaggctgcagactcatgaagcacagtgtcggagaggggccagtactaggggctctaccggactcggcgctggcggtgcgggcccaggcggacctgccggggtggacgcgtccgcgctgccaccacccgtgggatttcgcggcggccctgaacacgtggttaaggttgtgggagggcacgtactttacgtttgtgctgcttgcgaacgttcatatgtcacactgtccagcttgaagagacactctaacgttcatagttggcgacgaaagtacccatgcaggtattgtgaaaaagtgttcgctttggctgaatataggacaaagcacgaggtgtggcacactggagaacgacgctatcagtgcatcttctgctgggaaacctttgtaacatactataatctgaagactcaccagagggcattccacggaatctcccccggactactggcatctgagaaaaccccaaatgggggatataagcccaagctaaataccttaaagctgtaccgactcttgcctatgcgagctgctaagaggccctataaaacctactcacagggtgcacctgaggctcccctgtcccctactctgaacacacctgcaccagttgccatgccagcctcccctcccccaggtcccccccccgctccagagcccggaccccccccctcagtgatcaccttcgcgcaccctgctccttctgtcattgtgcacggagggtcctcttccggcggaggagggtcaggcacagcatcaactgggggcagtcaggctgcctcagtgatcacatacacagcgcctccgcgaccccccaaaaaacgagagtaccccccacctcccccagagcctgccgctactcctaccagcccagctaccgcggtatcccccgccacagcagccggtcctgccatggctaccactacggaggaggcaaagggtcgtaaccctagggcaggacgcacgctcacctacacggcgaagcccgttggggggatcgggggaggcggtgggcctccaaccggggccggccgcggacctagccaactgcaggcgccccctccattgtgccaaatcacagtccggatcggggaggaggctatcgtgaaacggagaattagcgagacggatctgcgtcctggcgaactttcaggggaagaaatggaagagtcagaagaagatgaggaggaagaagatgaagaggaggaggaagaagacgaagaagaatccaaagcgggtggcgaagaccagctgtggcgaccttactatagctataagccaaaaaggaaagctggggcggcaggcggcgcctctgttggcggctcaggattacccagggggcggagaccccccagatggcgacaaaagttggagcggcgatcatgggaagagacacctgccgctgaatcacctgctggtcgcgccagaactgaacgccgtcatcgatgcggagactgcgctcagacgtttaccactctgcggaaactgagaaagcaccaggaggcccacggcggcggcagccactcatcccgggcaggccgtcggccttcaacccgatttacctgtccacactgtgccaaggtgtgtaaaaccgctgccgctctgtccagacacggccagcggcacgccgcagagagacccgggggaacccctacgcctgttattgcctattccaaaggttcagcagggactagaccgggcgacgtgaaggaagaagccccccaggagatgcaagtcagctcttccagtggcgaagcgggcggaggaagcactgccgccgaggaggccagtgaaacagcatctctgcaggatcccattatttcgggcggtgaggagccaccagtagtggcaagcgggggcagctacgtctatccacccgttcaggagttcccactcgcgctgattggcgggggccgcgagccagggggtggtcggggaaagtctggtagtgagggtcctgtgggggccggcgaaggagatcggatggagggaataggcgcggcgaaggtgaccttctacccggagccatacccactggtctatggcccccaattgctggcggcctatccctacaacttttccaacctggccgcacttccagtcgcattaaacatggtgctgcctgatgagaagggggcaggcgcgttgccctttctgcctggggtcttcggctacgcagttaatccacaggccgccccacccgcaccacccactccccccccaccaaccttaccgccccccatcccccccaaaggtgagggagaaagagccggcgtagagaggacacagaagggagacgtgggttag

SEQ ID NO: 211771 - DNA, 3042 bp, synthetic construct
  misc_feature 1..3042: note = Description of Artificial Sequence: Synthetic coding sequence
  source 1..3042: mol_type = other DNA
atgcccccccccgccgaggtgaccgaccccagccacgcccccgccgtcctgcgacagctgaacgagcaaaggctgcgaggccttttttgcgatgtgactctgatagccggagacactaaattccccgctcacaggtccgttcttgctgcttcgtccccgttctttcgcgaagctctgctgaccagcgcccccctgcccctcccccccgctactgggggggcagctcccaatcctgcgacaacaaccgcagcgagcagcagctcttcatcttccagctcatcgagtagttcaagtagcagcgcgagctcatcatcaagctccagctcatctagccctccgcctgcctcaccacctgctagcagtcccccgagagtgctcgagttgcctggggtgcccgccgctgctttttcggacgtgctgaactttatctactctgcccggctagcgcttcctggagggggaggtgacggcgctgctgtggctgagatcggcgccttgggtaggaggctcggtatttcccggctgcagggcctcggagaagggggggatgcctgggttccacccacgccggccccaatggccactagtcagccagaggaagattcttttggccctggacctcggccagccggggaatgggagggcgaccgggctgaagctcaggcccccgatctgcagtgcagtctcccacgaaggccactcccttgcccccagtgtgggaaaagcttcatccacccaaaaaggcttcagactcatgaggcacagtgtcgacgtggcgcctcaaccaggggatcaaccggactcggagccggtggggccggaccaggcggccccgccggtgtcgatgcatcagcccttccccccccagtgggctttaggggcgggcctgaacacgttgtgaaggtcgtcggagggcacgtgttatacgtatgcgcggcatgcgaacggtcatacgtgactctgagttcactgaagcgacatagcaacgtgcacagctggaggagaaagtatccctgtagatactgcgagaaagttttcgccctggctgagtatcggaccaagcacgaggtgtggcacacgggggagagaagataccagtgcatcttttgttgggaaacattcgtgacgtattataacctgaagacgcaccagagggcatttcatggaattagccccggtctgctagcctctgagaaaactcccaatggggggtacaaacctaaactgaacacactgaaactttacagactgttacctatgcgagccgccaaaaggccttataaaacttacagccagggggcccctgaagcaccacttagtcctacattgaacacacccgcaccggtcgctatgccagcatccccacctccaggacctccccccgcaccagaacctggtccccccccctcggtcataacgttcgcacatcccgctcctagcgtgatcgtccacggcggcagttctagcggcggcggcgggagtggcaccgcttcaactggaggttctcaggcagcgagcgttattacttacactgctccaccaagaccccccaagaagagggagtaccctccccctccaccggagccggcggccacacctacatcccccgccaccgccgtttcccccgccacagcagcaggacccgccatggcaactaccacagaggaagccaagggaaggaaccccagggccggaaggaccctcacatataccgccaagccagtgggcggcatcgggggcggcggagggcctcccaccggggccgggagggggcccagccaactccaagcacctccacccttatgccagattacagtgagaatcggagaggaagccatagtaaaacggaggatttccgagaccgatctgcggcctggagagctgagtggcgaagaaatggaagagagcgaggaagacgaagaggaagaggacgaagaggaggaagaggaagatgaggaagagtctaaggcagggggtgaggaccagctgtggcggccatattatagttacaagcccaagcgaaaagctggagcagcaggcggtgcttcagttggtggctccggcctcccaagaggtaggcgtccaccgcgatggcgccagaaattggagagaaggtcctgggaggagacccccgccgcggagagtcccgccggtagggcccggaccgaacgccgacacaggtgtggcgactgtgcccaaacattcaccactctgcgaaagctgcgcaagcaccaggaagcacatggcggaggttctcacagttccagggctgggagacgaccttcaactcggttcacgtgtcctcattgtgcaaaagtctgcaagactgctgccgctctttcacggcatggacagcgtcacgccgcggagaggccaggaggcacacccacacccgtcattgcttactcaaaagggtcggccggcactcgccctggcgacgtgaaagaggaagcacctcaggaaatgcaggtttccagcagctccggtgaggctggtggggggtccaccgccgcagaagaggccagtgagacggcctctctacaagatcctattattagcggcggagaagagcccccagtagttgcaagcggagggtcatatgtctatcctcctgttcaagagttccctctcgctctgatcggtggaggacgtgagccagggggcgggaggggcaaatctgggagcgaaggtcccgtgggcgcaggagaaggagataggatggaggggataggagccgctaaagtcactttttaccctgagccttatcccctagtatacggtccccaactgctggcagcttatccctataattttagtaacctggcggctttgcctgtggccttgaacatggtcctgccagacgagaaaggagccggcgctctccccttcctacctggcgtgttcggttacgcagtaaacccccaggcggcccccccagccccgcccacacctccaccaccgactctgccaccaccaattcctccaaagggggagggcgagagagcaggagtcgaaagaacccagaagggagacgtgggctag

SEQ ID NO: 211772 - DNA, 708 bp, synthetic construct
  misc_feature 1..708: note = Description of Artificial Sequence: Synthetic coding sequence
  source 1..708: mol_type = other DNA
atggagctgcccaactacagccggcagctgctgcagcagctgtacactctgtgcaaagagcagcagttctgtgactgtactatatccataggcactatttatttccgcgcccataaactggtcctggcggcagctagtctcctgttcaagaccctgttggataacacagataccatttcgattgatgccagcgtcgttagccctgaggaattcgctcttctcctggagatgatgtatacagggaaactgcccgtaggcaagcacaactttagtaagatcattagtctggccgattcgctacagatgttcgatgtggccgttagctgtaaaaacctgctgacgagcttgttagcagccaccccagggggacccgtgaaggcagagaccgaggaggcagctcattctgtgagccaggagatgtctgtgaacagtccaacggcacaggaatctcagcgaaatgccgagaccccagccgagacacctacaaccgctgaagcttgtagcccctcccccgcagtccagacattctccgaggctaagaagacgtccacggagccagggtgtgagagaaaacattatcagctcaatttccttctcgaaaatgaaggcgtttttagtgacgctttgatggttactcaggacgttctcaagaaactggaaatgtgctcgaactgttgcgtgccagtggaggccgtccccatcttttag

SEQ ID NO: 211773 - DNA, 3384 bp, synthetic construct
  misc_feature 1..3384: note = Description of Artificial Sequence: Synthetic coding sequence
  source 1..3384: mol_type = other DNA
atggagctgcccaactacagccggcagctgctgcagcagctgtacacgttgtgcaaagagcaacagttctgcgattgtacaatttccattgggacgatctacttcagggctcacaaactggttttggccgctgcctccctactgttcaaaactttactggataatacagacactatctccatcgacgctagtgtggtgagcccggaggagttcgctctcctcctcgagatgatgtatacgggaaagctaccggttggcaagcacaatttttcgaaaatcatctcactggctgacagcctgcagatgttcgacgttgccgtgtcgtgcaagaacctgcttaccagcctagtgaattgtagtgtgcagggtcaggtggtaagggatgtgtcagccccttccagtgagacgtttagaaaggaacccgagaagccgcaggtggagatcctctctagtgagggcgcaggagaaccacattcttcccctgaactggccgcaacacctgggggcccagtgaaggccgaaacggaagaagcagctcattcagtttctcaggaaatgtcagtcaattcccctactgctcaggagtctcagagaaacgccgaaactcccgcagaaacgccgaccaccgcagaggcatgtagtcccagccccgcagtccagacctttagtgaggctaagaagacttcgaccgagccaggttgcgaacgcaagcactatcagctcaatttcctcttggagaatgagggtgtgttttcagatgccttgatggtcacgcaggacgttcttaagaaactggaaatgtgttccgagattaaaggtccacagaaagaggttatcctgaattgctgcgaagggcggacccctaaagagacaatcgagaatcttctccacaggatgacagaggagaaaacactgaccgccgaaggccttgttaaactactgcaggcggtgaagaccacctttcccaacttgggactgctcctcgagaagctgcagaagtccgccaccctgcccagcacaacagtgcaaccgagccccgacgactacgggacagagctgctgcggcggtatcatgaaaatctgtctgaaattttcacagataatcagatcctcctgaaaatgattagtcacatgacaagcctggccccaggcgagcgcgaagttatggaaaagctggtgaaaagagactccggcagtggaggctttaactccttgatcagtgctgtcttggagaagcaaaccctcagcgctaccgctatttggcagctgctgctggtggttcaggaaaccaaaacttgtccgctggacctgctgatggaagaaatcaggagagaaccaggcgcggatgcgtttttccgcgccgtgaccactccagagcatgctacactcgagacaatactgaggcacaaccagctcatcctggaggctatacagcagaagatcgaatataagctgtttacctcagaggaggaacacctggctgagactgtcaaagagattctgtcaatcccctcagagactgcctcccccgaggcctcactgagagctgtattgtctcgagcgatggagaagagcgttccagcaatcgaaatctgccatcttctgtgtagcgtgcacaagagtttccccggcttgcagccagtgatgcaggaattggcttacatcggggtgctgacgaaagaagatggagagaaagagacatggaaggtctccaacaaatttcacctggaagcaaacaataaggaagacgaaaaagccgctaaggaggatagccagcctggcgaacaaaacgaccagggggagaccgggagccttcctggccagcaagagaaagaggcctccgcttcacccgatcctgccaaaaagagtttcatctgcaaggcttgcgacaaaagctttcatttctactgtaggctcaaagtccacatgaaacggtgtagggtagcgaagtctaagcaagtccaatgcaaggaatgcagcgagacgaaagactccaaaaaagagcttgacaagcaccaacttgaagcgcatggtgcagggggggagccagacgcgccgaagaaaaagaagaagcgacttcctgttacgtgtgatctctgtggtcgcgagtttgcacacgccagtggcatgcagtatcacaaattgaccgagcacttcgacgaaaagcccttttcttgtgaggaatgtggagccaagtttgcagcaaattctactctgaagaaccacttgagactgcatactggcgataggccctttatgtgtaagcactgccttatgaccttcacgcaggcctcagccctggcgtaccacacaaagaagaagcacagtgagggcaagatgtatgcctgtcaatactgcgacgctgtgttcgcccagtctattgagctgtccaggcatgtccggactcacaccggcgataagccatatgtctgcagggactgcggtaagggctttcgccaagccaatggactgtctatccacctacacacatttcacaatattgaagatccctatgattgtaagaagtgtcgaatgtcctttcccacactgcaggaccatagaaaacatatccatgaggtgcactccaaggagtaccacccctgccccacatgcggcaagatcttttccgccccttcaatgcttgaaagacacgtggtgacacacgtgggtgggaaacctttctcctgcgggatttgtaataaagcctaccagcaactgtccggactgtggtaccacaatagaacacatcacccagacgtgttcgctgcccagaatcatcggtctagcaaattttcttctttgcagtgctccagctgtgacaagacttttccaaacacaatagagcacaaaaaacatattaaggccgagcacgcagacatgaagtttcacgagtgtgaccagtgtaaggaactgtttccaactcccgcactcctccaggtccatgtaaaatgtcagcactctggttcacagccttttaggtgcttgtactgtgccgctactttccgctttcccggagctttgcagcaccatgtcaccaccgagcacttcaaacagtctgaaaccacttttccttgtgaattgtgtggagaactgtttacatcacaggcccaactggatagtcatctggagtccgagcaccccaaggttatgtcaaccgaaacccaggcggccgcttcacagatggctcaagtcattcagacgcccgaaccagtagcccccactgaacaggttatcacccttgaagaaacacagctggctgggtcacaggtatttgtaaccctccccgacagccaggctagtcaggccagcagcgagctagtcgcagtaaccgtggaggacctgctggacggtacagtcacactcatatgtggggaggctaagtag

SEQ ID NO: 211774 - DNA, 3720 bp, synthetic construct
  misc_feature 1..3720: note = Description of Artificial Sequence: Synthetic coding sequence
  source 1..3720: mol_type = other DNA
atggagctgcccaactacagccggcagctgctgcagcagctgtacactctgtgcaaagagcaacaattctgcgactgcacgattagtattggcaccatctacttccgcgctcataaactcgttttggctgccgctagtttactgtttaagactcttctggataataccgacacaatcagcattgatgcttcagtcgtgtcccctgaggagtttgctctcctcctcgagatgatgtatactgggaaactgccggtagggaagcacaatttcagcaagatcatctctctggccgatagcctacagatgtttgacgtcgccgtaagctgtaagaacctgcttacatctctcgtcaactgctctgtccagggtcaggtcgtgcgggacgtctcagcccccagctccgagaccttccgaaaggagccggagaagcctcaagttgagatcctgtcatctgagggggccggggagccacactccagccccgaactcgcagccacaccagggggaccagttaaggcagaaaccgaagaggccgcccatagcgtgtcccaggagatgagtgtgaactctcctacagcccaggagagtcagcggaacgccgagactcctgcggaaactcccaccacagctgaagcatgttctcctagcccagccgtgcagacgttctccgaggctaagaaaaccagtacagagccagggtgcgagcgcaagcactatcagttgaattttctgctcgaaaacgagggcgtgtttagcgacgccttgatggtgacccaggatgtgctaaagaagctagagatgtgttctgagatcaaaggtccccagaaggagatgatcgtgaagtgctttgagggggaaggtgggcattctgcttttcagagaatattgggtaaagtgagagaggagtccctggacgtccagactgttgtaagccttctgagactgtaccagtattctaaccctgctgtgaagacggccctgctggacaggaagcctgaagatgtagacactgtgcaacccaagggaagcaccgaagaaggcaaaactctcagtgtgctacttttggaacataaagaggacctgattcaatgcgtcacacaattgaggccaatcatggagagtctggagactgctaaggaagagtttctgacgggaacggaaaaaagggtgattttgaattgttgcgaaggaaggacccctaaagaaacaatcgagaacctgctacacagaatgactgaggagaagaccctaacagcagaagggctagtgaaattgctgcaagctgttaagactacgttcccaaatctcggtctactgctggaaaagctccagaaatctgcaacacttccctctaccaccgtgcagcctagtccggatgattacggaacagagctactccgcagatatcatgagaacttaagtgaaatctttactgataaccagatcctccttaagatgatctcacatatgacatccctagcgcctggcgaacgtgaggtcatggaaaaacttgttaagcgagactccggatctggcggattcaactctcttatctcggccgtcctggaaaagcagacgctgagcgctacagccatttggcagctcctgctcgtagtgcaggaaaccaaaacttgtcccctcgatctattgatggaggaaattcgtagagaacccggcgcagacgcattcttccgcgcagttaccacaccagagcacgccaccctcgaaactattctacgccacaatcaactcatattagaggccattcagcaaaaaatcgagtacaagctgtttaccagcgaagaggaacacctggcagaaactgttaaagaaatcctgtcaattcccagcgagactgcctctccagaagcttcactccgagcagtcctgagtcgagccatggagaagtcagttcctgctattgagatctgtcatttactttgctctgtacataaatccttcccagggctgcagccagtcatgcaagagctggcctacattggggttttgaccaaggaggatggggagaaggagacatggaaagtgtcaaacaagtttcacctggaggcaaacaataaggaggatgaaaaagccgccaaggaggactctcagccaggcgaacagaacgaccagggagaaacgggatcactgccgggacagcaggagaaagaggcttctgccagtcccgaccctgccaagaagagtttcatttgtaaagcttgcgataagagctttcatttctactgtcggctgaaagtccacatgaagaggtgtcgggttgccaaaagtaagcaggtccagtgtaaagaatgtagtgagacgaaggacagcaaaaaggaactggacaaacatcagctagaggcacacggggccggaggagagcctgacgcccctaagaagaagaaaaaacggctgccagtcacgtgtgatctatgcggtagggagttcgcccacgcgtctggcatgcagtaccataaacttacggagcattttgacgaaaagccattcagttgtgaagagtgcggcgcgaagttcgcggcgaatagcacgcttaagaaccacctccggctgcacactggcgatcgtccgttcatgtgtaaacattgtctgatgacttttactcaagcctccgcgttggcctaccatacgaagaaaaagcactccgaagggaagatgtatgcctgccagtactgcgatgccgtgtttgcccaaagcattgagctgtccaggcatgttaggacccacaccggtgataagccatatgtgtgtagggattgtggcaagggttttaggcaagcaaacggccttagtattcacctccatacctttcacaatatcgaggatccctacgactgtaagaaatgcagaatgtctttccctaccctgcaggaccatcgaaagcatatacatgaggttcacagtaaagagtaccatccatgccccacctgtggaaaaatcttctctgcacctagcatgctcgaacgacacgtggtcactcacgtgggcggtaaacctttctcatgtggtatctgtaacaaagcatatcagcagctgagtggcctttggtaccataaccggacccatcatcccgacgtgttcgccgcccagaatcatcggtcatctaagttctcgtctcttcaatgtagttcgtgcgataagaccttcccaaacaccatagagcataagaaacatatcaaggctgagcatgccgacatgaaattccacgagtgcgaccagtgtaaggaactgtttcccactcccgccctgctccaagtacacgtaaaatgccaacacagtggctctcagccttttaggtgtctctactgtgcagcaacttttcgctttcccggggcccttcagcatcatgtgacaaccgaacatttcaaacaatccgagaccacattcccttgcgagctttgtggtgagttgttcacttctcaagctcaactggactcccacttggagagtgagcacccgaaggttatgtctactgaaacccaggccgccgcgagtcagatggcacaagtgatccagacgccggagcccgtggcacctacggagcaggtcataaccctggaggaaacccaactggcgggcagccaggtgtttgtcacactcccagatagccaggcatcccaagccagttctgagctcgttgctgttactgttgaggacctgctggacgggactgttactctgatctgcggggaagcaaaatag

SEQ ID NO: 211775 - DNA, 1362 bp, synthetic construct
  misc_feature 1..1362: note = Description of Artificial Sequence: Synthetic coding sequence
  source 1..1362: mol_type = other DNA
atggagctgcccaactacagccggcagctgctgcagcagctgtacacgctttgcaaagagcagcagttctgcgactgcaccattagcatcggcacgatatactttcgggcccacaaattggtgcttgcggccgcttccctgctgtttaagaccctcctggataacacagacactatctctattgatgcctccgttgtgtcccccgaggagtttgcccttttactggaaatgatgtacacaggcaagctgcctgtcggaaaacacaatttcagtaaaattatttcactggcggactcccttcagatgtttgatgtggccgtgagctgcaaaaacctgctcacctctttagtcaattgttccgtgcaggggcaagtagtgcgggatgtaagcgccccatctagtgagacgtttaggaaggaacccgaaaagccccaggtcgagatactcagctctgagggcgccggagaaccacatagttctcctgagttggcagccacgcctggcggacctgtgaaagccgagaccgaagaagcagcccattccgtgagtcaggaaatgagtgtcaacagcccaactgcacaggagtcccagcggaacgccgaaacgccggccgaaacaccaactacagccgaagcttgtagtccctcacccgcagtccagactttctctgaggccaaaaagacttccaccgagccgggatgcgaaaggaagcactatcagcttaattttctgttagaaaacgaaggagtcttcagcgatgctctcatggtcacccaggacgtattgaagaaactggaaatgtgtagcgaaattaagggcccccagaaagaaatgatcgtgaagtgctttgaaggagaaggcggccattccgccttccagagaatcctgggaaaggtgcgcgaggagtcattggatgttcaaacggttgtgagtctactgaggttgtaccagtatagtaaccctgcggttaaaactgccctactggatcgtaagccagaggatgtggacacggtgcagcccaagggttccaccgaagagggcaagaccctttctgtccttctgctggaacataaagaagacctgattcaatgcgtgacccagctgaggcccataatggaaagtctggagaccgctaaggaagaatttctgactggaactgaaaagagggtgatcctaaactgttgcgagggtcgaacacccaaggagaccatcgaaaatctgctccaccgcatgacagaggaaaaaaccctgaccgcagagggcctggtgaagctcctgcaggccgtaaagactacgtttcccaatcttggactccttctggagaaactgcagaaatccgccacactgcctagcacaacgtag

SEQ ID NO: 211776 - DNA, 3720 bp, synthetic construct
  misc_feature 1..3720: note = Description of Artificial Sequence: Synthetic coding sequence
  source 1..3720: mol_type = other DNA
atggagctgcccaactacagccggcagctgctgcagcagctgtacaccctctgcaaggagcagcagttttgcgattgcactatttccatcggtaccatttatttccgcgcccacaaactagtgctcgctgccgcttcactgctgttcaagactctcctggataataccgacacaatcagtatcgacgcttctgtcgtatcccctgaagagttcgcactcctgctggagatgatgtatactggcaaactgccagtcggaaagcacaattttagcaagattatatcactggccgattcgctccaaatgtttgatgtggcagtgagctgcaagaatcttctgactagtctcgttaactgtagcgtccaaggccaggttgttagagacgtgagcgcaccatcttcggagactttccggaaggagcccgaaaagccgcaggtggaaattctgtccagcgaaggcgccggagaacctcacagcagtcctgagctggccgctacaccaggcggacccgtgaaggccgagactgaggaggcagcccattccgtctctcaagaaatgtccgtgaactctcctaccgcccaggagtcacaaaggaatgcggaaactcctgctgagaccccgaccaccgccgaggcttgttccccgagtcctgccgtgcagacgttctctgaagctaaaaagacctcgaccgaacccggttgcgagaggaaacattatcagctcaactttctcctcgaaaacgagggggttttttccgacgctcttatggtgacacaagacgtcttaaaaaaactggagatgtgttctgaaattaaggggccccagaaggagatgatcgtcaaatgtttcgagggtgagggtggacacagtgcgttccagcgtatccttggtaaagtaagggaggaatcactggatgtgcagactgtggtctctctgttacggctgtaccagtattcaaaccccgccgtcaaaacagcgttgctcgacagaaagcccgaagacgtagacaccgtgcagccaaaggggtctacagaagagggaaaaactttgtcagtgctccttctggagcataaggaggacttaatccagtgcgtgactcagctacgacctatcatggagtcactggaaactgccaaggaggaatttctgaccggaactgagaaaagggtcatcttgaactgttgcgaaggccggacccccaaagaaacgatcgagaatctgctgcaccgaatgacagaagaaaaaactctgaccgcagagggtctcgtcaaactgttacaggctgtgaagaccacattccccaatctgggactgctgttggaaaaactgcagaagtctgcgactttgccctccacaactgtgcagccaagtcccgacgattacggcactgagctattacggcgctaccacgaaaacctgagcgaaattttcaccgataatcagattcttctgaagatgatcagtcacatgacatctctggctcctggagaaagagaggtgatggaaaagctggtgaagcgggatagtgggagtgggggttttaactctctgattagtgccgtgttggagaaacaaacattatctgcaacagccatttggcaactgctgctcgtggtgcaggagacgaagacctgtcccctcgatctccttatggaagaaataagaagggagcctggagctgacgcattcttccgtgcggtaaccactcccgagcacgctaccctcgaaacgatccttcggcataaccaactcattctcgaggctattcaacagaagatcgaatataagctgttcacttcagaggaggaacaccttgctgagaccgtgaaagagatcctgagtataccttcagaaacagccagtccagaggcaagcctgagggcagttctctctcgcgctatggaaaagtcggtgccagccatagaaatatgtcacctgttatgctctgttcacaagtcatttcccggacttcaacctgtaatgcaggagctagcctatatcggcgtgttgactaaagaagatggcgagaaagaaacgtggaaagtgagtaacaagtttcatctcgaggctaacaacaaggaggacgaaaaagccgctaaggaggatagtcagcctggggaacagaacgaccagggagagaccggttcacttccaggacagcaggagaaagaggccagtgcatcacctgacccggcgaagaagtcgtttatttgcaaggcctgcgataagagctttcacttctactgcagacttaaggtacacatgaagcgatgcagggtggctaaatccaaacaggtgcagtgcaaggaatgttccgaaacgaaagattcaaagaaggaactggataagcaccagctggaagcccacggcgctggcggggagcccgacgcccctaaaaagaagaaaaaaaggcttcccgtgacttgcgatctgtgcggcagggagtttgcccacgccagcgggatgcaataccataagttaaccgagcatttcgatgagaagccattcagctgcgaggagtgtggtgccaagttcgcggccaactctacacttaaaaaccacctcaggctgcacaccggcgaccgcccattcatgtgtaaacattgtctgatgacgttcacccaggcttctgctctggcctaccacactaaaaagaaacattcagaaggaaagatgtatgcctgccagtactgcgatgccgttttcgcccaaagcattgaactcagccgacacgtgcgaacacacaccggtgataagccctacgtgtgcagagattgcgggaagggttttcgccaagccaacggcctgagcatccatctgcatacattccacaacattgaggacccctacgactgtaagaagtgccgaatgtccttcccaactctgcaagatcaccgaaagcacattcatgaggtgcatagcaaagagtatcatccatgccctacatgcggcaagattttctctgcccccagcatgctggaacgccacgtggtgactcacgtagggggtaagccgtttagttgtggaatctgtaacaaagcctaccaacagctgtccggcctgtggtaccacaacagaacccaccaccctgacgtgtttgccgcccagaatcaccggagctccaagttctcctctctgcaatgttctagttgtgacaagacattcccaaataccatcgagcataaaaaacacattaaagctgagcatgccgatatgaagttccatgaatgcgaccaatgtaaggaattgtttccaactccagctctgctgcaagttcacgtcaaatgccagcactctggttcacaacccttccggtgtctgtattgtgcagccacgttcagattcccaggagccctccagcatcacgttaccacggagcatttcaagcaaagcgaaacgacgttcccctgtgaactgtgtggagagttgttcacttctcaagcgcagctagacagtcacctggagagcgaacatcccaaagtgatgagcacagagacccaggctgctgcttcacagatggcccaggtaattcagactcctgagcctgttgcccccactgaacaagttatcactttagaagagactcagctggcagggtctcaggtgttcgttaccctaccggattcccaggctagtcaggcatctagtgagttggtggctgtgaccgtggaggacctcctagacgggaccgtgacactgatctgtggcgaagccaaatag

SEQ ID NO: 211777 - DNA, 1269 bp, synthetic construct
  misc_feature 1..1269: note = Description of Artificial Sequence: Synthetic coding sequence
  source 1..1269: mol_type = other DNA
atggagttccccgagcacggcggccggctgctgggccggctgcggcagcagagggagctgggatttttgtgcgattgcaccgtcttggtgggcgacgccagattccctgcccacagggccgtcctggccgcttgttctgtgtacttccatctgttctaccgtgatcgacccgcggggagtcgcgacacagtcagactcaatggcgacattgtaacggcccctgcctttggacgccttcttgattttatgtatgagggacggctggatctccgttcattgcccgtcgaggatgtcctggccgcagcctcttacctgcatatgtacgacatcgtgaaagtgtgcaaaggccggctgcaggagaaagataggagtctcgaccccggtaaccctgcacctggcgccgagcccgcacagcctccctgcccctggccagtgtggaccgccgacctttgtccagccgcacgtaaggctaagctcccaccctttggcgtcaaggctgccttaccccctagggcttcaggcccccccccctgccaggttcctgaagagtcagaccaagcactagacttaagtttgaagtcagggccccgccaagaaagggtacatcccccatgtgtgctccagacccccttgtgtagccaaaggcagccaggtgctcagcctttagtcaaagatgaaagagattccctcagcgagcaggaggagagttcatcatcccgaagcccacattctcctcctaagccccctcccgttccggcagccaagggcctggttgtgggccttcagcccctccccctgtccggagaaggatcccgcgaactagagttaggagctgggcgactggcctctgaagacgagttgggcccaggaggcccattgtgcatttgccccctgtgcagtaagctgttcccatcctcacatgtgcttcagctccacctcagcgctcacttcagagagcgggatagcacaagagctagactgagccctgatggcgtggccccaacatgcccattgtgcgggaagacattcagctgcacttatacactcaaaagacatgaacgcactcatagcggagaaaaaccatacacctgtgtgcagtgcggcaagagcttccaatattcccacaatctgtctcgtcataccgtggtgcacaccagggaaaagcctcatgcctgccgttggtgtgagcgcagatttacccagtccggagatctgtacagacatgtgagaaaatttcactgcggattggtcaaatctttattggtgtag

SEQ ID NO: 211778 - DNA, 1269 bp, synthetic construct
  misc_feature 1..1269: note = Description of Artificial Sequence: Synthetic coding sequence
  source 1..1269: mol_type = other DNA
atggagttccccgagcacggcggccggctgctgggccggctgcggcagcagagggaactgggttttctctgcgattgcaccgtgctagtcggggacgcccgattcccggcacacagagccgtactggcagcctgttcagtatacttccaccttttctatcgtgatcggccagccggtagcagggacaccgtgagactgaatggcgatatagtaacagctccggcgttcggtcgcctgctggactttatgtatgaggggcgcctggatttgcggtccctaccagtggaggatgtgctcgccgcggcatcatatctgcatatgtatgatatcgtgaaagtttgtaagggcaggttacaggaaaaggacagatctctcgatccaggtaatccggcccctggagccgagcccgcccagcctccctgtccttggcccgtctggaccgctgatctgtgccccgcagcacgaaaagcaaaactgccaccgtttggtgtgaaggccgccctgcctccacgcgcaagcggacctcccccctgccaggtgccggaagagtcagaccaggcgctcgatttgtccctcaagtctgggccccgccaggaaagggtgcacccaccctgcgtcttgcagactccactttgcagtcagagacagccaggggcacagcccctggtcaaggatgaaagagactccctctccgaacaggaagagtcctcatccagccgatcaccacattctcctcccaagcctccccctgtgcccgccgcaaaagggctagtggtgggtcttcagccactccccttgagcggggagggcagccgagagttagagttgggggccggccggctggcctcagaagatgaactggggccaggcggcccactttgcatctgtcccttatgctctaagctctttccatcatctcacgtattgcagctccacctctcagcccacttccgcgaacgagactcaacacgagcaaggctctcccccgacggcgtggcacctacctgccccctgtgcggtaaaacattctcatgcacttatacgctgaaaagacatgagaggacccactctggtgaaaagccatatacttgcgtacagtgcggaaagtcctttcaatatagccataatttgtcccggcataccgttgttcacacccgagagaagccacatgcatgtcgctggtgtgagaggcgattcacccaatccggggacctgtatcgccatgtgagaaaattccactgcggcctcgttaagtctcttctggtttag

SEQ ID NO: 211779 - DNA, 1815 bp, synthetic construct
  misc_feature 1..1815: note = Description of Artificial Sequence: Synthetic coding sequence
  source 1..1815: mol_type = other DNA
atggccagcacctgggccatccaggcccacatggaccaggacgagccactggaggtcaagatcgaggaagagaagtacaccactcgccaagattgggaccttcgcaaaaacaacacacacagtcgcgaagtgtttcgccagtatttcaggcagttttgttaccaagagacctctgggccaagggaagctttgagccggctacgcgagctctgccatcaatggctccgacccgagacccacactaaagaacagattctggagctgctggttcttgagcagttccttaccattctgccagaggagctgcaagcttgggtccaggagcaacaccctgagagcggcgaggaggtggtgacggtacttgaagatctggagagggagctggacgagcctggcgagcaagtttctgttcacaccggggagcaggaaatgtttttgcaggaaactgtaaggctgcggaaagaaggcgaaccgagtatgagcctgcagtccatgaaggcacaacctaagtacgaaagtcccgaactggaatcccaacaggaacaggtgcttgacgtggaaacaggcaacgagtacggcaatttgaagcaggaggtctccgaggagatggaaccccatggcaagacgtcatctaagtttgagaacgatatgagtaagtctgccagatgtggggagacccgggagcctgaggaaatcactgaggagccctccgcctgctcaagagaagacaagcagcctacctgtgacgagaatggggtttcgctgacggagaacagcgatcatacggaacaccaaagaatttgtcctggggaagagtcatatgggtgcgatgattgcggaaaagcgtttagccagcattcccatttgatagaacatcagcgaatacatacaggcgatagaccttacaagtgcgaggaatgtggtaaagcttttagggggaggaccgtgttgattaggcataagatcattcatacaggagaaaagccttataagtgcaacgagtgcggaaaagccttcgggcgctggtccgcactgaaccagcatcagcgtctgcacaccggcgagaagcattatcactgcaacgattgtggtaaggcttttagccaaaaagctgggctgttccaccatattaagatccacacccgcgacaaaccttaccaatgcactcagtgtaacaagtccttcagcagaaggtcaattcttacccagcatcagggagtgcataccggggcaaagccctatgaatgtaacgagtgtggcaaagcattcgtctataactcttccttagtgagtcatcaggagatacaccataaggagaaatgttaccaatgcaaggagtgcgggaaatcattctcgcagtctggcctgattcagcatcaaaggatccatactggggagaagccctataagtgtgatgtctgcgaaaaggcattcatccagagaacttcgctgacggaacaccagcggatccataccggggaacgaccctacaagtgtgacaagtgtgggaaagcatttacgcagcgaagcgtgttgactgagcaccagaggattcataccggcgagcgcccttacaagtgcgacgaatgcggaaacgcctttagaggaatcaccagcctgatccagcaccaaagaatacacaccggggagaagccttaccaatgcgatgaatgtggtaaggcttttagacagaggaagaagacgtcatataaggagatcctgcttaaaaaccattccgaaccccaggccggcgttaaccttcttttgagtagtctgattcccgagtggcaatcttgcttcagacgagatttgtag

SEQ ID NO: 211780 - DNA, 1815 bp, synthetic construct
  misc_feature 1..1815: note = Description of Artificial Sequence: Synthetic coding sequence
  source 1..1815: mol_type = other DNA
atggccagcacctgggccatccaggcccacatggaccaggacgagcctcttgaggttaaaatcgaggaggagaaatataccactagacaagactgggatctgcgtaagaataatacccactctcgagaagtatttcgacagtatttccgccagttctgttatcaggaaacatcaggccccagagaggccttgtcccggttgagagaattgtgtcatcagtggctcaggcccgaaacacacacaaaggaacagattctcgagctgttggttctggagcagttcctaacaatattacctgaagagcttcaggcctgggtgcaggagcagcaccctgagtccggcgaagaggtggtgacggtcttggaggatttggaacgcgaactggatgagcccggggaacaggtgtctgtacatactggcgaacaggagatgttcttgcaggaaactgtgaggttacgcaaggagggggaaccatctatgtccttgcagagcatgaaagcccagccaaagtatgagtcccctgaactcgagagccagcaggagcaggtcctggacgtcgagaccggtaacgaatatggtaatcttaagcaagaggtatcagaggagatggaaccacacggaaagacaagttcaaagtttgagaacgacatgagcaagtcggctaggtgtggcgagaccagggagcccgaggagataaccgaagaaccctccgcctgttccagagaagataaacagcccacctgcgatgaaaatggcgtgtcactgacggagaactctgatcataccgagcaccaacgcatctgcccaggagaagagagctatggctgcgatgactgtggcaaagccttcagccagcattcacatctcatcgagcatcagcgtattcacaccggcgaccgaccatataagtgcgaagagtgcggcaaggcattcaggggacggacagtactcatcaggcacaagatcatccatacgggagaaaagccttacaaatgtaatgaatgtggtaaggctttcggcaggtggagtgccttaaaccagcatcagaggctgcatacaggggaaaagcattatcactgcaacgactgcgggaaggcatttagtcagaaagcaggtctgtttcaccacattaaaattcatacacgggataagccttaccaatgcacgcagtgtaacaaatcattcagtcgccgctccattttgacgcaacatcagggtgtgcacacaggtgccaaaccctatgaatgtaatgagtgtggcaaggctttcgtgtacaacagttctctcgtctcccaccaggaaatccatcataaagaaaagtgttatcagtgcaaggagtgtggaaaatcttttagccagagcggcctgattcagcatcagaggattcacacaggagagaagccttataagtgcgatgtttgcgagaaagcattcatacagaggacgagcctgacagagcaccagcggatccatacaggagagaggccctataagtgtgacaagtgtggaaaggcgttcacacagcgcagcgtgctgaccgagcatcaacggattcacacaggagagagaccttacaagtgcgatgaatgcggcaacgccttcagaggcatcacaagcttgattcagcatcagcgtatccacactggggagaaaccgtaccagtgtgatgaatgcggaaaggcatttaggcagcgaaagaaaacctcttacaaagaaattttgcttaaaaatcattctgagccccaggccggggtgaatctgttgctgtcctctcttatccccgaatggcagagctgcttccgcagggatctctag

SEQ ID NO: 211781 - DNA, 1476 bp, synthetic construct
  misc_feature 1..1476: note = Description of Artificial Sequence: Synthetic coding sequence
  source 1..1476: mol_type = other DNA
atggccatccccaagcacagcctgagccccgtgccctgggaggaggattcctttctacaggtcaaggtggaggaggaggaggaggcctccctgagccaggggggagagtcctcccatgatcacattgcgcactctgaggctgcccggctccgatttaggcactttcggtacgaggaggcttctgggccgcacgaggcccttgcccatctgcgcgcactgtgctgccagtggctacagccagaggcacattcgaaggagcaaattctcgaattgctcgtgttagagcaattcctcggggcacttcccccagaaattcaggcctgggtgggagcccagtcacccaagtctggagaggaggctgccgtattggtggaggacctaacacaggtccttgataaaaggggatgggatccaggagccgagccaaccgaagcatcatgtaaacagagtgacttgggcgaatctgagcctagcaatgttaccgaaacacttatgggtggcgtgagcctgggtcctgctttcgttaaggcgtgcgagcctgaaggatcctcagaacgttcgggcttaagcggagagatctggaccaaaagcgtgacccaacagatccatttcaaaaaaacgtctggcccctacaaggatgtgcctaccgatcaaagggggagggagtctggagccagccgaaattcttccagtgcatggcctaaccttacctctcaagaaaagccgccatctgaggacaaattcgacctcgtggacgcctatggcactgagccaccttatacatatagcggcaaacgctcttccaagtgccgggaatgcaggaagatgtttcaaagcgccagtgcgttggaggcccaccaaaaaactcacagccgaaaaactccatatgcttgtagcgagtgcggcaaggcattctcgcgctccactcacctcgctcagcatcaagtcgtgcataccggcgctaagccccacgaatgcaaagaatgtggaaaagcattctctcgggtgacgcacctgacccagcaccagaggattcatacgggagagaaaccatataaatgcggggagtgcggcaagacgttctcccggtccactcacttaactcagcatcaacgggtgcacacaggcgaacgtccgtacgaatgtgatgcctgtgggaaggcctttagccagagcacccacctaactcagcatcagagaatacatacgggcgaaaagccctacaagtgcgacgcatgcggccgcgccttttcagattgtagcgccctcataaggcacctgcgcattcattctggggagaaaccctaccagtgcaaggtgtgccctaaggcctttgctcagagcagtagcctgattgagcatcagcgcattcacaccggggagaaaccttacaaatgctccgattgtggcaaggctttcagcaggtccagcgctctgatggtgcacttgcggatccacattacagtccttcagtag

SEQ ID NO: 211782 - DNA, 1302 bp, synthetic construct
  misc_feature 1..1302: note = Description of Artificial Sequence: Synthetic coding sequence
  source 1..1302: mol_type = other DNA
atggccctggacctgcggaccatcttccagtgcgagcccagcgagaataatctcgggtccgaaaatagcgcttttcaacaatcacagggtcccgcagtccagcgcgaagagggcatctctgaattttcacggatggtgctgaattccttccaagattctaacaattcctacgcccgacaagaattgcaaagactctaccgcatctttcattcctggttacagcccgagaagcattcaaaggatgaaattatcagtttactggttctggagcaatttatgatcgggggacattgcaacgataaagcctccgtcaaggagaaatggaaatccagcggaaagaatcttgagagattcatcgaagatctgacagatgatagcattaatcctccagcactagtgcatgtacacatgcaaggacaggaggcgctgttctctgaggacatgcctctgcgcgatgtgattgtccacctgactaagcaggtcaacgctcagaccacccgggaagccaatatggggactccctcccagaccagccaggacaccagcctggagacagggcaaggttatgaagacgagcaagatggctggaacagctcctccaagacaacccgggtcaacgaaaacataacgaaccagggcaaccagatcgtcagcttaattatcatccaggaggaaaatgggcctcgccctgaagaggggggtgtgtcctcagataacccatataatagcaagcgggccgagctcgttaccgcccgctcacaggaggggtcaattaatgggatcacattccagggcgtaccgatggtgatgggggctgggtgcatcagtcagcccgagcagtcttcccctgagtccgccctcacccaccagagcaatgaggggaactctacctgcgaggtgcaccaaaagggctcacacggggtacagaagtcttacaagtgtgaagagtgtccgaaggtctttaagtacctctgtcatctgctggctcatcagaggaggcatcgaaacgagcgcccttttgtttgcccagaatgccagaagggtttcttccagatatccgatctgagggtgcatcagataattcacacaggtaagaagcctttcacatgctctatgtgcaaaaaatcgttctcccataagaccaacctgaggtcccacgagcgcatccacacaggcgagaagccatatacctgcccattttgcaagaccagttatcgccaatcttctacgtatcacaggcacatgaggacacacgaaaagatcacacttccgtccgtacccagtactcctgaggcttcctag

SEQ ID NO: 211783 - DNA, 2433 bp, synthetic construct
  misc_feature 1..2433: note = Description of Artificial Sequence: Synthetic coding sequence
  source 1..2433: mol_type = other DNA
atgcccaaccagggcgaggactgctacttcttcttctacagcacctgtacaaagggagattcttgccctttccgacactgtgaagccgcaattgggaatgagactgtgtgcacactctggcaagagggaagatgcttcagacaggtttgtcgcttcagacacatggaaatagacaagaagaggtccgagataccctgctactgggagaatcagcctaccggttgtcaaaagctcaattgtgcctttcaccataatagagggagatacgttgatggtttgtttctgcctcctagcaaaaccgtattacctactgtccccgagagcccagaggaggaagtcaaggcttctcagctgtcggtgcagcagaataaactctctgtacagtccaatccaagcccgcagttaagaagcgtgatgaaagttgagtcttccgagaacgtgcccagccctactcatccaccggtggtgatcaatgccgccgatgacgatgaagatgatgatgatcagttctccgaagagggggatgagactaaaacgccgactctccaacccacacccgaagttcacaacggactgcgtgtgaccagtgtgcggaaaccagccgtgaatattaaacagggcgagtgtctcaatttcggcatcaaaactcttgaagaaatcaaatcgaagaaaatgaaagaaaagtccaaaaagcaaggggaaggcagttcaggggtctcaagcctccttctgcaccctgagccggtgccaggccccgagaaggaaaatgtgagaaccgtcgttcgcactgttaccttgtctaccaagcagggagaagaacctctcgttagactgtcactgacggaaagactcggaaagcgcaagttttccgccggcggcgattcggaccccccactgaagaggagcctggcacagcgtcttggaaaaaaggtagaagcaccggagactaacattgataaaaccccaaagaaggcgcaggtgtctaagtctctgaaagaaaggttgggcatgtccgcagaccccgacaatgaggatgctaccgacaaggtgaacaaggtgggagaaattcacgtaaagacactagaggagatcctgctggagcgcgcatctcaaaaaaggggagagttgcagactaagctcaaaacggagggcccatccaagacagacgattctacgagcggagcccgttccagctctactatccggatcaaaaccttcagcgaggtgttagccgagaaaaaacatcggcaacaggaggccgagcggcagaaaagcaagaaggacaccacatgcatcaaactaaagattgattcagagatcaaaaaaactgtagtactgcctcctatcgtggcctcgagaggccagagcgaggagcctgcagggaagacaaagtctatgcaggaagttcacattaagacattggaggagattaaactggaaaaagccctgcgggtacagcaatccagtgagtctagcacgtcatccccatctcagcacgaggccactccaggggctcgacggcttctgcgaatcacaaagcgaacagggatgaaagaagaaaagaacctccaggaggggaacgaagtggactcacaaagctccatccgtacagaggccaaagaagcttccggggagactaccggcgttgacatcaccaagattcaggtgaaacggtgcgagaccatgcgggagaagcacatgcagaaacagcaggaacgagagaagtccgtgctgactccattacgcggggacgtggcctcttgtaacacccaggtggctgaaaaaccagtgctcaccgcggtccccggcatcactcgccacctgaccaagcgtttacccacaaagagcagccaaaaggtggaggtggagaccagcgggattggtgactccctccttaatgtgaagtgtgctgctcagaccctggagaaacggggtaaagctaaacctaaagtgaacgtgaagccatctgtcgtcaaagtagtgagttcccccaagctggcccctaaaagaaaagcagtggagatgcacgcagccgtgatcgcagctgtgaaaccattgagtagctccagtgtgctgcaagagccgcccgcgaagaaggccgcggtggcagtggttcctctggtatcagaagacaagtccgtgacagtcccagaggcagagaatccacgagattcactggtgctcccacctacgcagtcaagctccgattcatccccgccagaagtgtccggaccctcatcatcacagatgtcaatgaagactagacgcctctctagcgcctctacgggcaaacctcccctgagtgtagaggacgactttgaaaaactcatttgggagatctcaggcggcaaactcgaagccgaaattgacctcgatccgggcaaggatgaggatgatctgttgctggagctaagtgagatgattgactcctag

SEQ ID NO: 211784 - DNA, 2433 bp, synthetic construct
  misc_feature 1..2433: note = Description of Artificial Sequence: Synthetic coding sequence
  source 1..2433: mol_type = other DNA
atgcccaaccagggcgaggactgctacttcttcttctacagcacctgtactaagggagattcctgtccttttcgccattgtgaggcagctattggaaatgaaacagtttgtaccctctggcaggagggacgctgttttaggcaagtgtgcaggttccggcacatggagatcgataaaaaacgctctgagatcccctgttactgggagaatcagcccaccggttgtcagaaactaaactgcgcatttcatcacaacaggggaaggtacgtggacggcctttttctgccaccttctaaaaccgtgctgcctactgtgccggagtctccggaggaagaagtgaaagcttcacaactgagtgtccagcaaaataagctgtcagtgcagtccaaccccagtccgcaactgagatcagttatgaaggtggaaagctctgaaaatgttcccagtcctacacatcctccggtcgtgatcaatgcagccgacgacgacgaagacgacgatgatcaattctccgaggaaggagatgaaactaaaacacctacactgcaacctacaccggaagtccacaacggcttacgggtcacatcggttcgcaagccagcagtgaacataaagcaaggtgaatgtttaaacttcggaatcaagaccctggaagagattaagagcaagaagatgaaagaaaagagcaagaaacagggagagggctcctccggcgtgtcaagtctgcttctgcatccagagccagtgcctggcccagaaaaggaaaacgtacgaactgtggtcaggacagtgactctgtcaaccaagcaaggggaggaacctctggtccgcctctcgctgactgagcggctgggcaagaggaaatttagcgccggtggggatagcgaccccccactcaagaggtcattggcacagagactgggcaaaaaggtggaagcacctgaaacaaacattgataaaactcctaaaaaagcccaggtctctaagtctcttaaagaacgcctcggcatgtctgctgaccctgataatgaggatgccactgataaggtgaacaaagtgggagaaatccacgtgaaaaccctggaggagattctgctggagagagcctcccagaagcggggagaactccagactaagctgaaaacagaagggccctcaaaaacagatgactccacctccggcgcacggtccagcagcactattcgcattaagacattttcagaggtgctggcggaaaaaaagcaccgacagcaggaagctgagcggcaaaaatctaaaaaggatacaacttgcatcaaactgaagatcgactccgaaatcaaaaagaccgtggtcctgcctccaattgtggcctcacggggacagtctgaggagcccgcagggaagaccaagtcaatgcaggaagtccacatcaagactctagaagagatcaaattggagaaggcactgcgagtacagcagagcagtgaaagctccacgtcttcccctagtcaacatgaggctaccccaggagctcggagactgttaaggattaccaaaaggacaggcatgaaggaagaaaaaaatctgcaggaaggcaatgaggtggacagccagtcttcaatacgcaccgaggccaaggaggcgtcgggtgaaaccaccggcgtagatatcactaagatacaggtgaaaaggtgtgagacgatgcgggagaagcacatgcaaaagcaacaagagcgcgaaaagtcggttttgacacctctgagaggagatgtagcctcttgcaacacccaggtggctgaaaaacccgtgctcaccgcagtccccggcatcacccgccaccttactaagcgccttcccactaaatctagtcagaaagtggaggtcgaaaccagtggaattggtgactcgttattaaacgtgaagtgcgctgctcagactctggagaagcgcggaaaggctaaacctaaagtcaacgtcaaacctagcgtggtcaaggttgtgtctagtcccaaattggcacctaagagaaaggctgtagaaatgcacgcggccgtcattgccgctgtgaagcccctctcgagctcttcagttttacaagaacctccggccaaaaaagccgctgtcgctgtggtccctctggtgagtgaggataagagcgtcactgtgcccgaggcggagaatccacgcgattccttggtgttgccaccaactcaaagcagctcggattctagtccccccgaggtgagtggcccatctagtagccagatgtctatgaaaacaagaagactgagttcagcatcaactggcaagccacctctgagtgtagaggacgatttcgagaaattaatctgggagatttccggaggaaaattagaggcggagattgacctggatccgggtaaagacgaggatgatctgctcttagagctgagcgagatgatcgattcctag

SEQ ID NO: 211785 - DNA, 2433 bp, synthetic construct
  misc_feature 1..2433: note = Description of Artificial Sequence: Synthetic coding sequence
  source 1..2433: mol_type = other DNA
atgcccaaccagggcgaggactgctacttcttcttctacagcacctgcactaaaggggattcctgtccttttcggcattgtgaagccgccattggaaacgagactgtctgtactctgtggcaggaaggtcgctgtttcaggcaagtctgtcgtttcaggcacatggaaatcgataaaaagcgtagtgaaattccatgctactgggaaaaccagcctactggctgccagaagttgaactgtgcctttcaccacaatagagggcgatatgttgatgggttgttcctgccccctagcaaaactgtgctgcccactgtgcccgagagccccgaggaggaagtcaaagcttctcaattgagcgttcagcaaaacaaactgagtgtgcaaagcaatccatctcctcagttgagatctgtgatgaaagtcgagtcttctgaaaatgtacctagtcctacacacccaccagttgttataaatgccgccgacgatgatgaggacgatgacgatcagttctccgaggaaggtgatgagaccaagaccccaacacttcagccgacaccagaggtccataatggcctgcgggtgactagcgtgcggaagcctgccgtgaatatcaagcaaggtgagtgtttaaattttggaatcaaaaccctggaggaaattaagtcgaaaaaaatgaaggaaaaatctaaaaagcagggagaagggagttccggagttagctcactactgcttcaccctgagcccgtccccggccccgagaaggaaaacgtccggacggtagtgagaacagtgaccctgagtaccaagcagggagaggagccactggtgcgcctttccctgacagagcggctcggaaaaaggaagttttccgcaggaggtgactccgatcctccattaaaaaggtctctggcgcagcggcttggaaagaaggtggaggctcccgaaacaaacatagacaagacgcctaagaaggcgcaggtgtctaagtcccttaaggaacgtttgggcatgagcgctgatcccgataacgaggatgccaccgacaaagtgaataaagtgggagagatccatgtaaaaactctcgaggagatactgctagagagagccagccagaaaagaggcgagctgcaaaccaagctgaaaaccgaaggcccctcgaaaacagatgattcaacttcgggcgctcgatccagctccaccatccgcatcaagaccttttccgaagttttagcggagaaaaagcatagacagcaggaagcagagcgacagaagagtaaaaaggacacaacatgcatcaagcttaaaattgacagtgaaattaagaagactgtggtgctccctcccatcgtcgctagcagaggccagagtgaggagcctgccggcaagactaagtcaatgcaagaggtgcatattaagactctagaggagatcaaattggaaaaggccctcagagtgcaacagtcgtcagaaagctccacgtcatcgccttctcagcatgaagctacccccggggctaggcggctgctacggattaccaaacgcacaggcatgaaggaggagaagaacctccaggaggggaatgaggtggactctcagtccagcattcgaacagaagcaaaagaggctagtggtgagacaaccggagtggatatcaccaagatacaggtgaagcggtgtgagaccatgagagagaaacacatgcagaagcagcaggaacgtgaaaagagcgtcctcacgcccctgcgcggtgacgtagctagctgtaatacccaggttgcagagaaaccggttctgactgctgtgcccggtattacgagacatctgacgaagaggctgccaactaagagttcgcagaaggtcgaggtggagacaagtgggattggcgattcccttctgaatgtaaagtgtgcagctcagacattggaaaagcgcgggaaagccaaacccaaggttaatgtgaagccatcggtcgtcaaggtggtgagttcccccaaactggctcctaaacgcaaagccgtagaaatgcatgctgccgtgattgctgcggtcaaacccctgtccagctccagcgttttgcaggaaccccctgctaagaaagctgcggttgcagttgtgcccttggtgagcgaagacaaatcagtcacagtgcccgaggccgaaaatccaagagattccctggtcctaccgcctacccagtcaagttcagatagctctcccccagaagtgtcgggcccttcttccagccagatgagtatgaagacacgacgcctgagctctgcttccacgggtaagccacctctgtcagtcgaggacgacttcgaaaaactcatctgggaaatctccggaggcaaactggaggctgagatagacctggacccaggaaaagacgaagacgacttgctgctagagctttcggagatgatcgatagttag

SEQ ID NO: 211786 - DNA, 2433 bp, synthetic construct
  misc_feature 1..2433: note = Description of Artificial Sequence: Synthetic coding sequence
  source 1..2433: mol_type = other DNA
atgcccaaccagggcgaggactgctacttcttcttctacagcacctgtaccaagggagatagttgtcccttccgtcactgtgaggcagctattggcaacgagacggtgtgtaccttgtggcaagaggggaggtgttttagacaagtctgccggtttcgccacatggaaatcgataaaaaacggtccgagattccctgctattgggagaatcagcccactggctgtcagaagcttaactgtgcttttcaccacaatcggggcagatacgtggacggcctttttttacccccaagcaaaaccgttctaccaacagtgccagagtcaccggaggaagaggttaaggccagccagctctccgtgcagcagaacaagctctcagtgcagtcaaacccgagcccccagctgagaagcgtgatgaaggtcgaatctagtgagaatgtaccatcaccaacccaccctccagtagtgatcaacgcagcggatgacgacgaggacgatgacgaccagttctctgaggaaggcgatgagaccaagaccccgacccttcaaccaactcccgaggtgcacaatggcctgcgcgttacatctgtgaggaagcccgcggtcaatatcaagcagggtgagtgcctgaacttcggaatcaagacccttgaagaaatcaaatccaagaagatgaaggaaaagagtaagaagcaaggggaaggaagttcaggggtgtcttcccttctgctgcatcccgagccagtgcctggcccagaaaaggaaaacgtgagaacagttgtcaggaccgtgacactgtcaactaaacagggcgaggagccactagtccgattatctttgactgagcgactggggaaacgaaaattttccgcagggggtgactcagatccaccattgaagagatccctagcccaacgactaggcaagaaggtagaggcaccggagacaaatattgacaagactcctaaaaaagctcaagtttcaaagagcctcaaggaacggctgggaatgtccgctgatcccgataacgaggatgcgacagacaaggtaaataaagtgggggaaatccatgtcaagaccctcgaggagatcctgctggaaagggcctcacagaagcggggcgaattacaaactaaacttaagactgaaggcccttctaagacagacgacagtaccagcggtgctaggtctagttcgacgatccgcattaagaccttttcggaggtgttagctgagaaaaagcacagacagcaggaagcagaacgccaaaagagtaaaaaagatacgacatgtatcaaactgaagatcgattcagaaatcaaaaagactgttgttctgccccctatcgtggcgagccgggggcaatcagaagagccagcaggaaaaaccaagtccatgcaggaagtacacataaaaactcttgaagagatcaagctggaaaaagcactaagagttcagcaatctagcgaaagtagcacttcctccccctcccagcatgaagccacccccggcgcgcggcgactactgcgcatcactaaaaggactggaatgaaggaggagaaaaatctccaggaaggaaatgaggttgacagccagagctcaattagaacagaagccaaggaggctagcggggagactacgggggtagacattacaaaaatccaagtgaagcgctgcgaaacaatgcgagaaaagcacatgcagaaacaacaggagcgtgagaagtctgtcctcaccccgttgagaggcgacgtcgcctcctgcaacacacaggtggccgagaagccggttctgaccgccgttccagggatcacaagacacctgacaaaacgcctaccgactaagtcttctcagaaggttgaggtcgagacgtccggcattggagacagtctcctgaatgtgaaatgcgctgcacaaaccttagaaaagagaggcaaagccaagcccaaagtcaacgtgaaaccatcagtcgtaaaggtggtctctagtcctaagcttgctccgaaaaggaaggccgttgaaatgcacgccgctgtaatcgccgccgtgaaacccctctcttcaagcagtgtcctccaggaacccccggccaagaaggccgctgttgcagtcgtcccccttgtctctgaggataaatctgtcacagtgcctgaggcagaaaatccaagagactcactcgtgctccctccaacccagagcagtagcgattcttcaccgcctgaggtttcaggcccatcatccagccagatgtccatgaagacgagacgcctgtcctcagccagcactggcaaacccccgttatccgttgaggacgacttcgaaaaattgatttgggagatttcggggggcaaactggaggcggagatcgacttggatcctggtaaggatgaagatgacctgttgctggaattgagcgagatgattgattcttag

SEQ ID NO: 211787 - DNA, 153 bp, synthetic construct
  misc_feature 1..153: note = Description of Artificial Sequence: Synthetic coding sequence
  source 1..153: mol_type = other DNA
atgcccaaccagggcgaggactgctacttcttcttctacagcacctgcacaaagggcgactcctgccctttcaggcactgcgaggccgctataggaaatgaaactgtctgcaccctatggcaagaagggcgttgcttccgccaggtttgttag

SEQ ID NO: 211788 - DNA, 1548 bp, synthetic construct
  misc_feature 1..1548: note = Description of Artificial Sequence: Synthetic coding sequence
  source 1..1548: mol_type = other DNA
atgcccaaccagggcgaggactgctacttcttcttctacagcacctgcactaagggggattcttgtccatttagacactgcgaagctgctatcggtaacgagacggtctgcactctatggcaggaaggaagatgcttccgacaggtttgccgctttagacatatggaaatcgacaagaagagaagcgagatcccatgctactgggagaaccaacctaccgggtgtcagaaattaaactgcgcctttcatcacaataggggacgctatgtcgatgggctgtttcttcccccatctaagactgtgttacctactgtccccgaatcaccggaagaggaggtgaaggcaagtcagctgagcgttcagcagaacaaactgtcggtccaaagcaatccaagtcctcagctcagaagtgtcatgaaggtggaatctagtgaaaatgttccgtctccaactcacccacctgttgtgatcaatgctgcagatgatgacgaagatgacgatgatcaattctctgaggaaggggatgagaccaaaactcccaccttacagcccactccagaagtgcataacggcctgcgcgtgacatctgtgcgcaaaccagccgtgaacatcaaacagggcgaatgcctgaactttgggattaaaacactagaggaaattaaaagtaaaaaaatgaaggagaagtctaagaagcagggggaaggatctagtggtgtaagctctctgctacttcatcccgaacccgtgcccggacctgagaaagagaacgtgagaacggtggtacgaaccgtcacactctctacaaaacagggcgaagaacccctagtgcggctctccctgaccgagcgccttggcaagcgaaagttctccgccggaggcgattccgacccacccctgaagaggagcctggctcaaaggctcggcaaaaaggtggaggcaccagagacaaatattgacaagacacccaaaaaagcgcaggtgagtaaatccctgaaggaacgtttagggatgtctgcagatcctgacaacgaagatgcaactgacaaagtaaacaaagtcggcgaaattcatgtgaaaacactcgaagagattctcctggagcgtgcaagccagaagcgaggcgaacttcagacgaagctgaagaccgaagggcccagtaagacggacgatagcacctctggtgcaaggagcagcagtacaatcagaatcaagacttttagcgaagtgctcgctgaaaagaagcaccgccagcaggaggctgaaagacagaaaagcaagaaggacaccacatgtatcaagctgaaaattgatagcgagataaaaaaaaccgttgtcctgccccccatcgtggccagtcgtgggcagtctgaggaacctgccggaaaaaccaagagtatgcaagaggtgcatatcaagacactcgaagagatcaaacttgagaaagcactgagggttcagcagagcagtgaatctagcacttccagcccttcccagcatgaagccacacctggagcccgtcgacttctacgcatcacgaagagaacctag

SEQ ID NO: 211789 - DNA, 2271 bp, synthetic construct
  misc_feature 1..2271: note = Description of Artificial Sequence: Synthetic coding sequence
  source 1..2271: mol_type = other DNA
atggagatcgacaagaagcggagcgagatcccctgctactgggagaaccagccaactggctgtcaaaaactgaattgcgcctttcatcataaccgcggacggtatgtggacggacttttcctccctccgtccaagaccgtgctgccaaccgttccggagagtcccgaagaagaggtgaaggccagccagctgtcagtgcagcagaacaagctctccgtgcagagtaaccctagcccccaactgagaagcgtcatgaaggtggaatcctccgagaacgttccttcacccacccatccacctgttgttataaacgctgccgatgacgacgaggacgatgatgaccagttcagtgaggaaggggacgaaaccaagacaccgaccctccagccaacccccgaggtacacaatggcctgcgtgtgactagtgttaggaaacccgcagttaatataaagcagggtgagtgtcttaacttcgggatcaaaacactggaagagataaaatctaaaaagatgaaagagaaatctaaaaagcagggggaagggagctccggggtgtccagccttttgctgcatccggagccagtgccaggaccagagaaggaaaacgtgaggacagttgttcgaacagtcactctgagcaccaagcagggcgaagaacccctggttcggcttagcctgaccgagagactcggaaaaaggaagtttagcgctggcggagattctgatcctcctctaaagaggtcactcgcacagcgtctcggtaagaaggtggaggcccctgagactaacatagacaagacacccaaaaaagcccaagtgtcaaagagcttaaaagaaagactgggaatgagcgcggacccggataacgaagacgccaccgacaaagttaataaggtcggcgagatccacgttaagacacttgaggaaatcctactagagagggcatcccagaagcggggagagctccagacaaagttgaaaacggaaggcccctctaagactgacgattcaacgagcggggcacggtcctcatccacgatacgcatcaagactttctccgaagtgttagccgagaaaaaacaccgccagcaagaggccgaacgtcagaaatcaaaaaaagacactacttgcatcaagctaaagatcgactccgaaatcaaaaagaccgttgtgctgcctcccatagtcgcttctcgaggccagtctgaggagcccgctgggaagacgaaatccatgcaagaggtgcacatcaagacactggaagagatcaaactcgagaaggccttgcgggtacagcagagttccgaatcttcaaccagctccccctcacagcatgaggcaactcctggtgcacgccgcctccttcggatcactaagaggactggcatgaaggaagagaagaaccttcaagaagggaacgaagtcgattctcaatcatctatccgtacagaggccaaagaggcgtccggggaaaccactggcgttgacatcacgaaaattcaggtgaaacgatgcgaaacaatgagggagaaacacatgcagaagcagcaagaacgggagaaatccgttctcacaccactacgcggagatgtggccagctgcaacactcaggtggcggaaaagcctgtgcttaccgcagtcccaggcataaccagacatcttaccaagcgccttcctaccaagagttctcagaaggtggaggtggagaccagtgggatcggagatagcctcctcaatgtcaaatgtgcggcccaaaccttagagaaacgggggaaggcaaagcctaaggtcaacgtgaagccatctgttgtgaaagtcgtgtcgagcccaaagctggctcccaagagaaaggccgtggagatgcatgccgcggtgattgctgccgtgaaaccgctttcctctagtagcgtcctacaggagccaccggccaagaaggctgccgtcgctgtggtccctctggtaagcgaggacaaatccgtgacagtaccagaagcagaaaaccctcgggattcattagtcctgcccccgacccagagcagtagtgatagtagtccgccagaagtttccggcccttcatccagccaaatgagcatgaagactcgccgcctttcctcggctagtacaggcaaaccaccactgtcagttgaggatgacttcgaaaagctgatctgggagataagcgggggcaagctggaagctgaaatagacttggacccaggaaaggacgaggatgatctgttactcgaattgagtgagatgattgacagttag

SEQ ID NO: 211790 - DNA, 2433 bp, synthetic construct
  misc_feature 1..2433: note = Description of Artificial Sequence: Synthetic coding sequence
  source 1..2433: mol_type = other DNA
atgcccaaccagggcgaggactgctacttcttcttctacagcacctgtaccaagggcgattcctgtccatttagacactgtgaggctgctataggcaatgaaaccgtgtgtactctatggcaggaagggaggtgtttccgccaggtgtgcaggttcaggcatatggaaatcgataagaaacggagcgagattccttgttactgggaaaatcagccaacggggtgtcagaaattaaattgtgcatttcatcacaaccgcggcagatatgtcgacggcctattcctgccaccatccaagacagtgcttccaacagtgcccgaaagtccggaagaggaagtgaaagctagtcagctgagcgtgcagcaaaacaagttaagcgtgcaaagtaacccctctccacagctgcggagtgtgatgaaggtcgaaagctccgaaaatgttcccagtccaacccatcctcccgtggtgatcaatgctgcagatgacgacgaggatgacgatgaccaattctctgaggaaggggatgagaccaagactcccactttgcagcctactcctgaggtgcacaatggcctaagagtgacctccgtacgaaagcctgcagtcaatattaaacagggagagtgtctgaattttggcattaaaaccctagaagagattaaaagtaagaagatgaaggagaagagtaagaaacaaggcgaaggcagctctggcgtatccagtttactactgcaccccgagccagtgcctgggccagaaaaggagaacgtgcgaacagtggtgagaacagtgactctctctacaaagcagggagaggaacctttggtccggctttcactgaccgagcggctaggaaagcgaaaattcagtgcaggcggggactccgatcctccactgaagcgcagtttggctcagcggctcggaaaaaaggtggaagcccccgaaacaaacattgataaaacgccaaaaaaagcccaagtctctaagagccttaaagagcgactcggaatgtctgctgacccagacaatgaggacgcaacggacaaggtgaacaaggtaggagagattcacgttaagaccctggaggaaatcctacttgaaagagcatcacagaagcggggggagctgcagacgaaactcaagaccgagggtccttcaaagactgatgatagtacgtctggggcacggtctagttcaaccatcaggatcaagacatttagcgaggtgcttgccgagaagaaacatagacagcaggaagctgaaaggcagaaatctaagaaagatactacctgtatcaagctgaagatcgatagtgagatcaagaagacagttgtgttaccccccattgtggcttcccgggggcagtcagaggagccagccggcaagactaaaagcatgcaggaagtgcatattaaaactctcgaagagataaagctggaaaaagccctccgggttcagcagagtagcgagtcctccacctcttccccatctcagcatgaggccacacccggggcccgccgtctgctgaggatcactaaacgcaccggaatgaaagaagaaaaaaatctgcaggaggggaatgaggtagactcgcaaagcagtatcagaacagaggcgaaagaagcttctggagaaaccacgggggtggacattaccaagatccaggtcaagcggtgcgagactatgagggaaaagcacatgcagaagcagcaagaacgcgagaaaagcgtcctaaccccgctcagaggggacgtggccagctgtaatacccaggtggccgaaaagccagtcctgacagctgtgcctgggattacacgacacctcaccaagagactcccaacaaagtcaagccagaaagtggaagtggaaaccagcggcatcggggattctcttctgaacgtcaagtgcgcagcacagacccttgagaagcggggtaaggcgaagcccaaagtcaatgtcaaaccaagcgtggtcaaggtggtttcatcacctaagctggcccccaaacggaaagcagtcgagatgcatgctgccgtaatagccgccgtgaaaccactgtcctcaagctctgttttgcaggagcccccagccaagaaggccgccgtggccgtggtgccactggtgtccgaagataaaagtgtcaccgtgcccgaagctgagaacccacgggatagcctggtactgcctccgactcagtcttctagtgactctagcccaccggaagtctccggcccttcctcaagccagatgagcatgaaaacgaggcgccttagcagcgcctcaactggcaagccaccactgtcagtggaagatgacttcgagaagcttatctgggaaatatctggaggcaagctggaagcagagatagatctcgaccccggaaaggatgaagatgatctgctgctggagcttagtgagatgattgactcctag

SEQ ID NO: 211791 - DNA, 1584 bp, synthetic construct
  misc_feature 1..1584: note = Description of Artificial Sequence: Synthetic coding sequence
  source 1..1584: mol_type = other DNA
atggagcaccccagcaagatggagttcttccagaagctgggctacgaccgagaggacgttctgagagttcttggaaagctgggcgaaggagctctagtgaatgacgttcttcaagaacttatcaggaccggatctcgaccgggagccctcgagcaccccgccgctcccaggctcgtgcctcgcggttcctgtggcgtgcccgacagcgcccagcggggacctggaacggcgctggaagaggatttccgcacattggcctctagccttcgccccatcgtgattgacggcagtaacgtggccatgtcgcatggcaataaagaaacgttttcatgtcgcgggatcaagttggccgtggattggttcagagatcgcggccacacctacatcaaggtgtttgtgccttcctggcgcaaggaccccccccgcgctgatacgcctattcgcgaacagcatgttctggcggagctcgagcggcaagccgtcctggtttacaccccttcccgaaaggtgcatggtaaacgactggtctgctacgacgaccgatacattgttaaggttgcgtacgagcaggacggggtgattgtgagtaacgacaactatagagatttgcagtctgaaaaccctgagtggaagtggttcatagaacagcgcctactcatgttttcgtttgtcaacgatcgcttcatgccaccagatgaccccttgggtcggcacgggcccagcctcagtaattttctgtctaggaagcctaaaccccccgaaccttcatggcagcactgtccctacggaaaaaagtgtacctacggtatcaaatgcaagttctatcaccccgaacggcctcatcacgctcagttagctgtcgcggacgagttgagggctaaaactggtgcacgcccgggggccggggcggaggaacagaggccacccagagctcccggcggatccgccggagcgagggccgcgccaagagaaccgtttgctcacagtctgcctccagctcgaggatcccctgatctggccgcgcttagagggagtttttccagactcgcattcagtgacgacctggggccactcggtccgccgctgcctgtcccagcctgttcactcactccaaggttgggcgggcctgattgggttagcgccggaggtcgggtcccaggccccctatccttgcccagtcccgaatctcaatttagcccgggtgatctcccccctcctcctggtctgcagctgcagccaagaggagaacacagacctcgcgatctgcacggggacttgctgtctccacgccggcctccggacgacccttgggcaagacctccaaggtctgacagattccctggccggtccgtatgggccgagccagcatggggtgatggtgctaccggcggtcttagcgtttacgccaccgaggacgatgagggggacgcccgcgcacgcgccagaatagccctctactcagtgttccccagggatcaggtagatcgggtgatggccgcatttcctgagctgtccgatctggcgagacttatccttctggtacaacgctgccagtccgcaggtgccccactgggcaagccctag

SEQ ID NO: 211792 - DNA, 1584 bp, synthetic construct
  misc_feature 1..1584: note = Description of Artificial Sequence: Synthetic coding sequence
  source 1..1584: mol_type = other DNA
atggagcaccccagcaagatggagttcttccagaagctgggctacgatagagaggacgtcctgagggtgctcggaaaactaggggagggagcccttgtgaatgatgtgctccaggagctcatccgaactggttcgcgacccggggccctggaacacccagccgccccgcgcttggtaccacgcgggtcctgtggcgttccagactctgcccagagggggccgggcactgcacttgaggaggacttccgtactctggcttcttccttacggcccatagtgatcgacggctccaatgttgccatgtcacacggcaataaggaaaccttctcttgtagaggcatcaaactggcagtcgattggttccgggatcggggacacacgtatattaaggtatttgtgccctcttggagaaaggacccaccccgcgctgacacgcccattagggagcagcacgtgctggccgagctggagcggcaggccgttcttgtgtacactccatctcggaaagtccatgggaagcgattagtgtgctatgatgacaggtacatagtcaaagtcgcttatgagcaagacggagtcatcgtatctaacgataactacagagatctacagtcagaaaatccagagtggaagtggtttattgagcagaggctccttatgttctcatttgtgaacgatcgatttatgcctccggatgatcccttagggcggcacggaccttcattatccaacttcctgagccgtaagccaaagccccccgagccaagttggcagcactgtccgtacggcaaaaaatgcacgtatggcattaagtgcaagttttaccatccagaaaggccacatcacgcacagctggctgtggccgatgagttacgagccaagaccggggccaggcccggggccggggctgaagagcaacgaccacctagagcgcctggtgggagtgcaggcgccagagctgcacctagggagccctttgctcacagccttccccccgctcgtggatctcctgacctagcagcgctgcgtggctccttcagcaggcttgcatttagcgacgatctggggccattgggcccccccctgcccgtgcccgcctgcagcctgacccctaggcttggcggccctgattgggtctccgccggcggacgagtaccgggccccctctccctgcccagtcccgaaagccagttttcgcccggggacttaccgcctccacctggactgcagctgcagccccgcggagagcatcgtcctagagacttgcacggcgatctgctgagtcctcgacgccctccagatgacccctgggccaggccgcctcgctctgatcgcttcccagggaggtcagtgtgggccgaacctgcctggggcgacggcgccacaggcggcctatcggtgtacgctaccgaggacgacgagggtgatgccagggcgcgcgcccgcatagccttgtacagtgtctttcctcgcgatcaagtggacagagttatggctgcctttccagaactgtccgacctggctaggctgatccttctcgtccagcggtgtcagagcgccggcgctccactcggcaagccatag

SEQ ID NO: 211793 - DNA, 966 bp, synthetic construct
  misc_feature 1..966: note = Description of Artificial Sequence: Synthetic coding sequence
  source 1..966: mol_type = other DNA
atggagcaccccagcaagatggagttcttccagaagctgggctacgaccgtgaggatgttctcagggttctggggaagcttggcgagggagcactcgtcaacgatgtgctgcaggaacttatacggacaggctctcggcccggcgcactggaacacccggcggctcctcgattggttcctagggggtcctgtggggtgccagactccgcacagcggggcccaggcaccgccttggaggaggactttagaacacttgccagctcattacgcccaatagtgatcgatggatcaaacgtagcaatgagccacgggaacaaggagacgttctcgtgccgcggaatcaagctcgcggtcgactggttccgagatcgtggtcacacttatatcaaggtgttcgttcctagttggagaaaggaccccccgagggccgacaccccaattcgtgagcaacatgtcctggccgagctggagcgtcaggcagtgttagtgtacacaccaagtcgcaaggtccacggaaagaggctcgtttgctatgacgatcggtacatcgtgaaagtagcttatgaacaggatggagtgattgtgtctaatgacaattatcgggaccttcagtcggagaacccggagtggaaatggtttatcgaacagagacttctgatgttctcctttgtcaatgacagattcatgcctcctgacgatccacttggccgccatggaccttccttgtctaattttctgtccagaaagccaaagccccctgagccctcatggcagcactgtccctatggaaaaaagtgtacttacggaataaagtgcaagttctatcaccccgagcgtccccaccatgcacaacttgctgtggcagatgagttaagagcaaaaaccggggcgaggctcggcgtgaggggccggcctcctgctagtgccaggccagctgccccagcagcaggccgcacccccccctag

SEQ ID NO: 211794 - DNA, 966 bp, synthetic construct
  misc_feature 1..966: note = Description of Artificial Sequence: Synthetic coding sequence
  source 1..966: mol_type = other DNA
atggagcaccccagcaagatggagttcttccagaagctgggctacgaccgggaagatgtcttgagagtacttggcaagttgggcgaaggcgctctcgtgaacgatgtgttgcaggagttgatcaggacagggagtcgtcctggcgcgctagaacatccagctgccccaagacttgtgccccgcgggagctgcggtgtgccggacagcgcgcagagggggccagggaccgcactggaggaggattttcgtacactggccagcagcttaagacccatcgtgattgatgggtccaatgtggccatgtcacatggaaataaagaaacgtttagctgtaggggtattaaactcgcagtggactggttccgcgaccgagggcacacttatatcaaggtgtttgttccgagctggagaaaggaccccccaagggctgacacgcctattcgggagcagcacgtactcgcagaactcgaacggcaggctgtgcttgtgtatactccaagtagaaaagtgcatgggaagcggttggtgtgctacgacgataggtacatcgtgaaggtggcgtatgaacaagacggggtgattgtaagcaatgacaattacagagacctgcagagtgaaaacccagaatggaaatggttcatcgaacaacggttgctcatgttctcctttgtaaatgatcgttttatgcctcctgacgaccccctggggcgccacggaccttcactatcgaactttcttagcaggaaacctaagccacccgaaccctcttggcagcattgcccctacgggaaaaaatgtacatacggaattaaatgcaagttctaccaccctgaaaggccccaccacgcacaactggctgtcgctgatgaactcagggcaaagaccggagcacggcctgtgctgcccggacggcctccagctagcgctcggcctgctgcgcctgcggcgggaagaacccctccttag

SEQ ID NO: 211795 - DNA, 2211 bp, synthetic construct
  misc_feature 1..2211: note = Description of Artificial Sequence: Synthetic coding sequence
  source 1..2211: mol_type = other DNA
atggagatcggcaccgagatcagccggaagatccggagcgccatcaaggggaaactccaggaactgggggcctacgtggacgaggagctgcctgactacatcatggttatggttgcgaataagaaatcccaggaccagatgaccgaggatttgtctctgttcctcggcaataatactatccgttttacagtttggttgcatggcgtgctggataaactgcggagcgtgaccactgaacctagtagcctgaaatcgtcggatacaaatatcttcgatagcaacgtgcctagcaataagtcaaatttctcccgcggtgatgagaggagacatgaagcagccgtcccccctcttgctatacccagtgccagacctgagaagagggattctcgcgtgtcaaccagctctcaggaatctaaaacgactaacgtgcgtcagacatacgacgatggggctgcaacgcggcttatgtcaactgtgaaaccactgcgggagccagcgccctctgaggacgtcatcgacatcaagcctgagcctgacgacttgattgacgaggacttgaatttcgttcaggagaatcctctctcgcagaagaagccaacagtgacactgacctacgggtcatctcggccatcaatagagatctaccgcccaccagctagtcgaaacgccgattccggagtgcaccttaatcggctgcagtttcagcagcaacaaaactctatccacgccgccaagcagcttgacatgcagtcaagctgggtgtatgaaaccgggagactctgcgaaccggaagtgttgaactcccttgaagagacttacagccccttcttccgtaataactctgagaaaatgtccatggaagatgagaattttaggaaaagaaaactgcccgttgtgtccagcgtggtgaaagtgaagaaattcaaccacgatggtgaggaggaagaagaagatgatgactatggctcacgcacaggctccattagttcctcagtgtccgtaccggcaaagcccgagaggagaccgtctctgcctccctccaaacaggccaacaaaaacctgatcctcaaagcaattagtgaggcacaggagagcgtcacaaaaacgaccaactactccaccgtccctcagaagcagactctgcctgtagctccccggacacgaacctcccaggaggaattactggccgaggtggttcaggggcaatcaaggacaccgcggatttctccacctataaaggaggaggagactaagggagatagtgtcgaaaagaaccagggaacgcagcagcgccagctcctctcgcggctgcagatagaccccgttatggccgaaacactgcagatgtcccaggattattacgacatggagtctatggtgcacgccgatacaaggtcgttcattctcaagaaacctaagctatccgaggaagtagtcgtcgctcccaaccaggaaagcggtatgaagactgctgatagcctcagggtcctgtccgggcacttgatgcagactcgcgacctggtccaacccgacaagccagcttcacccaagtttatcgtaactctggatggcgtaccatcaccccccggctatatgtccgaccaggaagaggacatgtgtttcgaaggaatgaaacctgtgaatcagacagctgctagcaacaaggggttgagaggtttgctacatccgcagcaactccatttattatccagacagcttgaggatcctaacggatctttctccaatgctgagatgtccgaacttagcgtggcacaaaaaccagagaaactgctggaaaggtgtaaatactggccagcttgtaaaaatggggacgagtgcgcttatcatcaccctataagcccttgtaaagcctttcctaattgtaagttcgcggaaaaatgcttatttgtacatcccaactgcaagtacgatgcgaagtgtacaaagcctgattgtccgtttacacacgtgtctcggcggatacccgtgctgagtcccaagcctgccgtggcacctccagcccccccttcctccagtcagctgtgccggtacttccctgcctgtaaaaagatggagtgtccgttctaccatcccaagcattgtaggttcaacacccagtgtacccgccctgactgcacgttttaccacccgactattaacgtaccgccacgacatgccctgaagtggatacgtccacaaacctcggagtag

SEQ ID NO: 211796 - DNA, 1740 bp, synthetic construct
  misc_feature 1..1740: note = Description of Artificial Sequence: Synthetic coding sequence
  source 1..1740: mol_type = other DNA
atggagatcggcaccgagatcagccggaagatccggagcgccatcaagggaaagctgcaggaactgggagcgtacgtggacgaggagctgcctgactatatcatggttatggtcgccaacaagaagagccaggaccagatgacagaggacctctctctctttctgggcaacaataccattaggtttactgtgtggttgcacggtgtcctggataagctccggtcagtcacgacagaaccttcctctctgaaaagctcagacaccaatatatttgactcgaacgtcccctctaacaaatcaaacttttctcgaggggacgagcgcagacacgaggccgccgtgccgcctctggctatcccctccgcacgcccagagaagagagactcaagggtaagcacgtcaagtcaagagtctaagaccacaaacgtacgccaaacttacgacgatggggccgctacacgcctcatgtctacagttaagcccttgcgcgagcccgccccatcggaagatgtaatagacattaagcctgaacccgacgatttgatagatgaggatctgaactttgtccaggaaaaccctttgagtcagaaaaagcctaccgtgacactcacctacgggtcctctagaccctccattgagatctacaggccccctgcatcccgcaacgctgattcaggggtgcaccttaataggctgcagttccagcagcagcaaaactccattcacgctgccaaacagctggatatgcagagttcctgggtgtacgagaccggccgcttatgcgagccggaggtcctgaactcactggaagagacatatagcccatttttcaggaacaactctgaaaagatgagcatggaggacgaaaattttcgcaagcgcaaactgcccgtcgtttcttcagtggttaaggtaaaaaaattcaatcacgacggtgaggaggaggaggaggatgacgactatggctctagaaccggtagcattagctcaagtgtcagtgtgcccgccaaaccagagcggcggccttcactccccccgtcaaagcaggccaataagaaccttatcttaaaggcgatctctgaagctcaagagtccgtgacaaagacaacgaactatagtaccgttccacaaaagcagactctgcctgttgctccgagaactagaacttcgcaggaggaactgctggcggaggtcgtccagggtcagtccaggacaccccgcatatcacctccaatcaaggaagaggagaccaaaggcgattcagtcgagaaaaaccaggccgaaatgtctgaactctctgtggcccaaaaacccgagaaactactcgagcgctgtaaatattggcctgcatgcaagaacggggacgagtgtgcctatcatcacccaataagcccatgtaaagcatttcccaactgcaagttcgcagaaaagtgtttgttcgttcatcccaattgcaagtacgacgccaaatgtaccaagcccgattgtccttttacccatgtctcacgaagaattccagttctgtctccaaagcccgtggcgccacccgcacctccaagcagcagtcaactctgcagatatttcccggcgtgcaagaagatggagtgtcccttctatcatcccaaacactgccggttcaatacccaatgtacacgccctgactgcactttctaccatcccacaattaatgtgcctcctagacatgccctgaaatggattaggccacaaacctccgaatag

SEQ ID NO: 211797 - DNA, 921 bp, synthetic construct
  misc_feature 1..921: note = Description of Artificial Sequence: Synthetic coding sequence
  source 1..921: mol_type = other DNA
atgcggatgagcagcaagttccccagcccccccctgcccatcttcctgccccctgagcctgtcgatctgggaagcatcacatcatcatcctgcagcctgaatgagctggacaacatatcccacctgctgagaaaaatctctgctgacattaacgaaattaaaggaatgaaggccgcgatcctcactgtggaggcaaacctctttgatctgaatgttcgcgtgtccaagaacgaggctaagatttcatcactggaagtcaaaatgaatgagtattccacaacttatgaatgcaatcggcaattcgaggaccaggaggaggatacagagagccagtctcgcacaacggacgttaaaatcatcggcttccttcgcaatgtggagaagggcactcagcagcgccagttgctgtctaggctgcagattgaccctgtaatggctgaaacattacagatgtcacaagctgaaatgagtgaactgtcggttgctcagaagcccgaaaagcttctggaaagatgtaagtattggcctgcttgcaagaatggagatgaatgtgcgtaccaccacccgataagcccctgcaaagcattccccaactgtaagttcgccgaaaagtgcctgtttgtccacccaaattgtaagtacgatgccaagtgcactaaaccggattgtcccttcacacatgtgtctcgcagaatacctgtgctgagtcctaagcctgtggctcctcctgccccacctagcagctcccaactttgcaggtattttccagcatgcaagaaaatggaatgtccattctaccacccaaaacattgccgcttcaatacccagtgtacacggcccgactgcaccttctaccatcccaccatcaacgtcccccctcggcacgccctgaaatggatccgtccccaaacatcagagtag

SEQ ID NO: 211798 - DNA, 1716 bp, synthetic construct
  misc_feature 1..1716: note = Description of Artificial Sequence: Synthetic coding sequence
  source 1..1716: mol_type = other DNA
atggtgatggtggccaacaagaagagccaggaccagatgaccgaggatttgtcactcttcttaggtaacaatactattcggtttacagtgtggctgcacggagttttggacaaattgagaagcgtgactacagagccctcctctctcaagtcaagcgataccaacattttcgattctaacgtccctagcaataaaagcaacttctctagaggagatgagcgcaggcatgaggccgccgtgccgcctctggctatcccctcggctcgaccagaaaagcgggatagtcgggtctccacatcctcacaggaatccaaaaccacaaacgttcgccagacatatgacgacggggccgctaccagactgatgtctacagtgaagcccctgagagagcctgcgccttcggaggacgtaattgacataaagcctgaacctgacgacctcattgacgaagaccttaatttcgtgcaggagaatcccctttcccagaagaaacctacagtgactttaacatatggatcctctcgccccagcatcgaaatctataggccacctgctagtcggaacgcagattctggggtgcacctcaacagattgcaatttcagcaacagcagaacagcattcacgcagccaaacaactggatatgcagagcagctgggtgtatgaaacgggcaggttgtgtgagcctgaggtgctcaatagcctggaggagacatactctccgttctttcgcaataacagtgagaaaatgagcatggaggatgagaactttagaaagaggaagttacctgttgtgagctcagttgttaaagtcaaaaaatttaaccatgatggcgaggaggaagaggaggatgacgactacggctctaggacaggtagcatctcatcaagtgtttccgtgcctgctaagcccgaaaggcggcctagcctgccaccctccaagcaggctaataaaaaccttatcctgaaggccatcagcgaggcccaggaatcggtgaccaagacaaccaattatagcactgtgccacagaagcagaccttacccgtggctcctagaactcgcaccagccaggaagagctgttggccgaagtggtacaggggcagtccaggaccccgagaattagcccacccatcaaggaggaggaaactaagggtgactctgtcgaaaagaatcagggaacccaacagaggcagctcttatccagacttcaaattgaccctgtaatggccgaaactctgcagatgtcccaggctgagatgtcagaactctctgtcgcgcagaaaccagagaagctcctggaaaggtgcaagtactggcccgcctgtaagaacggtgacgaatgcgcatatcaccacccgatctcaccatgcaaggcctttccaaactgtaaatttgcggagaaatgcctcttcgttcatccaaattgcaagtatgatgcgaagtgcaccaagcccgactgccccttcacgcatgtctctcgccgcatcccagttctgagcccaaaacctgccgtcgcaccccctgcaccacctagttcctcccagctttgccgctattttccagcatgtaagaagatggagtgccctttctatcaccccaaacactgtaggtttaatacccagtgcacacgtcccgattgtaccttttatcatcccacaatcaacgttccccctcgccacgctctgaagtggattaggccacaaacctcagagtag

SEQ ID NO: 211799 - DNA, 2022 bp, synthetic construct
  misc_feature 1..2022: note = Description of Artificial Sequence: Synthetic coding sequence
  source 1..2022: mol_type = other DNA
atggagatcggcaccgagatcagccggaagatccggagcgccatcaaaggaaaactgcaggaactcggagcctatatagacgaagaactccccgattacatcatggttatggttgccaacaagaaatcacaggaccagatgaccgaagatctgtcactgtttctcggtaacaatacaatccggttcacagtctggctccacggggtcctggataagctccgatcagtgacgaccgagccatctagcctgaaatcatccgacaccaacattttcgactctaacgtgccatctaacaagtccaatttttctcgcggcgatgaacgcagacatgaagccgcagtccctcctttggccatcccctctgctaggccagagaagcgtgacagccgcgtatcgacaagctcacaggaatcgaagactactaacgtgcgccagacctacgatgacggcgccgcaacccgcctgatgtcaactgtaaaaccattacgcgaaccagcccccagcgaagatgttatagacatcaagccggagccagacgatcttattgacgaggacctgaattttgtacaggagaaccccctatcacaaaaaaaacccactgttacccttacctacggatcaagtaggccctctatcgaaatctacaggcccccggcgtcacggaatgctgacagcggcgtgcatttgaaccgcctgcaattccagcagcagcagaactccatacacgccgcaaagcaactggacatgcagtcgagctgggtgtatgagaccggccgcctatgtgagccagaggtgctgaatagcctggaggagacgtacagccctttttttagaaataactcggagaagatgagtatggaagacgagaacttccgaaaacgtaaacttcctgtagtgtccagcgtggtcaaggtaaagaagtttaaccatgatggtgaggaggaggaagaggatgacgactacggaagtcggactggaagcatttcatcttcggtgagtgttcctgctaagcccgaaaggcgtccatccttacctcctagcaaacaagctaataagaatttaatactgaaagcaatctctgaagctcaggagagcgtaaccaagacaacaaattactccaccgttccacagaagcagaccctacctgttgccccaaggacccgtacatcacaggaggagttgctggcggaggtggtgcaagggcagtctaggacccctcgaatctctccgcctataaaagaggaggagactaagggtgactccgttgaaaaaaaccagggcacccaacaacgacagctactaagtcgccttcagatcgaccccgtgatggctgagaccctacagatgagtcaagattattacgatatggaatccatggtgcacgctgatacccggtcatttatactgaagaaaccgaaactttccgaagaggtggttgtggctcccaatcaagaaagcggcatgaaaacagcagattctctgagagtgctgtctggacatttgatgcaaacccgggacctggtccagcccgacaaacccgcgtctccgaaattcatagtcaccctggacggagtcccgtccccaccaggttacatgagtgaccaggaagaggatatgtgtttcgagggaatgaaaccagtaaaccagacagccgcgagcaacaagggtctcaggggacttctccatccccagcagctgcacctcttgtcacgtcagctggaggacccaaactgtaaatacgacgcaaaatgcacaaaacccgattgccctttcacccacgtaagtcggcgcattcccgtactcagcccaaaacccgccgtagcaccaccagcccccccttcctcgtcacagctgtgtagatacttccctgcttgtaagaagatggaatgcccattttatcaccccaagcattgcagattcaacacccagtgcacacggcccgactgcactttttatcaccccacaattaatgtcccccccagacacgccctgaaatggattaggccccagacatcagaatag

SEQ ID NO: 211800 - DNA, 1716 bp, synthetic construct
  misc_feature 1..1716: note = Description of Artificial Sequence: Synthetic coding sequence
  source 1..1716: mol_type = other DNA
atggtgatggtggccaacaagaagagccaggaccagatgaccgaggacctcagcctgttcttgggaaacaataccatacgatttactgtgtggctgcacggagttttagacaaacttagaagcgtgaccacagagcccagctccctgaagtcatccgatacgaatatctttgatagcaacgtgcccagcaacaagtccaatttctcacgtggcgacgagagaaggcatgaggcagcagtacctcctctggcaatacccagcgctaggcctgaaaaaagagatagtcgggtcagcaccagcagccaggagtccaaaactaccaacgttagacaaacctatgacgacggcgcagcaactcgcttgatgagtacagttaaacctctgcgcgagccggccccaagcgaggatgtgatagatattaagcccgagcctgatgatctgatcgatgaagatctaaactttgtgcaagaaaaccccctctcacaaaaaaaacccaccgttacactcacctacggtagctcacgtccctccatcgaaatttaccggccaccagcctctaggaatgctgatagtggtgtgcacttaaaccgtcttcaattccagcagcaacaaaactccatacacgctgctaagcaactagatatgcagagttcatgggtgtacgagaccggcaggctttgcgaacccgaggtgttaaattccttggaggaaacatactcgccattctttagaaataattcagagaagatgtccatggaggacgaaaacttcagaaagaggaaactcccagtcgttagctctgtcgttaaagtgaagaagtttaatcacgacggcgaggaggaggaagaggatgacgactacggtagtcgaacagggagcatctcttcctccgtgagcgttcccgctaagccagaacgcaggccaagtctgcctccttccaagcaagccaacaagaacttgatacttaaggcaatctcagaagcccaggagtccgtcacgaagacgactaattacagcacggtgccccagaaacagacactcccagtcgctccccgaacccggactagccaagaagaactcctggcagaggtggtgcaggggcaaagtcggactcctagaattagccctcccattaaagaggaggaaacaaaaggtgatagcgtggaaaaaaatcagggcactcaacagcgccagctcttatcacgactccagatcgacccagttatggctgagacgctccagatgtcacaggctgagatgtcagagctatcggtcgctcagaaaccagaaaagctcctggaacggtgcaaatactggccagcctgtaaaaatggtgatgaatgcgcttaccaccacccaattagcccatgtaaagcttttcctaattgtaaattcgcagagaaatgtttattcgtccaccctaactgcaaatacgatgctaaatgcaccaagccagactgccctttcactcacgtgtctagacgaatccctgtgttgagtcccaagcctgccgtggccccaccagccccacccagctcctcacagttatgtcgctattttcctgcatgcaagaagatggaatgtccgttctaccaccccaagcattgcaggttcaacactcagtgcacccgcccagattgcaccttttaccaccctacaatcaatgttccaccacgccatgcgcttaagtggatacgtccccaaacctctgagtag

SEQ ID NO: 211801 - DNA, 1758 bp, synthetic construct
  misc_feature 1..1758: note = Description of Artificial Sequence: Synthetic coding sequence
  source 1..1758: mol_type = other DNA
atggagatcggcaccgagatcagccggaagatccggagcgccatcaagggaaagttgcaggagttgggtgcttacgtggacgaggaattacctgactatattatggtgatggtcgctaacaaaaaaagccaggaccagatgaccgaggacttgagcctcttcttaggcaacaacaccatcagatttacagtctggcttcacggagtgctcgataagttgcggtctgttacaacagagcctagcagtctgaagtcctctgatactaatatattcgacagcaatgtccctccactggccatccctagtgccaggccggagaaaagagactcacgtgtgagcacttctagtcaggagtccaagacgacaaacgttcgccagacttacgacgatggggccgctacccgcctaatgtcgacggttaagcccctcagagaacctgctccttcggaggatgttatcgacataaagcccgaacctgacgacctaatagacgaggatctgaactttgtacaggagaatccgctcagccaaaagaagcctaccgttacactgacttacggttcttcacgtccgagcatagaaatctataggcctcctgcctcacgaaacgcagacagcggcgtgcatcttaatcgactccagttccagcagcaacagaatagcatacacgcggcgaaacagctggacatgcagtccagctgggtgtatgaaaccgggcgcctctgcgagcctgaagttctgaatagtctagaagagacctactcgccattcttcagaaacaattctgagaagatgtcaatggaggatgaaaattttagaaaaagaaaattaccagttgtgagtagcgtggtgaaagtcaaaaagttcaatcacgacggtgaagaggaggaagaagatgatgattatggcagcaggaccggtagtataagttcgtctgtgagcgtgccagccaagcccgaaagacgcccaagcttgcctccctccaagcaggctaataaaaacctgatcctgaaagcgatcagcgaggcccaagaatcagtgaccaagacgactaactattctacggtaccacagaagcagacgctgcccgttgccccccgcacccgcacttcccaagaagagcttctcgccgaagtagtccagggtcaatctcgtacaccaagaatatctccacctatcaaagaagaggaaaccaagggcgactctgtggaaaaaaatcagggcacccaacagcgccagctgctcagccggttgcagatagatccagtcatggctgaaacactccaaatgtcgcaggccgagatgtccgaactgtccgtagcccaaaagccagagaaactgctggaacgttgcaagtattggcccgcgtgtaagaatggcgatgagtgcgcataccaccatcctatttccccatgtaaggcatttccgaattgcaaatttgccgagaaatgcctctttgtccaccccaattgcaaatatgatgcgaagtgtacgaaaccggattgtccttttacacacgtctctaggaggattcccgtcctctctcctaaacccgtcgcgccgcctgcccctcctagctcatcacagctttgtaggtatttccccgcttgcaaaaaaatggaatgtcccttttaccaccctaagcactgccgatttaacacacagtgcacaagacctgactgtaccttctatcacccgactataaacgtgccacctagacacgccttgaagtggattagaccccagactagcgagtag

SEQ ID NO: 211802 - DNA, 2136 bp, synthetic construct
  misc_feature 1..2136: note = Description of Artificial Sequence: Synthetic coding sequence
  source 1..2136: mol_type = other DNA
atggagatcggcaccgagatcagccggaagatccggagcgccatcaaaggaaagctgcaagaactgggagcgtacgtagatgaggagttaccagactacattatggtgatggtagctaacaaaaaatcccaggaccagatgacagaggatctctccctgtttctggggaacaataccattaggttcaccgtgtggctccacggggtcctagataagctcaggtctgtgacgaccgagccgtcctctctgaaatcctcagataccaacatctttgactccaacgttccctccaataaaagcaacttctcccgaggggacgagagaaggcacgaagccgcagtgccacccctggctattccttccgctcgtcccgaaaaacgggactcaagagtcagtacttcttctcaggagtctaaaacaactaatgtgaggcagacttatgacgatggcgccgccacgagactgatgagtactgtgaagcctctgagagagcctgcaccatccgaagacgtcattgacattaagcccgaacccgatgaccttatagatgaggatttgaacttcgtgcaggagaaccccctgagccagaaaaagcccactgtgactctaacatacgggagcagcagaccttctatcgagatctatcgcccacctgcctcccgcaatgccgactcgggagtccacctcaatcgactgcaatttcagcagcagcaaaattcaatccacgccgccaagcaactggatatgcaaagcagctgggtgtacgagaccgggaggctctgtgagccagaggtgctgaatagcctagaagaaacctacagcccctttttccgcaacaattcggaaaagatgtcaatggaggacgagaactttaggaaaaggaagctcccggtcgtttcatcggtcgtgaaagtgaaaaaattcaatcatgacggggaggaagaagaggaagacgacgattatgggagtcggaccggttcgatttcgtccagtgtctctgtgccagccaagccagagaggcgcccgagcctccctccttccaaacaggctaacaagaacctcattctcaaggctattagcgaagctcaggagtccgttaccaagacgactaactactccactgtgcctcagaagcagacgctccccgtggccccacgtaccagaacctcccaggaggagctgctggctgaagtcgtgcaagggcagagccggaccccaaggattagtcctcctattaaagaggaagaaacaaagggcgattccgtggagaaaaaccaggattattatgatatggaaagtatggtccacgccgacactcgcagcttcattctcaaaaagccaaagctgagcgaggaagtcgtcgtggcccctaatcaggagtcagggatgaagactgcggacagcctgcgagtgctatccggccatctgatgcagacacgagatctggtgcagcccgataagccagcctcacccaaatttatcgtgaccctcgatggagtgccaagcccccctggctacatgtctgatcaggaggaggacatgtgcttcgaaggcatgaagccggtgaaccagactgctgcctctaacaaaggccttagaggacttttacaccctcagcagcttcatctgctgagtaggcagctggaagaccctaacggatcattttctaacgctgagatgtccgaattaagcgtggcccaaaagcccgagaagttgctcgaacgctgcaagtactggcctgcatgtaagaacggtgatgagtgcgcttaccaccatccaatctcaccctgcaaggccttccccaactgcaagtttgcagaaaagtgcctgttcgtacatcctaactgtaagtacgacgcgaagtgcaccaagccagattgcccattcacgcacgtgagtaggaggattcccgtgcttagccccaaacctgccgtggctccgcccgctcccccttctagctcacagctgtgtagatatttccctgcttgcaaaaaaatggaatgtcctttttaccatcccaaacactgccgatttaacacccagtgcaccaggcccgactgcacattttaccatcccaccattaacgtcccccctcgccacgcccttaaatggatcaggcctcagaccagcgagtag

SEQ ID NO: 211803 - DNA, 2136 bp, synthetic construct
  misc_feature 1..2136: note = Description of Artificial Sequence: Synthetic coding sequence
  source 1..2136: mol_type = other DNA
atggagatcggcaccgagatcagccggaagatccggagcgccatcaaaggcaaactccaggagctcggcgcctacatcgatgaggaactgcctgactacattatggtgatggtggcaaataagaagtcacaagatcagatgactgaggatctgtccctgttccttggaaataatacgatccgcttcactgtgtggctgcacggggtgctggataagctgagatcggtgacaacagaacctagctccctcaaatcatcagacaccaatatttttgactcaaacgtcccatctaacaaaagtaacttctccagaggcgacgaacgaagacacgaggccgctgtgcctccgctggccatccctagtgctcggccagagaaaagggacagtcgggtgagtacctccagccaggagtcaaagaccacaaacgtccgccagacatacgacgacggagctgcgaccagactgatgagtactgtgaaaccactccgggaacccgccccctccgaggacgtgatagacatcaagcccgagccagatgacctgatagatgaagatctgaacttcgtccaggagaaccccctcagccagaagaaacccaccgtgactcttacttatggttcctcacggccttcaatagagatctacaggccccctgcttccagaaacgccgactccggcgttcacttaaacaggctccagtttcagcagcagcaaaatagtatccatgctgctaaacagttggatatgcagtcctcatgggtatatgagacgggacggctatgcgagccggaagtacttaacagtttagaggagacctatagccctttttttagaaacaacagtgagaaaatgtctatggaagacgaaaatttccggaagcgaaaactgccggtggtgtccagcgtggttaaggtcaaaaaatttaatcatgatggcgaagaagaagaggaggatgatgactatgggagtagaacaggcagcatctcatctagtgtgtctgtacccgctaagccagagcggcggccaagcttaccccccagcaaacaggccaataagaatctgatattaaaggccatttccgaggcgcaagagagtgtcacgaaaactaccaactacagcacagtcccccagaagcagaccctcccagtggctcctcgaacacgtacttcgcaggaggaattactcgcagaggttgtgcagggccaatccaggacaccaaggattagccccccaataaaggaggaggagaccaaaggcgattccgtcgaaaagaaccaggactactatgacatggagagcatggtgcatgcggacacacgctcctttatccttaagaaacctaagttgtcagaggaggtggtagttgctccgaatcaggagagtgggatgaagaccgccgatagcttgcgtgtgctctcaggtcacctgatgcaaacccgcgacctggtgcagcccgataagccagcttccccaaagttcattgtgacccttgacggcgttccgagtccacctgggtacatgagcgatcaagaagaggacatgtgctttgaagggatgaagcccgttaaccaaactgcagcttcgaataagggccttagaggcctgctccacccccagcagttgcatctactgtcaagacagcttgaggatcctaatgggagcttttctaacgccgagatgtccgaattaagcgtggcacagaagccggagaaattactggagcgctgcaagtactggcccgcctgcaagaatggtgacgaatgtgcctaccatcaccctataagcccttgtaaagcattccccaactgcaaattcgccgaaaaatgcctgtttgtgcacccgaattgcaaatacgacgcaaagtgtacgaagcccgactgcccttttactcacgtgtcacggaggattcctgtgctgtcaccgaagcccgcagtagcacctccagcacctccctcctccagtcagctctgtagatacttccccgcgtgtaaaaaaatggagtgcccgttttatcacccaaaacattgtcggtttaacacccagtgtactcgaccagattgtaccttttatcaccctactattaatgtcccccctcggcatgccctcaagtggatcagacctcagacgtcagagtag

SEQ ID NO: 211804 - DNA, 849 bp, synthetic construct
  misc_feature 1..849: note = Description of Artificial Sequence: Synthetic coding sequence
  source 1..849: mol_type = other DNA
atgcggatgagcagcaagttccccagcccccccctgcccatcttccttccccctgagccagtagatctgggcagcattaccagctcctcatgttcactgaatgagctcgacaacattagtcatctgcttagaaagatcagtgctgacattaacgagattaaaggaatgaaggctgctattctgactgtggaagccaatttgttcgatttgaacgttcgcgtgtcgaaaaatgaggcaaaaattagtagtcttgaggtgaaaatgaatgagtactcgactacctatgagtgcaaccgccaattcgaggaccaggaagaagatacggagagccagtcaagaaccaccgacgttaagattattggttttctcaggaacgttgagaaggccgagatgtcagaattgagtgtggcccaaaagccggaaaaattgcttgagagatgcaagtactggcctgcttgtaagaacggcgacgagtgtgcgtaccatcatcctattagcccctgcaaggccttccccaattgcaagtttgccgagaaatgcctgtttgtacatccgaactgcaagtatgatgccaagtgtaccaaacccgactgtccttttactcatgtatctcgaaggatcccagtcttaagccctaagcctgctgtcgccccgcctgcgccaccatcatcctcccaactttgccgttacttccccgcgtgtaaaaaaatggaatgtcctttttatcaccccaagcattgcaggtttaacacacagtgcacccgacctgactgcactttctaccaccctacaatcaacgtgcccccccgacacgctctgaaatggatccggccccagacatccgagtag

SEQ ID NO: 211805 - DNA, 219 bp, synthetic construct
  misc_feature 1..219: note = Description of Artificial Sequence: Synthetic coding sequence
  source 1..219: mol_type = other DNA
atggtgatggtggccaacaagaagagccaggaccagatgaccgaggatctgtcactcttcctcggaaacaatacaatcagattcacagtatggctgcacggcgtcctagataagcttcgatctgtgacaactgagccaagtagccttaaaagctctgacacaaatatctttgactcgaatgtgccctccaacaagagtaacttctcgcgcggggactag

SEQ ID NO: 211806 - DNA, 285 bp, synthetic construct
  misc_feature 1..285: note = Description of Artificial Sequence: Synthetic coding sequence
  source 1..285: mol_type = other DNA
atggtgatggtggccaacaagaagagccaggaccagatgaccgaggacttaagcttatttctcggaaacaataccatccggtttaccgtttggcttcatggcgtccttgacaagcttcgaagcgtaaccactgaacccagcagtctgaaaagctcggatacgaacatttttgactcgaatgtgcccagcaacaaatccaacttcagtcgcggagacgagagacgccacgaggccgctgtgcctcccctggcaatccctagtgcacgaccagaaaagcgagactag

SEQ ID NO: 211807 - DNA, 648 bp, synthetic construct
  misc_feature 1..648: note = Description of Artificial Sequence: Synthetic coding sequence
  source 1..648: mol_type = other DNA
atggtgatggtggccaacaagaagagccaggaccagatgaccgaggacctttccctgtttcttggcaataacacgattcgctttactgtttggctgcatggcgtacttgataagcttcgttccgttacaaccgagccctcctcactgaaatccagtgatacgaatatcttcgactcgaatgtgcctagcaacaaaagcaatttctccaggggcgacgaaaggaggcatgaagcggcggttcccccccttgcgattccatccgccaggcccgaaaaacgagattcccgggtcagcacctcctcccaggaatccaagaccacaaacgtaaggcagacttatgacgacggcgcggccactcgattaatgagcacagttaaaccccttcgggaaccagccccctctgaggatgtgatcgacatcaaacccgaaccagacgacctgatcgacgaggatctgaatttcgtccaggaaaaccccctgagccaaaagaagcctaccgtcaccctgacctatggatcttcaagaccttcgatagagatataccggccccctgcatctcgtaacgccgacagtggggtacacctcaataggctgcagtttcagcagcagcagaacagtattcatgccgctaagcagctggacatgtag

SEQ ID NO: 211808 - DNA, 1956 bp, synthetic construct
  misc_feature 1..1956: note = Description of Artificial Sequence: Synthetic coding sequence
  source 1..1956: mol_type = other DNA
tgaagcgacaccaacatcttcgacagcaacgtgcccagcaacaagtctaatttcagcaggggagatgagaggcgtcacgaggccgccgttccccccttggcaattcctagcgcacgccccgaaaaacgggattcccgagtgtcaacctcctcccaggagtctaaaacaacaaatgttcgccagacctatgatgacggtgccgccaccaggctcatgtcaacagttaagccgctcagagagcccgctccaagcgaagacgtgatcgacatcaagccagagcccgacgacttaatcgacgaggacctgaactttgtccaggaaaatcctctgagccagaaaaaacctaccgtaacactcacttacgggagtagtcgcccatccattgaaatttaccgaccgcccgcgtctcgaaacgccgattcaggcgtgcacctgaaccggttacagttccagcaacagcagaattccatacatgccgcaaaacagctggatatgcaatctagttgggtctatgaaacaggacggttatgcgagcctgaggttctgaactcccttgaggaaacatacagcccctttttccgcaacaacagcgaaaagatgtcaatggaggatgagaattttaggaagaggaagcttcctgttgtgagttctgttgtgaaggtcaagaaatttaatcatgatggggaagaggaggaagaggacgatgactatggctcacgtacgggctcaatctcaagcagcgtcagtgttccagccaagcccgaacgcaggccatcccttccaccctctaaacaggccaacaaaaatcttattctgaaagccatttcagaggcccaggagtcagtgacaaaaaccactaactattccaccgttccccagaaacagacactccccgtggctccacggaccagaacctcccaggaggagctcttggccgaggtggtgcagggccagagcagaacgcctagaatttcaccgcctataaaagaagaggagaccaagggcgacagcgtcgaaaaaaaccagggaactcagcagcggcagctcctatccaggctgcagatcgacccagtgatggccgaaacactgcagatgagtcaggattactatgatatggagtctatggtccatgcagatactcgctcattcattttaaagaagccaaaactctccgaggaggtagtagtggccccaaatcaggaatccgggatgaagacagcagattctctgagagtgctcagcggccacctcatgcaaacgagagacttggtgcagccagacaaacctgcttcgccgaaatttattgtgaccctcgatggtgtaccctctcccccagggtacatgagcgaccaggaagaagacatgtgctttgagggaatgaagccagtgaaccagacagccgcctctaacaaaggactcagagggctgctccaccctcaacagctgcacctccttagcagacagctcgaagacccaaacggcagcttcagtaacgcggaaatgtccgagctctctgtggctcagaaacctgagaagctcctagaacgctgtaagtactggcctgcatgtaagaacggagacgagtgcgcctatcaccatcctataagtccctgcaaagcctttcccaattgcaaattcgcagagaaatgcctattcgtgcatcccaattgtaagtacgatgccaagtgcaccaagcccgactgcccctttacgcacgtgtcgcgccgcatccccgtcctgagtcctaagcccgttgcgcctcctgctcccccaagctcttcccagctgtgccggtactttcctgcatgcaaaaaaatggaatgccctttttatcatccaaaacactgcagattcaacacccaatgcaccagacccgattgcacattctatcatccgaccatcaatgtgcccccaagacacgcactaaaatggatccgtccccaaacgagtgagtag

SEQ ID NO: 211809 - DNA, 402 bp, synthetic construct
  misc_feature 1..402: note = Description of Artificial Sequence: Synthetic coding sequence
  source 1..402: mol_type = other DNA
atggtgatggtggccaacaagaagagccaggaccagatgaccgaggatctctccttgttcctgggtaataataccatccgatttaccgtctggttgcatggtgttctcgacaagctgaggtccgttacgactgagccgtcttccctcaaatctagtgatactaatatcttcgattcgaatgtaccatcaaataaatccaatttcagtcgcggcgacgaaaggcgccatgaggcagccgttccgcccttagccatcccttccgctcgtcctgagaaacgggacagccgcgtgagcacgagcagtcaagaatctaaaaccaccaacgtacgacagacatacgacgatggagccgccaccaggctgatgtcaaccgtcaaacccctacgggagcccgccccatag

SEQ ID NO: 211810 - DNA, 2193 bp, synthetic construct
  misc_feature 1..2193: note = Description of Artificial Sequence: Synthetic coding sequence
  source 1..2193: mol_type = other DNA
atggagatcggcaccgagatcagccggaagatccggagcgccatcaaggggaagctgcaagaactgggcgcttatgtggatgaggagttgcccgactacataatggttatggttgccaacaagaaatctcaggaccagatgactgaagacctctccctgttcttgggtaacaatactatccggtttactgtgtggctgcatggagtgctggacaagttaagatcggtaactaccgagcctagttccctgaagagttctgataccaacatattcgattccaatgtccccagtaataaatcgaactttagtcgcggcgacgaacgccggcacgaagctgctgtacctccgctggctattccgtccgcacgtcccgagaagcgggattccagggttagcacctcctcccaagaatcaaaaaccacaaatgtacgtcagacttatgatgacggcgcagcaacccgattgatgagcacagtaaaacccctgagggaacctgctccatctgaggacgtgatagacattaagcccgaacccgacgacctgatcgatgaagacctcaatttcgttcaagagaatccactatctcaaaagaaacctaccgtgaccttgacatacgggtcatcgaggccatcgatcgaaatataccgtccacccgctagcaggaacgcggatagtggagtacacctgaaccggttgcagtttcagcaacagcagaatagcatccacgctgctaaacagctcgacatgcagtcctcttgggtttacgagactggacggctctgtgaaccagaagtactgaactcactggaggaaacatatagccccttcttcagaaacaattcagagaaaatgagtatggaagacgagaacttcaggaaacgaaagcttccggtcgtgtctagtgtggtcaaagttaaaaagtttaaccacgacggggaggaggaggaggaggatgatgactatggatcacgcaccggctcgataagcagctccgtgtccgtgcccgcgaaacccgagaggcgaccaagtttgccgccttccaaacaggcaaataaaaatttgatcctcaaggctatcagcgaggctcaggaatcagtaactaagactaccaactatagcacagtgcctcagaagcagactctgcccgtcgctcctaggaccaggacatcccaggaggagcttcttgccgaggttgtgcagggccaatctagaaccccccggatttctcctccaattaaagaggaggaaactaaaggcgacagcgtcgagaaaaaccagggcactcaacagcgccaactcttatctcggctccagatcgatcccgtcatggcagagacccttcagatgtcacaggattactacgacatggagagtatggtacacgctgatactcgctctttcatattgaagaaaccaaaactgagtgaagaggtggttgtggcacccaaccaggagagcggcatgaaaactgccgatagtttgagggtcctttctggccatctcatgcagacaagggacctcgtgcagcctgacaaacccgccagtcctaagttcatcgtcactctggatggagtgcccagccccccgggctacatgagcgatcaggaggaggacatgtgttttgaggggatgaagccagtcaaccaaaccgccgcctctaacaagggtctgagaggcctgctccatccacaacaactgcacctgctctctaggcaattggaggatcccaatgccgaaatgtctgagctgtcagtggcccagaaaccagagaaactgctggaaaggtgcaaatattggcctgcatgcaagaatggcgatgagtgtgcataccatcaccctatttcgccttgcaaagccttccctaactgtaagtttgctgaaaagtgtcttttcgtacaccccaattgcaagtatgacgctaagtgtacgaagccggattgtcctttcacccatgtgagtcgccggatccccgtgcttagtcccaagcccgttgccccacccgctccgccctcttcctcccaactttgtcggtatttcccagcctgtaaaaaaatggagtgtcccttttaccatcctaagcactgtcgttttaacacacaatgtacaagaccagattgcaccttctaccatcctacaatcaacgtcccccccagacacgccctcaaatggatcagacctcagactagtgagtag

SEQ ID NO: 211811 - DNA, 2709 bp, synthetic construct
  misc_feature 1..2709: note = Description of Artificial Sequence: Synthetic coding sequence
  source 1..2709: mol_type = other DNA
atggccgaccccgaggtgtgctgcttcatcaccaagatcctgtgcgcgcacggaggacgcatggctctggacgccctcttacaggagatcgcactgtctgagccccaactgtgtgaagtacttcaagtggccggccccgatcgttttgtcgttctggaaacaggaggagaggctggcatcacacgatcagtagtggcgaccacacgtgccagggtgtgccggaggaagtactgtcagcgtccatgcgataatctacacctgtgcaaactcaatctgcttggtcgatgtaactactcccagtcggaaaggaacctgtgtaagtatagccacgaggttctgagcgaggagaatttcaaggtcctgaagaaccatgagcttagcggacttaacaaggaagagttagccgttctgttgttgcaaagcgacccattcttcatgcccgagatctgcaagagttataagggcgaaggacgccaacagatttgtaatcagcagcctccttgcagcaggctgcatatttgcgatcatttcacccgcggaaattgccgctttccgaactgtctacgttctcataacctgatggaccggaaagtcctggctattatgcgcgagcatggcttgaatcccgatgtggtgcagaatatccaggacatctgtaacagtaagcacatgcagaagaacccacctgggccacgcgccccttctagccaccgcaggaatatggcctacagggccagatccaaatcacgggacagattttttcagggatcacaggagtttcttgcctcagccagtgcttcagcagaaagatcatgcacaccaagtcccgatcaaatcagtcatcgggcctcactggaggatgcccccgtggatgaccttactaggaagttcacatatctcggttctcaggatcgcgctagacctccgagcggctctagcaaggccacagatctcggcggaactagccaggccggcacgtcacagcggttccttgagaatggctctcaggaagacctactgcacggcaatcctggctcaacctacctggccagtaattccaccagcgcccccaattggaaatctctgacatcttggaccaatgaccagggggcccgacgtaaaaccgtgttttccccgactctgcccgccgcccggtccagtctcggttcccttcagacccccgaggccgtgacgaccagaaaaggcaccggcctattgagctccgactataggattattaatggcaagtctggtacccaggacattcaacctggccctctgtttaataacaacgcagacggggttgccacagatatcacctccacaaggagtctcaattacaagtcaacttcctcagggcatcgggaaatttcttcccctagaatccaggatgcaggtcccgcctcgcgggacgtccaggcaacagggcgaattgctgacgatgccgacccccgcgtggccttggtgaatgacagtctgtcagatgtcaccagcaccactagcagcagagtcgatgaccatgattccgaagaaatatgcctggaccacctgtgtaaagggtgcccacttaatggcagttgtagcaaagtccacttccatctaccgtataggtggcaaatgcttattggcaaaacgtggactgattttgagcacatggagaccatcgaaaaaggatactgcaatcctgggatacacctctgcagcgtgggctcctacaccataaattttagagtcatgtcctgcgattcattcccaatcaggaggttgagcacaccaagctctgttaccaagccagccaacagcgtattcaccactaagtggatctggtactggaagaatgaatctggaacctggattcaatatggcgaggagaaggacaagcgtaaaaacagtaacgtcgatagcagttacctcgagtctttgtatcagtcttgtccccgcggggtagtgccttttcaggccggatcacggaattatgagctgtctttccagggcatgattcagaccaatatcgcgtcaaaaacccagaaagatgtgattcgaaggcccacatttgtcccacagtggtacgtccagcagatgaaaagaggtcctgaccatcagccagcaaagacttcaagtgtcagccttacggccacctttagacctcaggaagacttttgctttctgtcttcaaagaagtacaaactgtctgaaatccatcacctgcatccagaatacgtcagagtgagcgagcatttcaaagcctcgatgaagaattttaaaattgaaaagattaaaaagatcgagaatagcgagctgttggacaagtttacttggaagaaaagtcaaatgaaggaggagggaaaactactcttctatgcaaccagccgcgcatacgtagagagcatttgttcaaataacttcgatagtttcctgcatgagacacacgaaaacaagtatggcaaaggtatttacttcgccaaggacgctatctacagccataagaattgcccctacgacgcaaaaaacgtcgtaatgtttgtagcccaggtgttggtggggaaattcactgaaggaaatatcacctacacatcgccgccacctcagtttgattcttgtgtcgacacccgatctaacccatctgtctttgtaattttccaaaaagatcaggtgtaccctcagtacgtgatagagtatacagaagataaggcatgtgtgataagctag

SEQ ID NO: 211812 - DNA, 2100 bp, synthetic construct
  misc_feature 1..2100: note = Description of Artificial Sequence: Synthetic coding sequence
  source 1..2100: mol_type = other DNA
atggccgaccccgaggtgtgctgcttcatcaccaagatcctgtgcgctcacggcggccggatggcgctcgacgccctgctgcaggaaatagccctctccgagccgcagttgtgtgaagtcttgcaggtggccgggcccgaccggttcgtcgtcctcgagactggaggtgaagccggcatcaccagatctgtagttgccaccactcgggctcgggtttgtagaagaaagtactgccagcgcccctgtgacaacctgcatctgtgtaaactgaacctgctgggtcgttgtaactatagccaatccgaacgtaatttgtgtaaatattcccacgaggtgctgtcagaggagaattttaaggtgctcaagaaccacgagttaagtgggctgaataaagaggagctcgccgtgttattacttcagagtgacccttttttcatgcccgagatctgcaagtcctataaaggtgagggccgtcagcaaatctgcaaccagcagccaccctgtagcagattacatatatgcgaccacttcacaaggggaaattgccggttccccaactgtctgcgatcacataacctaatggataggaaggtgctggcgatcatgcgggagcacggactgaatccagacgtcgtgcaaaacattcaggacatttgcaactctaagcacatgcaaaagaatccccccggtccgagggcccccagttcccaccggcgcaacatggcttatagggcaaggagcaagtcccgcgatcggttttttcagggatcacaggaattcctcgccagtgcaagcgcgtctgcagaacgctcatgcacccctagccccgatcaaatttcccaccgcgctagtttagaggacgctccagtggatgatctcactagaaagttcacctacctgggctcacaagatcgagctaggcccccttcgggatctagcaaggccaccgacctgggaggtacgagccaggccggaacgtcccagcgatttttggaaaatggtagtcaggaggacctgctgcatggaaatcccgggagcacgtaccttgcatccaattctacttcggcgccaaattggaaaagcctgaccagctggactaatgatcagggggctcgccgaaagaccgtctttagtcccaccctgccggcagcacgatccagcctgggctctttgcaaaccccagaagccgttacaacccggaagggaacaggcctcctcagcagtgactacagaatcatcaatggtaagagtggcactcaggatattcagcctggacccctgtttaacaacaatgctgacggagtggcaaccgacattacctctacccgttctctcaactataagagtacatccagcggccacagggaaatatctagtccccgcatacaagacgcagggcctgcgtcgcgagatgtgcaggccacaggacggatcgcagatgatgcagatccaagagtggccctggtgaacgactctttgtccgacgtcacatcaaccactagctctcgagtggacgatcatgattccgaggaaatttgtttggatcacctgtgtaaagggtgccctctgaacgggtcttgcagcaaggtgcacttccatcttccctacagatggcagatgttgatagggaaaacgtggactgattttgaacatatggagacaattgaaaagggatattgcaaccccggaatacacctctgttcagttgggtcttatactattaacttcagggtcatgagttgcgattcctttcccatccgacggttgtcaaccccctctagcgttaccaaaccggccaactctgtgttcactaccaaatggatttggtattggaagaatgagtctggcacctggatccagtacggtgaagaaaaggacaagcgaaaaaattctaatgttgattcgtcctacctggaaagtctataccagagctgcccgaggggggtggtgcctttccaggccggatctcggaattacgaactatcattccagggcatgatccagactaacatcgcctcgaaaacccagaaagacgtgattcgacgacctaccttcgtcccccaatggtacgtccagcagatgaagcgaggacccgagtag

SEQ ID NO: 211813 - DNA, 1521 bp, synthetic construct
  misc_feature 1..1521: note = Description of Artificial Sequence: Synthetic coding sequence
  source 1..1521: mol_type = other DNA
atggcctaccgggcccggagcaagagccgggaccggttcttccagggtagtcaggaatttctcgccagtgcttccgccagcgccgagcgctcttgtacccctagtcccgatcagatttctcacagagccagccttgaggacgcccccgtcgatgacctgacacggaaattcacctatctcggctcccaggaccgagctcgtcctccttcaggcagcagcaaggctaccgacctgggggggacttcacaggctggcactagtcagagattccttgaaaatggctctcaggaggatctcctgcacggcaaccccgggagcacttacctggctagcaacagcacctctgctccaaattggaaatcactgacatcctggaccaacgatcaaggagcccgccgtaagactgtctttagccccactctgcccgcagcacgcagctcgttgggctccttacaaacgccggaagccgtgacaaccagaaagggaactggcctgctctccagcgattatagaattatcaacggaaaaagtggtacgcaggatatacaacccggccccctgtttaacaacaacgcggacggagtagcgaccgacatcacctccacacgatcactcaactacaagagtaccagcagcggccaccgggagatttcctctcctcgcatccaagatgccggtccagctagtcgcgacgtacaagcaactggtcggattgcagatgacgccgaccccagggtcgctctggtgaacgactccctgagcgatgtgacgtccacaaccagctctcgagtcgacgatcatgacagcgaggagatctgtctagatcatctttgtaagggctgcccgttgaacggaagttgttccaaggtacacttccacctgccttatcgctggcagatgctgatcgggaagacgtggacagactttgaacatatggaaactattgagaaaggttattgcaatcccggaatccatctctgtagtgtaggaagttacacaatcaactttagagtgatgtcttgtgatagcttccccattcgtaggctctccaccccttccagcgtcacgaagcctgcaaattcggttttcactacaaaatggatctggtattggaaaaatgaaagtgggacatggatccagtacggagaggagaaagacaaacgcaagaactccaatgtggactccagttatttagagtccctctatcagtcatgcccacgcggcgtagttccgtttcaagcggggtctagaaactatgagctttcctttcaaggcatgatccagaccaacattgcaagtaagactcagaaggacgtcatcaggcgacccacttttgtcccccagtggtatgtgcaagaggaaagggccagggtgtccgtcctgaaacagctcttcgcagaccgctgtcttcgctgctcgtgtccaggtctgattaagtctctcgtgaatctcgaacccgtgtttcttaagagctcttgcctgcattacagtgccgtatccatttgtataatagacgagtag

SEQ ID NO: 211814 - DNA, 654 bp, synthetic construct
  misc_feature 1..654: note = Description of Artificial Sequence: Synthetic coding sequence
  source 1..654: mol_type = other DNA
atgagcggcggcctggcccccagcaagagcaccgtgtacgtgagcaatcttcccttctccctcactaacaacgacctgtatagaatcttttccaaatatggaaaggtcgtgaaggtcaccattatgaaggacaaggacacaagaaaaagtaaaggagtcgccttcattctgtttctggataaggattcagcgcagaattgtacacgtgcaatcaacaacaagcagctattcggtagggttatcaaggcaagcatagcaatcgacaatggtagggccgcggagtttatcagacggcggaattactttgataagtctaagtgctacgaatgtggagaaagtggccacctcagctacgcttgccccaaaaacatgctgggtgaacgcgaaccccccaagaaaaaggaaaagaagaagaagaagaaagcacctgagcctgaagaagaaattgaggaagtggaggagagcgaggatgaaggggaggaccccgctctggatagtctgagccaggcaattgcttttcagcaggctaagatcgaagaagaacaaaaaaaatggaagcctagttctggcgttccctcaacaagcgacgattcccgcagacctagaatcaagaagtcaacctacttctccgatgaggaagagttgagcgattag

SEQ ID NO: 211815 - DNA, 501 bp, synthetic construct
  misc_feature 1..501: note = Description of Artificial Sequence: Synthetic coding sequence
  source 1..501: mol_type = other DNA
atggccatgagccaggagagcctgaccttcaaggacgtgttcgtggactttacactagaggagtggcagcagttggacagcgcccaaaagaacctatacagagatgtcatgctggagaattactctcacttggtgtcagtgggctatttagtggctaaacccgatgtcatattccgtcttggtcccggggaggagagctggatggccgatggagggacgcccgttcgcacctgcgctgaggtttggcaggtagatgaacagatcgatcattataaggagtcccaggacaagctaccctggcaagccgctttcatcggcaaagagacattgaaggacgaatctggacaggaaagtcggacctgtaggaagtccatatatctctccaccgaatttgactctgtgcggcagcggttgcccaagtattactcttgggaaaaggcttttaaaaccagcttcaagctcagttggagtaaatggaaactgtgtaaaaaggaaaggtag

SEQ ID NO: 211816 - DNA, 516 bp, synthetic construct
  misc_feature 1..516: note = Description of Artificial Sequence: Synthetic coding sequence
  source 1..516: mol_type = other DNA
atggccatgagccaggagagcctgaccttcaaggacgtgttcgtggatttcacattagaggagtggcagcagctggacagcgctcagaaaaatctatatagggacgttatgctggaaaattatagtcacctcgtatccgttggctacctagttgcgaaacctgatgtgatattcaggctcggtcccggcgaggaatcctggatggcagatggtgggaccccggtgagaacttgcgcaggcgaggacaggcccgaagtttggcaggtggatgagcagatagaccattataaggagtcccaggacaagctgccttggcaggccgcctttatcggcaaagaaacgctgaaagatgaatccgggcaggaatcaaggacatgtaggaagtcaatctaccttagcaccgagtttgatagcgtgaggcagagactccccaagtattatagttgggagaaagccttcaaaacttcatttaagctgtcgtggagcaagtggaagctgtgtaagaaagagcgctag

SEQ ID NO: 211817 - DNA, 297 bp, synthetic construct
  misc_feature 1..297: note = Description of Artificial Sequence: Synthetic coding sequence
  source 1..297: mol_type = other DNA
atggccatgagccaggagagcctgaccttcaaggacgtgttcgtggattttacgctggaggaatggcagcagctggactccgcccagaaaaatctgtaccgggatgtcatgctcgagaactacagtcacctggtgagtgtagggtacctagtggctaagccagacgtgatcttccgacttgggcccggcgaagaatcttggatggctgatggtgggacccccgtgcgcacgtgtgccggtgaagaccggcctgacgtttccatattcgcatcatgtatacttaagtgttgttactag

SEQ ID NO: 211818 - DNA, 297 bp, synthetic construct
  misc_feature 1..297: note = Description of Artificial Sequence: Synthetic coding sequence
  source 1..297: mol_type = other DNA
atggccatgagccaggagagcctgaccttcaaggacgtgttcgtggattttaccctggaggagtggcaacagcttgactccgcacagaagaacctgtatagagatgtaatgctggaaaattattcccacttggttagcgtggggtatttggtcgccaagcccgacgtcattttcaggctgggccctggggaggaatcatggatggctgatgggggtactccagtgcgcacctgtgcaggagaagatcgacccgatgtctccatcttcgcttcctgcatcctgaagtgttgttactag

SEQ ID NO: 211819 - DNA, 516 bp, synthetic construct
  misc_feature 1..516: note = Description of Artificial Sequence: Synthetic coding sequence
  source 1..516: mol_type = other DNA
gtggccatgagccaggagagcctgaccttcaaggacgtgttcgtggactttacgctggaagagtggcagcagttggatagcgcacaaaaaaatctatacagggatgtaatgctggaaaactattctcacctggtgtcggtcggatacttggtggcgaagcccgatgtgatattccgcttgggcccaggcgaagagagttggatggctgatggcgggacgcctgtgaggacgtgtgccggcgaggatcgccccgaggtttggcaggtggatgagcagatcgaccactacaaagagagccaggataaactcccgtggcaggccgcctttattgggaaggaaacactcaaagatgaatcaggtcaagagagcaggacatgtagaaaatccatatatctgtctaccgaattcgattcagttaggcagcgtctgccgaaatactatagctgggaaaaagcatttaagacatcttttaaattgtcctggagcaaatggaaactgtgtaaaaaagagcggtag

SEQ ID NO: 211820 - DNA, 297 bp, synthetic construct
  misc_feature 1..297: note = Description of Artificial Sequence: Synthetic coding sequence
  source 1..297: mol_type = other DNA
atggccatgagccaggagagcctgaccttcaaggacgtgttcgtggattttaccctggaagaatggcagcagctggacagcgcccagaagaacctataccgggatgtgatgctggaaaattactcacacttggtgtccgtagggtacctcgtcgcaaaacccgatgttatctttcgactgggaccaggggaagagagctggatggccgatggtggtacaccagttagaacctgcgcaggtgaagacagacccgatgttagcatatttgctagttgcattcttaagtgttgctactag

SEQ ID NO: 211821 - DNA, 864 bp, synthetic construct
  misc_feature 1..864: note = Description of Artificial Sequence: Synthetic coding sequence
  source 1..864: mol_type = other DNA
atgatgaaccggttccggaagtggctgtacaagcccaagcggagcgatccccagcttctggcaaggttttattatgcagatgaggagctaaaccaggtggctgccgaactggatagcttggatggcagaaaagaccctcagcgatgtacactgcttgtgtcccagttccgtagctgccaggataatgttcttaatattatcaaccagattatggatgagtgtattccccaggatagggccccccgggatttttgcgttaagtttccggaggaaattagacacgacaatctcgccgggcagctctggtttggtgcggagtgtttggccgccggaagtatcattatgaaccgcgagctggagtcaatggccatgcggcccctcgcaaaggagctaacacgctcactggaggatgtgcgtggcgccttacgtgaccaggccttacgggacttgaatacctatacggaaaaaatgcgcgaagctctgagacacttcgatgtcttgttcgccgagttcgaactgtcctacgtcagcgctatggtgcccgtgaagtcccctcgagagtattacgtacagcaggaagtgatagttctattctgcgagaccgtggagcgggccctggactttggatatctgacacaggatatgatcgacgattacgaacccgcactcatgttctctatacctcgcctagctattgtttgccctctgttgccggcccatccccgcacccgggctggggctacagctcatgtcgcatgtcggatggtggccggcagctccagtggcgctctcacgcacccaccggtcagcaaacagggagtgatcagcgcattgttacgtcccctgccggaactaccgccatag

SEQ ID NO: 211822 - DNA, 519 bp, synthetic construct
  misc_feature 1..519: note = Description of Artificial Sequence: Synthetic coding sequence
  source 1..519: mol_type = other DNA
atgatgaaccggttccggaagtggctgtacaagcccaaggacaacgtgctgaatatcatcaatcaaattatggatgagtgtatcccccaggaccgcgcaccgcgcgacttttgtgtgaagttccctgaggagattcgacacgataatctggcgggccagttgtggttcggtgccgaatgtctggccgccgggtctatcatcatgaacagagagctggaaagtatggcgatgcggccattggccaaggaactaacccgctccctggaggacgtgcggggtgccttgcgggaccaggcattgagggacctaaatacctacactgaaaaaatgcgagaggccctgcggcatttcgacgtgctgttcgccgagtttgagctttcgtatgtgagtgctatggtgcctgtcaagtctccaagagaatactatgtgcagcaggaggtgatagtcctattttgtgaaaccgtggaaaggaatggaaagggtgtccttaagtttatgtggaattgcaatggcccctag

SEQ ID NO: 211823 - DNA, 492 bp, synthetic construct
  misc_feature 1..492: note = Description of Artificial Sequence: Synthetic coding sequence
  source 1..492: mol_type = other DNA
atggacgagtgcatcccccaggaccgggccccccgggacttctgcgtgaaattccccgaggagatacgccacgataaccttgctggacagctttggttcggcgcagaatgcctcgccgctggctctatcattatgaatcgcgagttggaaagcatggccatgaggcccctcgccaaggagttgacgaggagcttagaggacgtgaggggagcactacgggatcaagcactgagggatttaaatacgtatactgaaaagatgcgcgaggccctgcggcacttcgacgtgctgtttgccgagtttgagctgtcatatgtctccgctatggttcctgtcaaaagcccccgtgagtactacgtgcagcaagaggtgattgtcttgttttgtgagaccgtcgaaagggccttggacttcgggtatctcactcaggacatgatcgacgattacgagccggctctgatgttcagtataccccgcctagccatagtctag

SEQ ID NO: 211824 - DNA, 11112 bp, synthetic construct
  misc_feature 1..11112: note = Description of Artificial Sequence: Synthetic coding sequence
  source 1..11112: mol_type = other DNA
atggagggctgcgacagccccgtggtgagcggcaaggacaacggctgtggaatacctcagcaccagcagtggacagagctcaattcaacccacctgcccgataaaccctcaagtatggagcagagtactggagagtctcatggaccgcttgatagtctgagggcaccatttaatgagaggctggcagaaagtacagcgtccgccggacccccatcagaacccgcatccaaagaggtgacttgtaacgaatgttccgcgtcttttgcttcgttgcagacgtacatggaacaccactgccctagcgcacggccgcccccgcctctgcgcgaagagtccgcttctgacaccggggaggagggggatgaggaaagcgacgtcgagaacctggctggggagattgtataccagcccgacggaagtgcctacatcgtggagagcctaagtcagctgacacagggaggcggagcttgtggcagtggtagtggatctggccccctgcctagcttgttcctgaacagtctgccgggggcaggtgggaaacagggcgacccgtcatgcgccgctcctgtctatccccaaattattaacacgtttcacatcgcttcctcctttggtaaatggtttgagggacccgaccaggcattccctaatacttcagcactggcagggttgtctcctgtcctgcatagttttcgtgtgttcgatgtacgccacaagagtaacaaggactaccttaattctgatggcagcgcgaagtccagctgcgtgagcaaggatgtacccaacaacgtggatttgagtaagtttgacgggtttgtgctctatgggaaacgcaaaccgatactgatgtgcttcttgtgtaaactctctttcggctatgtccgcagtttcgtaactcacgctgtccatgaccatcggatgacattgagtgaggatgaacgaaagattctgtctaacaaaaatatctccgcgattatccaaggcattggaaaagataaggagcccctcgttagcttcctcgaaccaaaaaacaaaaattttcagcatcccttagtgtctacagcaaacctcatagggcctggccattcattctatgggaagttttcagggattcgcatggaaggtgaggaagctctgccagctggcagcgccgctgggccggaacagccccaggcaggcttgcttactccatcaacgctcctcaatctcggtggtcttactagttctgttctaaagaccccaattacatcggtgccactcgggccccttgccagcagtcccactaagagctcagaaggaaaagacagcggcgcagccgaaggggagaaacaggaggtcggagacggcgattgtttctccgaaaaagtcgaacccgcagaagaggaggcggaggaggaggaggaagaagaagaagctgaggaggaggaggaggaggaggaggaagaagaggaagaagaggaagacgaaggctgcaagggcctcttcccaagcgagctggatgaagagctagaggataggcctcacgaagagccgggggccgccgccggctcgtcttctaaaaaggatctggctttgtccaaccagtccattagcaacagtccgctgatgcctaacgttctacagaccctgtcaagaggcacggccagtaccagctccaattccgcttcgtcctttgttgtttttgatggagctaaccgcagaaaccggctcagcttcaactcagagggggtacgagccaacgtggctgagggcggccgacggctcgacttcgctgatgagagtgctaacaaggacaacgcaacggccccggagccgaatgagtccacggaaggagatgatgggggttttgtccctcatcaccaacatgctgggtctctctgcgaacttggggtgggtgaatgcccatccggcagcggagtggaatgcccaaagtgcgacacagtgctgggttcatcacggagcctggggggccacatgactatgatgcactcccggaacagctgcaagactctcaaatgtcccaagtgcaactggcactataagtatcagcagacacttgaagctcacatgaaggagaaacatcctgagcctggcggcagttgcgtttattgtaagagcggccagcctcatccaaggctggcacgcggtgagagctatacatgcggctacaaaccctttagatgtgaagtttgtaattacagcactaccacgaaaggcaatctttccattcacatgcaatcagataaacatctcaataacatgcagaatttgcaaaatgggggaggggagcaggttttttctcacactgcaggcgcagccgcagccgccgttgcagctgccgccgccgccgctaatatctcctcaagttgtggtgcccccagccctacaaaacccaagactaagccaacatggcgctgtgaggtgtgcgattatgagacaaatgtggctagaaacctcagaatccatatgacttcagaaaagcacatgcacaacatgatgctcttacaacaaaacatgacccagatccagcataaccgccacctcgggttgggcagcctgccctcacccgcggaggctgaattgtaccagtactatctcgcacaaaacatgaatctacccaatctgaagatggactccgccgcttcagatgcacaattcatgatgtccgggtttcagctcgacccggctggacctatggctgccatgacaccagctctggtgggcggcgagattccacttgatatgcggttggggggcggccagctcgtgtccgaggagctgatgaacctaggtgaatcctttatccagactaacgaccctagccttaaactcttccagtgcgccgtatgcaacaagttcaccactgataacctggacatgctcggactccatatgaatgtggaacgctccctatcagaagacgagtggaaggcagtgatgggcgacagttaccagtgcaagctatgtagatacaatacacaattgaaggccaacttccagcttcattgcaagactgacaagcacgtgcagaaataccaactggtcgcccatattaaagagggaggcaaagctaacgaatggcgactgaagtgcgttgccattggcaatccagttcacctgaagtgtaacgcctgcgactactataccaactcattggaaaaactgcgcctgcacaccgttaactctcggcatgaagcatccctgaaactttataaacacctgcagcagcatgagagtggtgtcgaaggcgagagctgttactaccactgtgtcctgtgtaactactctacaaaagcaaagcttaacctgattcagcatgtcagaagcatgaaacaccagagaagcgagagcttaagaaagttacagcgactgcagaaggggctgcctgaagaagatgaggacttgggccagatcttcacgatccgccgctgtccatcgacggatcccgaggaggctattgaggacgtggagggccctagcgagacggctgccgacccggaggaactggctaaggaccaggaggggggagccagctcctctcaagccgaaaaggaattaacagactcacccgccacctccaagcgaatttcatttccaggatcctcggagtcacctctgtcttccaagcggccaaagaccgccgaggagatcaagcccgagcaaatgtatcagtgcccctattgcaagtactccaatgcagacgtcaatagattgagggtgcatgccatgactcagcatagcgtgcagccaatgctacgctgcccactctgccaggacatgctaaataataaaatccatctccagctccatctgacacacttgcacagcgtggctcccgattgcgtggaaaagcttattatgaccgtgacaactcccgaaatggtcatgccttcttcgatgtttctgccggctgccgtgcccgatcgggatggaaattccaacctagaggaggccggcaagcagcctgagacgagcgaggacttggggaaaaacatcctaccctcagcatctaccgaacagtcaggagacctgaagccctcgccggcagaccctggatccgttcgcgaggattccggtttcatatgctggaagaagggctgcaaccaagtttttaagaccagtgctgcgctccagacccacttcaatgaggtgcatgcgaaaaggccgcagctccccgtgagtgatcgccacgtctacaagtatcgctgcaatcaatgctcactcgctttcaagaccattgaaaagctgcagcttcacagccaataccacgtcattcgcgctgccacgatgtgctgtctgtgtcagcgcagctttaggacgtttcaggcgctcaaaaaacatctggagacctcacacctcgagttgtccgaagccgatatccagcaattgtacggcggcctgctggctaacggagacctactggctatgggtgaccctacactagctgaagatcacaccatcatcgtggaggaggataaagaagaagagtccgatctcgaggataaacagagtccaacaggttctgacagtggttccgttcaggaggactcgggttcagagcctaagcgggcactcccctttcggaaaggaccgaattttaccatggaaaagtttctggatcccagccggccttataagtgcacagtatgcaaggagagcttcacccagaagaacatcttgttggttcactacaactccgtctcacatttacataaactgaaacgggctctgcaagaatctgccactggccagcccgagccaactagctcacctgacaacaaaccgttcaagtgtaacacctgcaacgttgcatatagccagagtagcaccctggaaatccacatgcggagcgtccttcaccaaacaaaggcacgggctgctaagctcgaggcagcctctggatcaagcaacgggacagggaactcgtcatctatatccctgtcctcttccacccctagccccgtgagcacatcagggtccaatacgttcacaacctcaaaccccagctccgccgggattgcgccgtcatctaatctcctttcccaagtgccaaccgaaagcgttgggatgcccccactaggtaacccgataggcgccaatatagcctctccttctgaaccaaaagaggcaaatcgaaaaaagctggcagacatgattgcctctcggcaacagcagcagcagcaacagcagcagcagcagcagcagcagcagcagcagcagcaagcccagactctggctcaggcccaggcacaagtgcaggcacatttacagcaggaactgcaacaacaggcagccctgattcagtcccagctgttcaaccccacgctgctgcctcattttccaatgacgaccgaaaccctgctgcagttgcagcaacaacagcaccttttgttccccttctacattccatccgctgaattccagctgaaccccgaagtttcgttgccggtgactagtggagcacttacgcttacgggcacaggacctgggcttctggaagatctgaaagctcaagtgcaagttcctcaacagtcacatcaacagattctgcctcagcagcagcagaaccaactctctatcgcacagagtcattccgctcttcttcagccgagccagcacccagagaaaaagaataaactggtgataaaagaaaaggaaaaagagtcgcagcgggaaagagattccgccgagggaggagagggaaacactggcccaaaggagacactgcctgatgccctcaaggctaaggagaagaaggaacttgcccctggtggtggatccgagccctctatgctgccaccacgcatcgcctccgatgctcggggaaacgctaccaaggcccttttggagaattttggattcgaactggttatacagtataatgagaacaagcagaaagtgcagaagaagaacggcaagacggaccagggcgagaacctcgaaaaactggagtgtgactcgtgtggtaagctgttcagtaacatacttattttgaagagccaccaagaacacgtacaccaaaactatttcccttttaagcagctggagcggttcgctaaacagtacagggatcattatgacaaactgtatccgctgaggccgcagacgccggaaccaccgcctccccctccccctcccccccctccccctctgcccgcagctccaccacagcccgcgtccactcccgccatcccggcttccgccccacccataacttcgcctaccattgctccagcccagccatccgtgccacttacgcagttgtctatgccaatggaactgcccatattctcccccctgatgatgcagacgatgccgctccagactcttcccgctcaactgcctcctcagctcgggcctgtggaacccttaccagccgatctggcccagctctaccagcaccagctcaaccccactttgctccagcagcaaaacaagcgccctcgcacacggataacagatgatcaactgagggtcttacggcagtatttcgacatcaacaattctcccagcgaagaacagatcaaagagatggccgacaaaagcggtctgccgcaaaaggttatcaagcactggtttcggaataccttgtttaaagagcggcagcggaataaggattccccctataatttttcgaacccccccattaccagcctggaagaactgaaaatagactcaaggccgccatctcccgaacctcccaagcaagagtattggggatcaaagcgatcctccaggacgagattcaccgactaccagcttcgagtccttcaggatttcttcgatgccaacgcctatcccaaggacgatgaattcgaacagctgtcaaacctgctgaacctccctacacgagttatagtggtgtggttccagaatgcccggcaaaaggctcggaaaaattacgagaatcagggcgaaggtaaggatggggagcggagagagcttacgaatgatcggtatatcagaacatcaaatttgaactatcaatgtaaaaaatgtagcctcgttttccagcggatattcgatctcatcaagcatcagaaaaaactgtgttataaggatgaagacgaggagggccaggatgactcgcagaatgaggactctatggatgcaatggaaatcttgaccccgaccagctctagctgctccaccccgatgcctagccaggcttattctgcgccagctccgtcagccaataatacagcctccagcgcttttttgcaattgaccgctgaggcagaagagttggcaacgttcaattctaaaaccgaggccggcgacgagaagcccaagttagccgaagccccttccgcacaacccaatcagacacaggaaaagcagggccagccaaagcccgaactgcaacagcaagagcaaccagaacaaaaaacaaatacccctcagcagaaattgccccaactggtgtctctaccttccctgccacagcccccaccgcaggcgccaccaccacagtgccccctcccacagagcagtccatcaccttctcagctcagccacctgcccttaaagccgcttcacacctccacacctcagcagctcgccaacctgcctccgcagctcatcccataccaatgcgatcagtgcaagctggctttcccttcatttgaacactggcaggagcaccaacaactgcacttcctgtccgcccagaatcagttcatccacccccagtttcttgatcggagcctggacatgcccttcatgctcttcgaccccagtaaccccctgcttgcgagccagttattgtcaggtgctatcccccaaattcctgccagtagcgccaccagtccgagcacaccaacctccaccatgaataccctgaagaggaagttagaagagaaagcaagcgctagccccggagagaacgacagcgggacggggggcgaagagcctcagagggataagcgtctgaggaccacaatcacccccgagcagctagagatcctgtaccaaaaatacctgctggactcaaacccaacacggaaaatgcttgatcacattgcccatgaagtgggccttaaaaagagagtggtgcaagtgtggtttcagaacactagagcgagagaaagaaaaggccagtttagagccgtgggtcccgcccaagcccatcgcagatgtccgttttgtcgggcactttttaaagcaaaaacagccttggaggctcacatacgctccaggcactggcacgaagctaagagggcagggtacaatttgaccctgtctgccatgctgctcgactgcgatgggggcctccagatgaagggggatatttttgacggcacaagcttctcacatttgcccccaagttcgtcggacggccaaggcgtaccccttagtccagtgtccaaaacgatggaactctcaccacggacactcttgagtcctagttctatcaaagtcgaaggcatcgaggattttgaaagcccatccatgtcttccgtgaatctgaactttgatcagacaaagctggataatgacgactgcagttctgtgaacactgctattacagacacgacgacaggcgatgagggaaacgctgataatgattcagcaacaggtatcgcaactgaaactaaaagtagttcagctccaaacgagggcctcaccaaagccgctatgatggctatgtctgaatacgaggatagattaagcagtggtctcgtatcaccagcgccatctttctacagcaaggaatacgataacgagggcaccgtggactattctgagacgtcttctttggccgacccctgtagccctagcccaggagcgagtggcagtgcaggcaagagcggggacagcggagatcgccccggccagaaaaggttccgaacacaaatgactaatctgcaattgaaagtgcttaaaagctgctttaacgactaccgcacccccacaatgcttgagtgcgaggtcctcggcaacgacattggtctccccaagcgggtggttcaagtttggtttcagaatgccagggcgaaggagaagaaatctaaactgtccatggccaaacacttcggaatcaaccagacttcttacgagggcccaaagactgaatgcacactgtgcggcattaagtacagtgcacgcttgtcagtacgagatcatatctttagccaacagcacatttccaaagtgaaagatacaatcgggtcccagctggataaggagaaagagtattttgacccagcgactgtgcggcagttaatggcccagcaggaactagacagaatcaaaaaagctaacgaggtcctgggtttggcagcccagcagcagggtatgtttgacaacacacccctacaggctcttaatctcccaaccgcctaccccgcccttcaaggcataccccctgttcttctcccaggcctgaactcaccatcactccctgggttcacacccagcaacaccgccctgaccagtcctaagcccaacctcatgggtctgcctagtaccacagtcccgtcaccggggctccctacgtcaggcctacctaacaagcccagcagcgcatctctatcttcgccaacacccgctcaggctaccatggctatgggcccccagcagcccccacagcaacagcaacaacagcagcagccccaggtgcagcagccgcccccacccccagcagcccagcccccacccacacctcaactacctctgcagcagcagcaacaaagaaaggacaaggattccgagaaggtcaaagagaaggaaaaagcacataagggaaagggcgaaccgctgcccgtgccaaaaaaagagaagggcgaggcgcctaccgccactgccgcgaccatatctgcacctcttcctacgatggagtacgccgtggacccagctcagctgcaggcactgcaggctgccctgaccagtgaccctaccgcacttttgacctcccaattccttccatatttcgtgcccggcttctcaccctactacgccccgcagatcccaggggcactgcaaagtggatatctccaaccaatgtacgggatggagggcctgttcccctactccccagcactctcccaagccctaatgggactctcccctggctcgttacttcagcagtaccagcagtaccagcagagtcttcaggaagcaatccagcaacagcaacaacgccaactgcagcagcagcaacagcagaaggttcaacagcagcagcctaaagctagccagactccggttccccctggagcaccctcacccgataaggacccggctaaggagtcccccaagcctgaagaacaaaaaaacaccccgcgcgaggtgtctcctctactacctaagttgccagaagaacctgaggctgagtctaagagtgccgacagcttgtatgatcccttcattgttcctaaagtgcagtataaactggtgtgtagaaagtgccaggccggattttctgatgaagaggctgcccgcagtcacctcaaatctttgtgcttttttggccagtcagtagtcaacttacaggagatggtgcttcacgttcctactgggggagggggggggggttctggagggggaggcggcggcgggggtgggggcggtggtggaggttcataccactgtctggcctgtgagagcgctctttgcggcgaagaagccctcagtcaacatctggaatcagcgctccataaacaccgtacaataaccagagcagcacgaaatgccaaagagcacccttctttgttgccacatagtgcgtgcttcccggatcctagtaccgcctccacaagccagtccgcggcacattccaacgactccccgccaccacctagtgcagccgccccttcttctgcctccccccacgcatcaagaaaaagttggccacaagtagtgagcagggcctccgccgccaagcctccgtccttcccacctctgtctagttcatcgacagttacctcatcttcttgtagcacttcgggtgtccagccaagtatgcctacagatgactatagcgaagagagcgacacggacttaagccagaaatctgatggccccgcatccccagttgaaggccccaaggacccctcatgccccaaagactcgggtcttacctcagtcgggaccgacacatttcgcctgtag

SEQ ID NO: 211825 - DNA, 8370 bp, synthetic construct
  misc_feature 1..8370: note = Description of Artificial Sequence: Synthetic coding sequence
  source 1..8370: mol_type = other DNA
atgcggctgggcggcggccagctggtgagcgaggagctgatgaacctcggcgaatcatttatccagactaacgatccgagcctcaaactttttcagtgcgcagtctgcaacaagtttactacagacaacctggatatgttgggcctgcatatgaacgtggaaagaagtctgtccgaagatgagtggaaggccgtgatgggggattcttatcaatgtaaactgtgtcgatataatacccagctcaaggctaacttccagttgcattgtaagacagataagcacgttcaaaaataccagctcgtggcccacattaaggagggagggaaagccaacgagtggcggctgaagtgcgtggcgatcggaaatccagtacacttgaaatgtaacgcttgtgattactatacaaacagtctcgagaagctccggttacacacagtgaattctcggcatgaggccagcctgaaactgtacaaacacctccagcagcatgaatctggagtcgagggcgaatcatgctactaccactgcgtgttgtgtaattatagcaccaaggcaaagctgaatctcatccagcacgtgcgttccatgaagcatcagcggtctgaatcgctgcggaagctgcagcggctacagaaaggcctccccgaagaggacgaggacctaggacagatctttaccattcggagatgtccgtcaaccgatcctgaagaagcaatagaggacgtggagggcccctccgagacagcagctgatccggaagagttagcgaaggaccaggaaggtggcgccagtagctctcaggccgagaaggagttaaccgacagcccagccacatccaagaggatcagctttcccgggtcaagcgaaagtcccttgtcatccaaaaggccaaaaaccgccgaagagatcaagccagagcaaatgtaccagtgtccctactgcaagtactctaatgccgatgtaaaccgcctcagggtacatgcgatgacacaacatagtgttcagccaatgctccgctgtccactctgtcaagacatgttgaacaacaagatccatctgcagctgcatctcacacatctgcacagcgtggcccccgactgtgtcgagaagctgattatgactgtgactacaccagaaatggttatgcctagcagcatgttcctgcctgctgccgtgcccgacagagacggtaattccaaccttgaagaggccggcaaacagccagagacatctgaagacttgggtaaaaacatcttgccaagtgccagtaccgaacagtccggagacctaaagccaagtcctgccgacccaggcagcgtgcgagaggatagcggatttatttgttggaagaaaggttgcaaccaggtgtttaaaacatcagcagcgctgcagacccacttcaacgaggtccatgccaagcgtccgcagttacctgtcagcgaccgccacgtatacaaatacaggtgcaatcaatgttccttagcattcaagaccatcgagaagctccaacttcactctcagtaccacgtgatccgcgctgcaacaatgtgctgtttgtgtcagagatcattccgcacatttcaggctctgaagaagcatctggagactagccatctcgaactgtctgaagccgatattcaacagctgtacgggggtcttctggctaatggcgatctgctcgcaatgggggaccctactcttgctgaggaccatacaataattgtggaagaggataaggaagaagaaagtgacctcgaggacaagcaatctcccacgggaagcgattctggcagtgtccaagaggatagcggatcagaaccgaagagagctctccccttccgcaaaggtcccaacttcactatggagaaatttctcgatcccagtagaccatataaatgtactgtttgcaaggagtcctttactcagaagaacattctcctggtccactacaacagtgtgagccacctccataagctgaaaagagccctgcaagaatccgccacaggtcagcccgagccaacatcatcccctgataacaagccttttaagtgcaacacgtgtaacgttgcctactctcagagttcaacactggaaatccacatgagaagtgtcttacaccagacaaaagcccgggcggccaaacttgaggcagcgagcggaagctctaacggcacagggaattcctcatctatcagtctaagcagctccacccctagtccggtgtctacttctgggtccaacacattcaccacatccaatcctagctctgcagggattgcacctagtagcaatttattatcacaggtccctactgaatccgtgggcatgcccccccttgggaaccccatcggagcaaacatcgccagtccgtccgagcccaaggaagctaacagaaaaaagctggctgacatgattgctagcagacaacaacagcaacagcaacaacaacagcagcaacaacaacaacagcaacagcaacaggcccagaccctggcgcaggcacaagctcaggtccaggcccacctgcagcaggagctgcagcagcaggctgccctcatccagtcccagctttttaaccccacgctgttgcctcactttcctatgactacagagacccttctccagctccaacagcagcagcatctgttgttcccattttatatcccgagtgcagagtttcagctgaaccccgaggtctctctgcctgttacttctggtgccctcacgttaacagggaccggaccaggcctcctcgaagacttaaaagcccaggtgcaggtcccccagcagtcccaccagcaaattcttccacagcaacagcagaaccagctgtctattgcccagtcacattccgctctgctgcaaccatcacagcaccctgaaaaaaagaataagctggtgattaaggaaaaagaaaaggagtctcagcgagaacgggactccgcagaagggggtgaaggaaataccggtccaaaagagacgttgcctgatgcactgaaggcaaaggagaaaaaggaactggcacccgggggtggatctgaaccctcaatgctcccacccagaattgcatccgacgcccgcggaaacgctactaaggctctccttgaaaatttcggttttgaactcgtgatccagtacaacgagaataagcagaaggtgcagaaaaaaaacggaaaaaccgaccagggggagaatctcgaaaaattagaatgtgactcctgtggaaaacttttcagcaacatcttgattctgaagtctcaccaggaacatgtccaccaaaactactttccctttaagcagctcgaaagatttgcaaaacagtatcgtgatcattatgacaaactctaccctctgcggccgcagacaccagagcctccacctccgccccctcccccgcccccgccccccctacctgctgccccaccccagcctgcaagtaccccagccatccccgcctccgccccacccataactagccccaccatcgcccccgcacagccatcggttccactgacccagttatcaatgcctatggaactccctatcttttcccctctcatgatgcagactatgcccctacagaccctgcctgctcagctaccgcctcagttgggcccagtggagccccttcctgcggacctcgcacagctctaccaacaccaactgaaccccacactcctgcagcagcagaacaagcggccaagaacccgcatcactgacgatcagctgcgtgtcctgaggcaatacttcgacattaataactccccttccgaagaacaaattaaagaaatggccgataagtccggcctgcctcagaaggtgattaaacattggtttcggaacactctgtttaaagagagacagcgcaacaaagactctccatacaacttctcgaatccacccattactagcctggaggaacttaagatcgattcaaggccgccctctcctgagccccctaagcaggagtattggggcagcaagcgctccagccgtacacggttcacagactatcagctgcgggtgctgcaggattttttcgacgcaaacgcatacccaaaagacgacgaatttgagcagctgagcaacctcctcaacttaccgacgagagttatagtcgtttggtttcagaacgcccggcagaaagccagaaagaattatgaaaatcaaggggaggggaaggatggcgagcgccgtgaactgaccaacgacaggtacattagaacttccaaccttaattatcagtgcaaaaaatgttccctggttttccaacgcatcttcgacttgatcaagcatcagaagaaactatgctataaggatgaagacgaggagggacaggatgacagccagaacgaagatagcatggacgcgatggagatcctcaccccaacatctagtagttgtagcacccccatgccgtcccaggcttactcagctcccgctccgagcgcgaacaacacagccagttctgcatttctgcagttgacagccgaggctgaagagctggcgacgttcaatagtaaaaccgaggctggagatgaaaagcccaaacttgcagaggcgccctccgcgcaacccaatcagactcaggaaaagcagggacagcccaagcccgagctccagcaacaggagcagcccgagcagaaaactaacactccacagcagaagctgccgcagctggtcagtctcccgagcctgccccagccaccaccacaggccccccctccacaatgtcctctgccccagtcttcaccaagcccgtcccagttatcccatctgccactgaagcctctccatacgtcaaccccgcagcagttggccaatctgccgccacaactcatcccttatcagtgtgatcaatgcaagctggccttccccagcttcgagcattggcaggagcatcagcaactgcattttctttcagcgcagaaccaattcatccacccccaattcttggatagatcgctggacatgccgttcatgttattcgatccaagcaacccgctgttagcaagtcaactgctttctggtgctatccctcagatccccgctagctccgcaacatctccctcaacccctacaagcacaatgaacaccttgaagaggaagttggaggaaaaggctagcgccagtcctggcgagaacgactcaggcaccggcggcgaggaaccacagagggacaaacgcttgcgcaccactatcaccccagaacagctggagatactctatcaaaaatatctgctcgattccaaccccactcgcaaaatgctggatcacatcgcgcatgaggtcgggcttaagaagagagtagtgcaggtgtggttccagaatacacgggcgcgggagcggaagggccagtttagagctgtgggccccgcccaggcccaccgccgctgtcctttctgccgcgctcttttcaaggccaagacggcgctggaagcccatattcggtcgagacactggcacgaggccaaacgtgccggatacaacctcactctctcagctatgctactggattgcgacggagggctgcagatgaaaggggacatattcgacgggacctctttcagtcaccttccaccaagctcttccgatggccagggtgttccgctcagccctgtgagtaagacaatggaactgagtccacggactcttttgtcacccagctctattaaggtagaaggaattgaagatttcgaaagcccgtcgatgtcctccgtgaatctgaatttcgaccagaccaagctggacaatgacgattgctcaagcgtaaacaccgctatcactgatacgaccactggtgatgaaggcaacgcagataatgacagcgccacaggaatcgcgaccgagaccaaatcaagttctgcacccaacgaaggcctgacaaaagccgcgatgatggccatgtcggagtacgaagaccgcctttccagtgggctggtcagccccgcaccaagcttttacagcaaggagtatgataacgaaggcacggttgactattctgagactagctctcttgccgatccttgctctcctagtccgggggcttctggaagtgctggaaaatcaggagatagcggtgatagacccggacagaaaaggtttcgcacccagatgactaacctacagttaaaagttctgaaaagctgtttcaacgattatcggactcccaccatgctggaatgtgaagtcttaggcaatgacatcggcctgccgaagcgcgtcgtccaggtttggtttcaaaatgcacgcgcaaaggagaaaaagagtaagttgagcatggctaagcacttcggtatcaatcagacaagttacgagggtcccaagaccgagtgtacactgtgtggaataaaatactctgcacggctgagcgtcagggatcacatcttcagccagcaacacatcagcaaggtgaaagacacaatcggaagccagcttgacaaggagaaggaatatttcgatcctgccactgtgaggcaattgatggcgcaacaggagctcgaccggattaaaaaggcaaatgaggttttaggactggccgcacagcagcaggggatgttcgataacacgcctctgcaagcactaaacctgccaaccgcatatcctgcactccaggggattccaccagtcttgctgccagggttgaattctccttctctccccggatttacccctagtaacaccgccctgacgtcgccaaagcccaacctgatgggactcccttcaaccacggtgccatccccgggtctcccaaccagcgggcttcccaacaaacccagttcagcatcactctctagtcccacaccagcacaggccaccatggccatgggaccccaacaaccgccccagcaacagcagcagcaacagcagccccaggtccagcagcccccccctccgcctgccgctcaaccccccccaactccgcagctcccacttcaacagcaacaacagcgcaaagataaggattcagaaaaggtcaaggagaaagaaaaagcacataaggggaaaggcgagccgttgccagtaccgaagaaagaaaagggagaagcccccacagctacagccgctacaatctcagccccattgcctactatggaatacgccgtggaccccgcgcagctccaggcgctgcaagcagccttgacttctgatccaaccgccctgttgacatcccagtttctgccatacttcgttccaggtttctccccttactatgctccccagatccccggggccctgcaatccggttacttgcaaccaatgtacggcatggagggcctgtttccctatagccccgccctgagtcaagcccttatgggcctaagcccgggatcgttgttgcagcagtaccagcaataccagcagtctctgcaggaggcaattcaacagcagcaacagaggcagttgcagcaacaacagcagcaaaaggtgcagcagcagcagccaaaagcctctcagaccccagttccccccggtgccccaagccccgataaagaccccgctaaggaatccccaaagcccgaagaacaaaagaacacgccgcgtgaggtgtcacctctgctccccaagctgcccgaagaaccagaggctgagtcaaaatccgctgacagcctgtacgaccctttcattgtgcctaaagttcaatataaactggtatgccgcaaatgccaggccggcttctccgatgaagaggcggcacggagccacttgaagtccctctgcttcttcggacaatctgtagtgaacctgcaggagatggtactccatgtgcccactggagggggcggaggaggctcaggcggcgggggcggggggggagggggtgggggcggcgggggctcctatcattgcctggcctgtgagtcagctctgtgtggtgaagaagctctgtcacagcacctggagtccgctcttcacaaacaccgaacaatcacgcgagccgcacgaaacgcaaaggagcatccatcccttctgccccacagcgcctgcttccctgacccatccaccgcttctacctcccagtcggcagcgcatagcaacgactcgccgcctcccccctctgctgcagctcctagctccgcttcccctcacgcttctcgaaaatcatggccgcaagttgtgtcacgtgccagcgcggccaagcctccaagcttcccacctttatctagctccagcaccgtgaccagcagctcttgcagtaccagcggagtgcagcctagcatgccgacggatgactattcagaagagagcgataccgatctatcccaaaagtctgatggacctgcgagtcccgttgagggccctaaggacccatcgtgtcctaaggacagtggtcttacttccgtgggaaccgatacattcagattgtag

SEQ ID NO: 211826 - DNA, 10704 bp, synthetic construct
  misc_feature 1..10704: note = Description of Artificial Sequence: Synthetic coding sequence
  source 1..10704: mol_type = other DNA
atggagacctgcgacagcccccccatcagccggcaggagaacggccagtcaacgtccaagctgtgtgggacaacacagttagataatgaggtgcccgaaaaagtggcaggcatggaaccggaccgggagaattcaagtactgatgacaacttaaaaaccgacgaaagaaaaagcgaggcgctcctgggattctccgtggaaaacgccgccgccacccaggtcacatctgccaaagaaataccgtgcaatgagtgtgcaacctccttcccaagcctgcaaaagtacatggaacatcattgtccaaacgcccgactgccagtattaaaagacgataacgagtccgagatcagtgaactagaggactccgacgtggagaatctgactggtgaaattgtctaccaacctgacggcagcgcttatataattgaagactctaaagaatccggccagaacgcacagaccggagcgaattcgaaactgttctctaccgcaatgttcctggactccctggcatcagcaggagagaaatccgatcagtcggcatcagccccgatgagcttctaccctcaaattatcaatactttccatatcgcttcctcccttggaaagccctttactgccgatcaggccttccccaatacgtcagcgctcgctggcgtgggtcctgtcctgcattcattcagagtctacgacctgagacataagcgtgaaaaagactatctaacatctgacgggtcggccaagaactcctgtgtctccaaggacgtgccaaacaatgtagatctgtcaaagtttgacggctgcgtgagcgacggcaagcggaagccagtgctgatgtgttttctgtgcaaactctccttcggctacataaggagttttgtaactcacgccgtgcacgaccatcgcatgaccctaaatgatgaggaacaaaagctcctatcgaacaaatgcgtcagcgctatcatacagggcattgggaaggacaaggaaccgcttatcagctttctggaacctaaaaagagcacatccgtgtacccccatttctctaccaccaacctaataggccctgacccaacctttcggggtttatggtcagcttttcatgttgagaatggagacagcttgcccgccggtttcgcatttctgaagggctctgctagcaccagcagtagtgcagaacagcccctggggattacacagatgccaaaggctgaagtcaacctcggggggctttcctctttggtcgtgaacacaccaatcacttccgtgagcttgagccactcatcgagcgaaagcagcaagatgagcgaatcaaaagatcaggagaataactgcgagcgccccaaagaatccaacgttctgcatcctaacggagagtgtcccgtgaagagcgagcccacggagcccggtgatgaggatgaagaggacgcgtacagcaatgagctcgacgatgaagaggttttgggagaactgacagacagcatcggaaacaaagactttccactccttaatcagtcaattagtcctttgtcttctagcgtcttaaaattcatcgaaaagggaacgagctcctcctcagcaacagtttccgatgataccgagaagaagaagcagacggccgcagtccgagcatccgggtcagtggcgtctaactatgggatttccgggaaggattttgccgacgccagcgcctccaaagactcggccacggctgctcatccatcagagatagcccgaggcgatgaggatagctccgccacccctcatcaacacggatttaccccttcaacgcctggaactccaggccctgggggcgacggttcacctggctccgggatagagtgccccaaatgcgacacagttttaggttcatctagatcccttgggggacacatgacaatgatgcatagccgaaactcttgcaagacgctaaaatgtccgaaatgcaattggcactacaaataccagcagacccttgaggcacacatgaaggaaaagcatcccgagcctggtgggtcatgtgtttactgcaagaccggtcagcctcacccacggctggctcggggggagagctacacctgcggctacaagccctttagatgcgaagtatgtaactactcaacaactaccaagggtaatctgtctattcacatgcagtctgacaagcacctgaataacgtgcagaatttgcagaatggcaacggcgaacaagtttttgggcactccgccccagcccccaatacaagcctctctggttgtggaaccccctcccccagcaaacctaaacagaaacccacttggcgctgtgaagtctgtgattatgagactaacgtcgccagaaatctacggatacatatgacctcagagaaacacatgcacaatatgatgctgctccagcagaatatgaagcagatccagcacaatctccatctgggcctggcccctgctgaagctgagctctaccagtattacctcgctcagaacataggtcttacaggcatgaaactggaaaaccccgccgatccccagctgatgataaacccattccagctcgatcctgccaccgccgccgccctggctccgggcctgggtgaactaagcccttacatttcagatccagcgctcaagctgtttcagtgcgccgtttgcaacaagttcacctctgattctctcgaggccctatccgtgcacgtgtccagcgaacggtcgttacccgaagaagaatggagagctgttatcggcgatatttaccaatgtaaactctgtaactacaacactcagttgaaggcgaatttccagctccactgcaaaaccgacaaacatatgcagaagtaccagttagtggcccacattaaggagggcggaaaatcaaatgaatggcggctcaaatgtattgcaataggaaacccagtgcacctgaaatgtaatgcgtgcgattactacactaactccgtggataaactacgcctgcacacaactaaccaccgacatgaggccgcattaaaactgtacaagcatctgcagaaacaggagggcgctgttaatccggagagctgttattactactgtgctgtgtgtgattatactaccaaggtaaaactcaacctggtgcagcatgtccgaagcgtgaaacatcagcagaccgaagggctgcgcaagttacagctgcatcagcagggcctggcccctgaagaagataacttaagtgaaattttcttcgtgaaagattgcccacctaacgagttggagacagcatcactgggagcacgtacatgtgacgacgatttgaccgagcagcacgaggaggctgagggcgcaattaagcccaccgccgtggctgaggatgacgagaaagacaccagcgagcgtgacaactccgagggcaagaactctaacaaggactcggtgagtgttgcaggcggaacccagcccctgctgttggctaaggaagaagatgtcgccaccaagaggtccaaacccacagaagataataagttttgccacgagcagttctaccagtgcccctactgtaattataacagccgggatcagtctcgcattcagatgcacgtgttgtcacaacacagtgttcagccagtaatttgctgcccattatgccaggacgtcctttcaaataagatgcatctccagcttcacctgacacacctccatagtgtcagtccagactgcgtggagaaactcctcatgacggtgcctgtgcctgatgtgatgatgcctaacagcatgctattgcccgcagccgcaagcgagaagagcgagagagatacaccggcagctgtcacggctgaggggtcgggcaagtacagtggagaaagtcccatggacgataagtccatggctggactggaagattctaaagcaaacgtcgaggtgaaaaatgaggagcaaaagcctaccaaggagcccctggaggtctcagagtggaacaaaaactcaagcaaggatgtgaagattccagatactttgcaagaccagctaaatgaacaacagaaaagacagcccctctctgtgtccgataggcacgtgtacaaatatagatgtaatcactgttctctggcatttaaaacaatgcagaagctccagattcatagccaataccacgctattagagcggcgacgatgtgcaacctctgccagcgatcctttaggacatttcaggcactgaagaaacacctcgaggctggccatcccgagctctccgaagccgagctccaacagctttatgcaagcctaccggtgaatggggagctctgggcagagagtgagaccatgagtcaggacgaccatggcctagagcaggaaatggaacgcgagtatgaggtggaccacgaggggaaggcctcgcccgtagggtccgactcttcctctatccctgacgatatgggcagcgagccgaagaggaccctcccttttcggaagggccctaacttcactatggagaaattcctcgaccctagtcggccctataagtgcaccgtatgtaaagagtcttttactcagaaaaacattctcctcgtgcactataactctgtttcacacctgcacaagctgaagaaggtcctgcaggaggcttctagtcctgtgccacaggaaaccaactccaacacagataacaaaccctacaaatgttcaatatgtaacgtggcctatagccagagttccactctggagattcacatgcgctccgtgctacatcaaactaaagctcgcgccgctaagctggagccatctggacacgttgccggcgggcactcaattgccgccaacgtgaactcccctgggcagggcatgctagacagcatgagccttgccgccgtcaatagcaaggacacccatctcgacgccaaagagctcaataagaagcagacacctgacctgatttcagcccagcccgcgcatcaccccccacagtcacccgcacagatccagatgcaactgcaacacgaacttcagcagcaggccgcttttttccagccacaattcctaaatcctgcctttctgcctcatttcccgatgacgccagaagccctgctgcagtttcagcaaccccaatttcttttccccttctacattcccggcacagagttttctctgggccctgatctggggttgccgggatccgctacctttgggatgcccggcatgaccgggatggcaggtagtcttctggaagacttaaaacaacaaattcagacccagcatcacgtggggcagacacagctacagatccttcaacagcaggcccagcagtaccaggccacacaaccacagctgcagccacagaaacagcagcagcagccaccaccaccgcaacagcagcaacagcagcaggcatccaagctgttgaagcaggagcagtctaacattgtgtctgcggattgtcagattatgaaagatgtgccttcttataaagaagctgaagacatttctgagaaacccgaaaaacctaagcaggagttcatctccgaaggtgaagggctcaaggaaggaaaggatacaaaaaaacagaagtctctggagccaagtatcccacctccgaggatcgcttctggagcgcggggcaacgccgctaaagctcttctcgaaaacttcggcttcgaattagtgattcagtataacgaaaacagacagaaggtccagaagaaggggaaaagtggcgagggggaaaacacagataagctggaatgtgggacttgtggaaaactattttctaacgtcctgatcttaaagtcacaccaggagcatgtgcacgggcagttctttccttacgccgcccttgagaagtttgcccggcagtatagggaggcatatgataaactttacccaatctctccatcttctcccgagaccccgcctccacctcctccaccacctcctcttcctccagcaccacctcaaccctcctcaatgggccccgtgaagatcccaaacaccgtgtccacacctctgcaggcccctccaccaacccctcctccaccacccccccctccgcccccaccccctcccccacctcctccccctccaccttctgctccccctcaggtgcagctgcctgtgtctcttgacctcccactgttcccgagcataatgatgcagccggtccagcacccagcactccccccccagctggcccttcagctgccacagatggatgcactgtcagctgacctaactcaactgtgtcagcagcagttgggactggaccctaacttcctgaggcacagccaatttaaacggccaaggactaggatcaccgatgatcagttgaaaattcttcgggcgtatttcgatataaataacagtccctccgaggaacagattcaagagatggctgagaagtccggactgtcccagaaggtcatcaagcattggttcagaaatacactgttcaaagagcgacagcgcaataaagattctccctataatttctccaaccctcctatcacggtgctcgaagatatccgcatcgacccccagcccacaagcctggagcattacaagtctgatgcttcctttagcaagcgctcctcccgcaccagattcactgactaccaactgagggtccttcaagatttctttgatacgaatgcttatcctaaggatgatgagatagagcagctctcgaccgtgcttaatctgcccacaagagtcatcgttgtttggtttcagaacgcgaggcagaaggcgcggaagagctacgagaaccaagcagaaactaaggacaatgaaaagcgagagctgacaaacgagcgctacataagaaccagcaatatgcagtaccaatgcaaaaagtgcaacgttgttttcccacgcatatttgatctaattactcatcagaaaaagcagtgctacaaagatgaagacgacgatgcacaggacgagtcgcaaaccgaggattccatggacgccacggatcaagtagtctataagcactgtactgtttccggccagaccgacgccgctaaaaacgctgcagccccagctgcctcctctggctcaggcacttcaacgccccttatcccctcgccgaagcccgagcccgaaaagacctcacctaagccagaatatcctgctgagaagcccaagcaatcggatccatcaccaccctcccagggcacgaaacccgctctgcccctggctagcaccagtagcgaccccccccaggccagcaccgcccagccgcaaccacagcctcagcccccaaagcagccacaacttattggtcgacccccatcagcttcacagacaccagttcccagcagtcccctgcagatctccatgacaagccttcaaaatagtctgccaccccaactgctgcaatatcagtgtgatcagtgcacggtggctttccccacattggaactgtggcaggagcaccagcacatgcattttttggctgcccaaaaccaattcctccactcaccctttcttgagcgccccatggacatgccatacatgatattcgaccctaataatcccttgatgaccggtcaactgctgggatcatccctgactcagatgccacctcaggccagttcaagccacaccactgcccccaccacagtggctgctagtctgaaacgcaagctggacgacaaggaagacaataactgcagcgaaaaagagggcggaaatagcggagaggatcaacacagagataaacgtctgaggaccaccatcacccccgaacagctggaaatcttatacgagaagtacctgctggatagcaacccgacaagaaagatgctcgatcacatcgccagagaggtgggattgaaaaaacgcgttgtccaggtgtggttccagaataccagagctcgagagcggaagggtcaatttagagccgtcgggcccgcacaatcacacaagagatgtcccttctgcagagctctgttcaaagcaaagagtgcgctcgaaagccacatccgcagtcgccattggaacgaggggaagcaagcaggttactcgttgccccccagtcccttaatcagtaccgaagatggaggcgaatccccccagaaatacatttatttcgactacccttcccttcccctcacaaaaatcgacttgtcctctgagaacgagctagcatccactgtgagcacccctgtaagtaagactgctgaactgtccccaaagaacctcttgtccccctccagctttaaagcggagtgtagtgaggacgtggagaacctaaacgctccaccagctgaagccggctacgaccagaacaagaccgattttgacgagacaagcagcataaataccgcaatctcggacgcaactacgggggacgagggtaatacagagatggagtctaccactggatcaagcggagatgtcaaacccgccctgagccccaaggaacccaaaactctggacactctgccgaagcctgctactaccccaactaccgaggtttgtgatgataaatttctgttctcgctgacatcaccctccatccatttcaatgataaggatggggaccacgatcagagcttttacataacggatgaccccgacgacaacgccgacaggagtgagacttcctcaattgctgatccttcgtctccaaatccctttggcagctccaatcccttcaagagcaaatcaaacgatagacccggacacaaacgttttcgcacacaaatgagtaatctgcaattgaaagtactgaaggcctgttttagtgattatcgcacacctacgatgcaggagtgcgagatgctgggtaacgagatcggcctgcctaaacgcgtcgtccaggtgtggttccagaacgccagagctaaagagaaaaagtttaagataaatatagggaagcctttcatgataaatcaggggggtacagagggtacaaagcccgagtgtactttatgtggtgtgaagtactccgcacggcttagtataagagatcatatcttctccaaacagcacattagtaaggtccgtgagactgtcggtagtcaactggatcgcgagaaagattatttagcccccaccactgtccggcaactgatggcccagcaagagctcgatcggattaaaaaggccagtgacgttttgggcctgaccgtgcagcagcctgggatgatggattcttcctccctgcatggcatttcacttcctaccgcctaccccggcttgcctgggctgccccctgtcctgctgcctggcatgaatggcccatcttccttaccggggtttccacaaaattccaatatcgcctctggcatgttggggtttcctacctcagccacctcctctccagctctgagcctgagctcggcccccaccaaaccacttctccagactccacccccacctcctcctccaccacccccaccaccttcttcatccctctccggccagcagaccgagcagcagaacaaggagtccgagaaaaaacaaacaaagcctaataaagtgaagaagatcaaagaggaagagttagaggctactaagccagagaagcaccccaaaaaggaggagaaaatatcttctgcacttagcgttcttgggaaggtagtgggtgagactcatgtggacccaattcagctccaggcgctgcaaaatgccatcgccggcgacccagcttcgttcattggaggccagttcctcccctatttcatcccgggcttcgcctcatatttcacacctcagttgccagggacagtgcaggggggatacttccctccagtctgtggaatggaatcactgtttccttatggacctactatgccgcagacgctcgctggacttagtcccggagccttgctgcagcagtaccagcagtatcagcaaaacctgcaggaatcactccagaagcagcaaaaacaacagcaggaacagcagcaaaagcctgttcaggccaagactagtaaggtcgaatcagatcagcctcagaatagcaacgatgccagcgagaccaaagaggataaatcaactgccacagagagcaccaaggaagaaccgcagctggaatcaaaaagtgcagacttctctgacacctatgtggtgccctttgtaaagtatgagttcatttgccgaaagtgccagatgatgttcacagatgaggatgctgccgttaaccaccagaagtcattctgttactttgggcaaccccttatcgacccacaagaaaccgtgctgagagttcccgtatccaagtatcagtgcctggcctgcgatgtggctatttccggaaacgaagccctgagtcaacacctgcagtcttctctgcacaaagagaagaccatcaagcaggcgatgcggaacgcaaaagagcatgtgagactgttgccccacagcgtatgttctcctaaccccaacaccactagcacctctcaaagcgctgcaagttcgaacaacacctatccacacttgtcttgtttttctatgaagagctggcctaatattctgtttcaagcgagcgctcgtagggctgccagccctccaagctccccacctagcctgtcccttccctctaccgtgaccagctccctgtgttccaccagcggagtgcaaacatcgcttcccacagagagctgtagcgatgaaagcgactccgagctgtcacaaaagttggaagacctcgacaatagcctggaggtcaaagcgaaaccggcatctggcctggacggcaactttaatagtattcggatggatatgttctctgtttag

SEQ ID NO: 211827 - DNA, 10803 bp, synthetic construct
  misc_feature 1..10803: note = Description of Artificial Sequence: Synthetic coding sequence
  source 1..10803: mol_type = other DNA
atggagacctgcgacagcccccccatcagccggcaggagaacggccagtcaaccagcaagctctgcgggacaactcaactcgataacgaggtccccgaaaaggtcgctgggatggagcccgatcgcgaaaacagtagtactgacgataacctgaaaacggatgagcgcaagagtgaggcgctgctgggattttcagtcgagaatgccgcagccacccaagtgaccagcgctaaggaaatcccctgtaacgagtgcgctaccagttttccatctctacagaaatacatggaacatcactgccctaatgcacgcctaccagtgctgaaggatgacaatgagtcagagatctctgagctggaggacagcgatgtcgaaaatctgactggcgaaattgtttaccagccggatggctccgcttacatcattgaggattccaaagaatccggccagaatgcccaaactggcgccaattccaaactgttcagcacggctatgttccttgactccctggcttccgccggtgagaagtcagaccagagtgctagcgcaccgatgagcttctatccccagatcataaacactttccatatcgcctctagcctcggcaagcccttcacggcagatcaagctttccctaacacctcagccctggccggggtcggacctgtgttgcattcattccgtgtttacgatctacggcataagcgggaaaaggattatctaaccagcgacggctcggccaaaaatagttgcgtctcaaaagacgtgcccaataacgtggatttgtctaagttcgacggttgtgtttcggacgggaagcgaaaaccagtcctgatgtgtttcctgtgtaaactgagcttcggctatattcggtcttttgttacccacgcggtgcacgatcaccggatgacgcttaacgatgaggaacagaagttattgtcgaacaagtgtgtgtccgccatcatacagggaattgggaaagacaaggaaccacttatctcctttctggagcccaaaaagagtacaagtgtgtatccccactttagcaccaccaatctcatcgggcctgaccccacattccggggactttggtccgcatttcatgtcgagaacggcgactcactgcctgccgggttcgcattcctaaaggggagcgctagcacatcttcctccgcagaacaacctctcggaatcacacagatgccaaaggcggaggtgaatctcgggggattaagctcactagtggtgaacactcccataactagcgtttctctgtcacattcctccagcgaaagctctaaaatgagcgaaagcaaggaccaagagaacaattgcgagagacccaaagagtctaacgtgctccatccaaacggtgagtgcccagtcaagtctgaacctaccgagccaggcgatgaagatgaggaagatgcatacagcaacgaacttgacgacgaagaggtactaggcgagctcaccgactctatcggtaacaaggattttccgctgctcaatcagtcaatctccccactgagcagtagcgtgctaaagtttatcgaaaaaggcacaagtagcagttccgccacagtgtccgacgatacagagaagaagaagcagacagccgccgtgcgcgccagtggcagtgttgctagtaattacgggatttctggaaaggacttcgcagatgcttcggcctcaaaagatagcgccaccgccgcccacccgagcgagatcgcacgaggagatgaagactccagcgcgactccacaccagcacgggttcaccccgtcaacccctggaactcccggtcctggcggtgacggctctcctggcagtggaattgagtgtccaaaatgcgacactgtcctcgggtcctcccgctcacttggtggacatatgacaatgatgcactcccgcaacagctgcaagaccctgaaatgccctaaatgtaactggcactacaagtaccagcagactcttgaggcccacatgaaggagaagcatccagagccgggcggatcatgtgtgtactgcaaaacgggacagccacatcctcgattagccagaggggagagttacacctgcgggtataaacccttccggtgtgaggtttgcaactacagcacaaccacaaaggggaatctgagcattcacatgcaaagtgataaacatctcaacaatgtccagaaccttcagaatggaaacggcgaacaggtgttcggacatagcgcgcctgctcccaatacctccctgtccgggtgcggcacgcccagtcccagcaaaccgaaacaaaagcccacctggcgctgcgaggtatgcgactacgaaactaacgtcgcacgaaacctgaggatccacatgaccagcgagaagcacatgcataatatgatgctgctgcagcagaacatgaaacagatccaacacaacctgcatctcggtctggctcctgcagaggctgaactgtaccagtattacttggcccaaaacatcggcttaacaggaatgaagctggagaacccagctgatccacagttgatgattaatcccttccagctggatcctgcgacggccgccgccttggcgccaggcctggtgaacaacgaattgccacctgaaatacgactggccagcggtcagttgatgggcgatgacctgtcactcttgacagctggcgagctgtccccctatatatccgatcctgctttgaagctgtttcagtgcgcagtctgtaataaattcacctccgattccctggaggccctctcagtgcacgtctcatctgagcgctctctgcctgaggaagaatggcgggctgtgattggcgacatctaccaatgtaaattatgtaactacaatacccagctaaaggccaatttccagctgcactgcaaaaccgacaagcacatgcagaaatatcagctggttgctcatatcaaggaaggaggaaaatccaacgaatggcgcctgaagtgtatcgccattgggaaccctgtgcacctaaaatgcaacgcctgcgattactataccaacagcgttgataagctccgtctccatactacaaatcacaggcacgaggcagcactgaaactatacaagcacctgcagaaacaagagggagcggtgaacccagaatcatgctactactactgcgctgtgtgtgactataccactaaggttaagctcaatctcgtgcagcacgtacgctccgttaaacaccagcagaccgaagggctccggaaactgcagcttcatcagcaaggcttggcacccgaggaagacaatctgtccgaaatctttttcgtgaaggactgtcctcctaacgagctcgagacggcctctctgggtgcccggacttgtgatgacgacttgaccgagcaacagctgcgctccactagcgaagaacagtccgaggaagcagagggcgctatcaagcccactgcggtggccgaggacgacgaaaaagatacaagcgagagggataattcagaaggaaaaaatagcaacaaggattcaggcattattacacccgaaaaagagcttaaggtgagcgtcgcagggggtacccagccacttctgctcgcaaaagaggaggatgtcgcaactaagcgatcaaagcccactgaagacaacaagttttgccacgagcaattttatcagtgcccttattgtaactacaactcacgggaccagagccgcattcagatgcacgtgctcagtcagcatagcgttcagcccgtgatatgctgtcctctctgccaggatgtgcttagcaataagatgcatctgcaattgcacctcacacatctacactctgtttctccagattgtgtcgaaaaactcctcatgaccgtgcccgtacctgatgtgatgatgcctaacagcatgcttcttcccgctgcagcctccgagaagtctgagagggacacccctgcagctgtaacagcagagggcagcggaaagtacagcggtgagagccccatggacgataagtctatggccggcctggaggactccaaggctaacgtcgaagtaaaaaacgaagaacagaagccaaccaaagagccattggaagtaagcgagtggaataagaatagcagcaaagacgtaaagattcccgacactctgcaagatcagctgaacgagcagcaaaagaggcaacccctgtccgtaagcgaccggcacgtgtacaaataccgctgtaatcactgcagcctggctttcaaaacgatgcagaagttacagattcactcccagtatcatgctattcgggcagcgaccatgtgtaatctgtgccagcgatctttccgcacctttcaagctttgaaaaaacacctggaggccgggcaccccgaactgtctgaagccgagctccaacagctgtacgccagcctgccggtgaatggcgaactttgggcagaaagtgagaccatgtctcaggacgatcacggccttgaacaagagatggaacgtgagtatgaagttgatcacgagggtaaagcttcacccgtgggtagtgactccagtagcatccctgatgacatggggtccgagcctaagaggacactgcctttccgaaagggcccgaactttacaatggagaagtttctggaccccagccgcccctataagtgcactgtttgtaaggaatcttttacgcagaagaatatcctgctagtccactataattccgtgtcacatttgcacaagctgaaaaaggtgctgcaggaagcttcaagccccgtcccgcaagaaacaaactcaaacaccgataataaaccgtacaaatgttctatttgtaatgtggcttatagtcagagctccaccctcgagatccacatgaggagtgttttgcaccagactaaggctcgggcagctaagcttgaaccctccggccatgtcgccggtggacacagtatagcagcgaacgtgaacagccctgggcagggcatgctagactctatgagcctggctgcagtgaattctaaggacacgcacttagacgctaaggagctcaataagaagcaaacccccgacctcattagcgcacagcccgcccatcacccaccccagtcccccgcacagatacagatgcaactgcagcacgaactacaacagcaagctgccttcttccagccgcaatttttgaatccagcctttcttccacacttcccgatgactccagaagccctcttacaatttcagcaaccccagttcctttttcccttctatatacctggcaccgagttcagccttggcccagacctaggcctgccaggtagcgccacctttggaatgcccgggatgaccgggatggccggatctctgttggaagatctgaagcagcagatacagacccagcaccacgtcggacagacccagctgcagatactccagcagcaagcccagcagtaccaggccacacaaccccagttgcagccccagaagcagcagcagcagcctccccctccccagcaacagcaacaacaacaggcttccaaactgctcaagcaggaacaatcaaatatagtcagtgctgactgtcagattatgaaagatgtccccagttataaggaggccgaggatataagcgaaaagcctgagaaaccaaagcaggagttcattagtgaaggggagggattaaaggagggtaaagacactaagaagcagaagtcccttgaaccaagcattcccccacctcggatcgcatccggggccagaggaaacgctgctaaggccctcctggaaaatttcgggttcgagctcgtgattcagtacaatgagaataggcagaaagtgcaaaagaaaggcaagtcgggcgagggggaaaataccgacaaactcgaatgtggcacatgtggaaaactcttttcgaatgtgttaatcttgaagtcacaccaggagcacgtccacggccaattcttcccctatgccgccttagagaagtttgccagacagtatcgggaggcctacgataagctctatcctatctcaccctcctccccagagactcctcctcctcccccgccgccccctccactgccgccagcgccaccccagccatcctcgatgggtcctgtaaagattcctaacaccgtgtccaccccgttgcaggcccctccaccgaccccccctccaccgtccgcacctccccaggtacagcttccggtctctttagatctgccacttttcccgtctattatgatgcaacctgtccagcacccagcactgcccccgcagctggccttgcagctacctcaaatggacgccctgtctgccgatcttactcagctctgtcagcagcagttgggcctggaccccaatttcctaaggcacagccagtttaagaggccgcgcaccaggatcaccgacgatcaactaaaaattctccgggcctatttcgatatcaataactcaccatcggaggagcagattcaggagatggccgaaaaatctggtctctcgcaaaaagtgataaaacactggtttcgcaacaccttgttcaaggagcgacaacggaataaagatagcccctacaattttagcaatccgcctatcactgtcctcgaagacatccgcatcgatccacagcctacctccctggaacattataagagcgacgcttccttttcaaagagaagctccagaaccagattcacggattatcaattgagggtgctgcaggacttcttcgacacaaacgcctatcctaaggatgatgaaattgaacagttgtcaaccgtactcaatctaccaaccagagtcatcgtggtttggtttcagaacgcgcgccagaaggctcggaagtcctacgagaaccaagcagaaacaaaggataacgagaaaagagagctaaccaacgagcgctacatccggactagcaacatgcagtatcaatgtaagaagtgtaatgtggtttttcctagaatcttcgatctgatcacacaccagaaaaagcaatgttacaaagacgaggatgacgatgctcaagacgaatcccagacggaggattcaatggacgccaccgatcaggtggtgtacaaacattgtacagtgagcggccagacagatgctgcaaaaaacgctgccgccccggcagcctccagcgggtctggcacaagcacgcccctgattcctagtcccaagcctgagccagaaaaaaccagtccaaaaccagagtaccccgccgagaagcccaagcagtctgatcccagccccccatcgcaggggacgaaaccagctctgcccctggcgagcacaagctcggatcccccccaagcttccacggcccagccacagccccaacctcagccgccaaaacagccccagttaatcggacgcccgccaagcgcgagccagacacccgttccctctagccccctccaaatctctatgacctcactccagaatagcctccctccgcagctgttacaatatcagtgcgaccagtgcacagtggcatttcctacattagaactctggcaggagcatcaacatatgcatttcttagctgcccaaaatcaatttttacattctcccttcttagaacgtcctatggatatgccttatatgatcttcgaccctaataacccgctaatgactgggcagctgctgggctccagcctcacgcagatgcctcctcaggcttcatctagtcacacgacggcccctactaccgtggccgctagtctcaagcggaagctagacgataaggaggacaacaactgcagcgagaaagaaggagggaactcaggagaggatcagcacagagacaaacgcttgcggacaaccataactccagagcagctagagatactttatgaaaaatacctcctcgattccaatccaactcggaagatgcttgatcacatcgctcgagaggtgggattaaaaaaacgggtagtgcaggtgtggtttcagaatacacgagccagagagcggaaggggcagttcagagcagtcggaccggcgcaatcacacaagaggtgccctttctgcagagcacttttcaaggcaaagtccgccctcgagtcacacattcgctctcgtcattggaacgaaggcaagcaggccggctattctctgccgcctagtcctttaatcagtaccgaggacgggggggaaagccctcaaaagtatatctacttcgactatccctccttacctctgactaaaatcgatttaagttccgaaaacgagctcgcaagcaccgtctctactcctgtgagtaagacagcggagttgagccctaaaaatctactgtcaccatccagttttaaggctgaatgctctgaggatgttgagaatctgaatgccccacctgctgaggctgggtacgaccaaaacaagacagactttgatgagacctcctcgatcaacactgctatctctgatgccactacgggagatgagggtaacaccgaaatggaatccactactgggtcctcaggggacgtcaagccggcactctcccctaaagagccaaaaacacttgatacattacccaaaccagcaaccacaccaacgacagaagtgtgtgatgataaattcttgttttccttgacatcaccgtcaattcacttcaacgacaaagatggagaccacgatcaaagcttttacatcactgacgatcccgacgataacgccgacaggtctgaaaccagctcaattgcagatccttcctccccaaatcctttcggatcgtcaaacccgtttaagtcaaagagcaatgatcgaccaggccacaagagatttcgaacccagatgtccaacctgcagctgaaggtccttaaggcctgcttttctgactataggaccccgaccatgcaggaatgcgagatgcttggcaatgagatcgggctccccaagagggtggtgcaggtgtggttccagaacgctagagctaaagaaaaaaagtttaagatcaacattggcaagccttttatgatcaaccaggggggcaccgaggggaccaagccagagtgtacattatgcggggtgaagtatagcgcaagactgagtatacgggatcacattttctctaagcagcacatctccaaggtccgcgaaaccgtgggatcgcagctcgatagagagaaggactatcttgcgcctactacggtgaggcagctgatggcccagcaggagttagatagaataaaaaaggctagtgatgttctcggtctgacagtccagcaacctggcatgatggattcttcctcactgcacggcatctccctccctaccgcctaccccggattgcccgggcttcccccagtgctgctcccaggcatgaatgggccctccagtcttccaggtttccctcaaaatagcaatactctgactccccctggcgccggtatgctcggtttccccactagtgcaacatcgtcgccggcgctgagcttatctagcgcccccaccaagcccttgctgcaaactcccccacctcccccccctccccccccgccacccccaagttccagccttagcggtcagcagacagaacagcagaacaaagaatcggagaaaaagcaaacgaaaccaaacaaagtaaagaaaattaaagaagaggaattggaggccactaagcccgaaaaacacccgaagaaggaggagaagattagctccgccctgtcggtcctcggcaaagtagtgggtgaaacccacgtcgacccaatccagctgcaagctctgcagaatgctatcgccggcgatcctgcaagcttcattggcggtcagtttctgccctatttcattcctggatttgcatcctattttacaccacagttgcccggtaccgtgcagggcggttacttccccccagtgtgtgggatggagtccctctttccatacggccccaccatgccacagaccctagccgggctctcacccggggccctcctgcaacaataccagcagtatcaacagaatcttcaggagagcctccagaagcagcagaaacaacagcaagagcagcagcagaaaccagtgcaggctaagacatcaaaggtggaaagcgatcagccacagaattctaatgacgcctctgagacgaaggaagacaagtcaacagcaactgaatccacaaaggaggagcctcagctggagtccaagtcagccgacttcagcgacacttacgttgtgccctttgtaaagtacgaattcatctgcaggaaatgccagatgatgttcactgatgaggacgccgcagtgaaccatcagaaaagtttttgctactttggccagcctcttattgacccccaggaaacggtcctgagggttcctgtctcaaagtatcagtgtttagcttgtgacgtggcaatcagtggaaacgaggctctgagtcagcacctgcagtccagcctgcataaggagaagacaatcaagcaagccatgcgcaacgctaaggaacacgtgcgtctgctccctcattctgtatgcagccccaacccaaatacaacctcaacttctcagagtgcagccagtagtaataacacttatccacacctttcttgtttctccatgaaaagctggcctaacatcctgtttcaggccagcgctcgacgggcggcctcgcccccttcctccccaccgtcgctgagtctcccctctactgtgacctcctccctgtgctcaacaagtggcgtgcaaacgagtctgcccactgaaagctgttccgacgagtctgactccgaattgtcacagaagcttgaggatctggataattcattagaagtcaaggctaagccagccagtgggttagatggcaactttaatagcatacggatggacatgttttcagtctag

SEQ ID NO: 211828 - DNA, 10716 bp, synthetic construct
  misc_feature 1..10716: note = Description of Artificial Sequence: Synthetic coding sequence
  source 1..10716: mol_type = other DNA
atggagacctgcgacagcccccccatcagccggcaggagaacggccagtcaaccagcaagctctgcggtaccactcaactcgacaatgaggtccccgaaaaggtcgctggaatggaacccgaccgcgagaattccagcacagacgacaacctgaagaccgatgagagaaaatccgaggccttgctgggcttttctgtggagaatgctgccgccacacaagtgacctccgcaaaggaaatcccatgcaatgagtgcgcaacgagtttccccagcctgcagaagtatatggagcaccactgtcccaatgcccgcctaccagtcctgaaggatgataatgaatccgagattagtgagttggaagacagcgacgtggaaaatctgaccggtgagattgtgtatcagcccgatggttctgcctacatcattgaggactcaaaggagagtgggcagaacgcgcagaccggcgccaactcaaagttatttagtaccgccatgtttctggatagcctggccagcgccggagaaaaaagcgaccagagtgctagcgctcccatgtccttttaccctcagattatcaatacatttcatattgcaagttcactcggtaagcccttcaccgcagatcaggcctttccgaataccagtgcgctcgcgggggtgggacctgttttgcacagctttcgggtgtacgatcttcggcacaaacgcgagaaggattacctaacgtcagatggatccgcaaagaattcctgcgtttctaaggacgttccaaacaacgtggatctgtcaaagttcgatggatgcgtgtccgatgggaaaagaaagcccgtactgatgtgctttctttgcaagctgagcttcggctatatcagatctttcgtaacccatgctgtccacgaccacagaatgaccctgaacgacgaggagcagaagctgcttagtaataaatgcgtgtcagcaataatccagggcatcggcaaggacaaagagcctctaatttcgtttcttgagcctaaaaagtccaccagtgtctacccgcatttctctaccactaacctgattggcccagatccgacatttagaggactctggtctgcctttcatgtcgaaaatggcgactccctacccgcaggctttgcatttctgaaggggtccgccagcacctcatcttccgcggagcaaccccttgggatcacgcagatgcctaaggcagaggtgaatttgggcggactaagcagtctcgtggttaacacgcctatcacttcagttagcttgagccattcaagttcggagtcgagtaagatgtccgagtctaaagatcaggaaaataattgcgaacgccctaaggagagcaacgtcttgcacccaaacggcgagtgtccagttaaaagcgagcccacagagccaggcgacgaggacgaggaggacgcctactctaatgaactagacgatgaagaagtactaggggagctgacggatagtattggaaacaaagatttccccctgctgaaccaaagtatcagcccactttcaagttcagtcctcaagtttatcgagaagggtacctcttcctcctcagcaactgttagcgacgacacagaaaagaaaaaacagactgctgccgtgcgggcatctggttctgtcgcaagcaactatggaatttcagggaaagatttcgcagatgcctcagcctcaaaagacagcgccacggctgcacacccgtccgaaatcgcccggggggatgaggactcctccgcaacccctcatcagcatggatttactcctagcacacccggaacacccgggccaggcggggacggcagtcccggatccggaatcgagtgtcccaaatgtgatactgttctgggttcttctaggtcactgggcggccacatgaccatgatgcactcacgcaacagctgtaagactttaaaatgccccaagtgcaactggcactataaataccagcagacactagaggcccatatgaaggagaaacaccctgaacctggaggctcttgcgtctattgcaagacaggccaaccgcatcctcgactcgcccgcggcgagtcttatacctgtggatacaaaccattccggtgtgaagtatgtaactactctactacaacaaaggggaatttgagtattcacatgcagtcagataaacacctcaacaatgtgcaaaacctgcaaaacggcaacggtgaacaggtgttcgggcactcagcgccggcccccaatacttccctgagcggatgcggcactcctagccctagcaagcccaaacagaagcccacgtggcggtgcgaggtctgcgactatgagactaacgtcgctagaaatctgagaatacacatgacatctgaaaagcatatgcacaatatgatgctcctgcagcagaacatgaaacagattcagcataacctccatttggggctggctccagctgaagccgaactataccaatactacctggcccaaaacattgggttgaccgggatgaaattggaaaatcctgccgacccacaattaatgattaatccatttcagctggaccctgccacggccgcggccctagcccccggtctgggggagctaagcccctacatctctgaccccgctctcaagctgttccaatgtgctgtgtgcaataaattcactagtgactccctcgaggccctctctgtgcatgtctcatccgaacgatccctgcccgaagaagagtggagagcggttattggagacatctatcaatgcaagctttgtaactataatacacagctcaaggcaaatttccaattgcactgtaagacagataagcacatgcagaagtaccaactggtggcacacattaaggagggcggaaaatcaaacgagtggcggctgaaatgtatcgccattgggaaccctgtgcatttgaagtgtaatgcttgtgactattatactaatagcgtcgacaagctgcgcctccataccacaaaccacaggcacgaggccgcattgaaactatacaagcacctgcagaagcaagagggtgcagttaatcctgaatcctgttactactactgtgccgtgtgcgattatactacgaaagtcaaactgaacctggtccagcatgtgcgcagtgtgaaacatcagcaaacagagggcttacgaaagctacagcttcatcagcagggactggcccccgaggaagacaatctgagtgagatctttttcgtgaaagactgcccccctaatgagctcgagaccgcctcactcggagccagaacctgtgatgacgatttaacagagcagcatgaggaagcagagggcgccattaagccaaccgccgtcgcggaagatgacgaaaaggacacctcggagcgtgacaactctgagggcaaaaactctaacaaggacagcgtttcagtggcaggagggacccagccactgctcctggccaaagaggaggatgtggctaccaagcgcagcaaaccaacagaggataataaattttgtcatgagcagttctaccagtgtccatattgtaactacaacagccgtgatcagagccgtattcagatgcacgttctaagccagcactctgtgcagcccgtaatttgctgccccctctgtcaagatgtgctgagcaacaaaatgcatctgcaactgcacctaactcacctgcactcagtatcccctgattgcgtcgagaagctcctaatgaccgtaccagtcccagacgtaatgatgccaaatagcatgctgttgcccgccgctgcgtcagagaagtccgagcgggatacacctgccgctgtgacagctgagggtagcgggaagtattccggtgagagcccaatggacgacaagagcatggcaggtcttgaagactccaaggcaaacgttgaagtgaagaatgaagagcagaagccaacaaaggagcctttggaagtgtctgaatggaacaaaaattcatccaaggacgttaaaatcccagatactttgcaggaccagctgaacgaacaacaaaaaagacagccattgtccgtgtctgatcgtcacgtctacaagtataggtgcaatcattgctcgctcgcattcaagacaatgcagaaactgcagattcattcccagtaccacgcaattcgagctgcgaccatgtgcaacttgtgtcaacggtcttttagaaccttccaggcgttgaagaaacatctcgaagctggccatccggaactttctgaagctgagctccagcagctgtacgcatccctccccgtgaacggagagctgtgggctgaaagtgagactatgtctcaggacgatcatggtctcgaacaggaaatggaacgagagtacgaggtcgaccatgagggcaaagcttcccctgtgggatctgactcgtcctccattccggacgacatggggagcgagccgaaacggaccctccctttcagaaaaggacctaatttcacgatggaaaaatttctcgacccttctcggccatataaatgcactgtctgcaaagagagcttcacacagaagaatattctgctagtgcattacaattcggtgtctcacctgcataagcttaagaaggtattgcaagaagctagctcgcctgtgccacaggagaccaactctaatacggacaacaagccatacaagtgcagcatatgtaatgtggcgtatagccaaagttctacattggaaatccatatgagatcagtgctccatcaaactaaggcccgagcagccaagttggaaccaagcggacacgtggcaggagggcactcaatcgccgctaacgtgaactcccccggccagggcatgttggactcaatgtccctggccgcagtcaatagcaaagacacccacctggatgcaaaagagttaaacaaaaaacagacccccgacctcatttccgcacaacccgcccaccaccctccccagtcacccgcccagatccagatgcaactccagcacgagctgcagcagcaggctgcattcttccagcctcaatttctcaatccagctttcctgccgcatttccctatgacgccagaggcactgttacagttccaacagcctcaattcctcttccctttctatattccaggcacagagtttagccttgggcctgacttaggcctgcctgggagcgccactttcggaatgcctgggatgaccggtatggccggatccctgttagaggaccttaagcaacagatccaaacgcagcatcacgtggggcaaacacagttacaaattttgcagcagcaggcccagcaatatcaggcaacccagccccagctgcagcctcagaagcagcagcagcagccacctcccccccaacagcagcagcaacagcaggcaagtaaactgctgaagcaggaacagtcgaatattgtttctgccgactgtcagattatgaaagatgtgccctcatacaaagaggccgaagacatatctgagaaaccggagaagcccaagcaggagttcatatctgagggggagggtcttaaagaaggaaaagatactaagaagcagaagagcctggagccctctattccccctccacgcatcgcaagcggggccagaggcaacgccgctaaggctctgctcgaaaactttggctttgagctcgtgattcaatataatgagaataggcaaaaggtccaaaagaagggaaagagtggcgagggggagaacaccgacaaactggaatgtggcacctgcggaaagctgttctcaaacgttctgatcctcaaaagccatcaagagcacgtccacggtcagtttttcccatatgctgctctggaaaagtttgctcgacagtatagagaagcttacgataagttgtacccaatcagcccaagctccccagagacgccccctccccctccaccccctccacctttaccacccgcgcccccgcagccaagtagcatgggccctgtgaaaattcctaataccgtcagcacaccactgcaagccccacctcccactccccctcctccaccgccaccccccccgcccccacctccgccacccccgccaccgccaccaagcgccccccctcaggtccaactgcctgttagcctagaccttcctctttttcctagtattatgatgcagcctgtgcagcaccccgcgctccccccacaactagcattgcagttaccccagatggacgccctgagtgccgatctgacacagctgtgccagcagcagttaggtctcgaccccaatttcctccggcattcccaatttaagcgcccccgcacccggattactgacgaccagctgaaaattctccgggcttattttgacattaacaattccccatccgaggagcaaattcaggaaatggccgagaaatcaggcctctcccagaaagtgatcaagcactggttcaggaatacattgttcaaggagaggcagagaaataaagattcaccatataatttcagcaaccctcccatcactgtgctggaggacattagaatcgacccccagcccacttctctggagcattacaagtccgacgctagcttcagtaaacggtcctcccggacaaggttcaccgactaccagttacgggtcctacaggatttcttcgacactaatgcctaccccaaagacgatgagatagaacagttgtctacggtcctgaatctgcctacacgggtaattgtggtctggtttcaaaatgcccgccagaaagcccgcaaatcttatgagaatcaggccgaaaccaaagacaatgaaaaaagagagcttacaaatgagcgttacattcgcacgtccaacatgcagtaccagtgcaaaaagtgtaacgtcgtcttcccaaggatctttgacctcattacccaccagaaaaagcagtgctataaagacgaggacgacgacgcccaagatgaaagccagactgaggattccatggatgctaccgaccaggtggtgtataagcactgtacagtcagcgggcaaacagacgctgccaaaaacgcagccgcccccgctgcatcctctggatcgggcactagtactccactcatccccagcccaaagcctgagccagagaaaacatcccctaaacctgaatacccagccgaaaaacccaagcagtctgatccttctcctccatcccaagggacaaagcccgccttacctctggccagtaccagctctgatccccctcaagcgtcaacagctcaaccgcagccccagccacagccccctaagcaacctcagcttattgggaggcccccctctgcaagccagactcctgtcccaagctctcccctgcagatctctatgactagcttgcaaaacagtctgcctcctcagctccttcagtatcaatgcgaccagtgcactgtcgccttccccaccttagagctgtggcaagagcaccagcacatgcactttctggctgctcagaatcagttcctgcatagcccgttcctggagcgtccaatggacatgccttacatgattttcgaccccaataatcccctgatgactggacagttgctgggttcctcacttacccaaatgccaccacaggcctccagttcacatacaaccgctcctaccactgtcgctgccagcttgaaaaggaaactcgacgacaaagaagataacaattgtagcgagaaggaaggaggcaattcaggtgaggatcagcacagggataagagactgcgcacaaccatcactcctgagcagttggagatcctgtacgagaaatatttacttgattccaatcctactcgcaaaatgcttgaccacattgctagagaggtgggtttaaagaaacgggtcgtgcaagtgtggttccagaacacacgagcacgcgagcgaaaggggcagtttagagccgtggggccagcccagagccataagcgctgtcctttctgccgggctctgttcaaggccaaatccgcactagagtcacacattcggagcagacattggaacgaagggaagcaagccggctactcactgccccctagtcctctgatttctacagaggacggaggagagtcaccacagaaatatatttattttgactacccatcattacccctgactaaaatagacttgagttccgaaaatgagctcgcatcgaccgtctcgaccccagtctctaagactgctgagctctctcccaagaatctcctgtccccatcctctttcaaagccgagtgcagcgaagatgttgagaacttaaatgctccacccgcagaggccggctatgaccaaaataagaccgatttcgacgagacttcctctataaacaccgccatcagcgacgccacaacaggagacgaagggaacaccgagatggagagcactaccggatccagtggggacgttaagcccgccttgtctcccaaagaacctaagacactggacactctgcctaaaccagctacaacacccacaacagaagtgtgtgatgataagttcctgttttcactgacctctccctccattcattttaacgacaaggatggcgaccacgatcagagtttttatattacagacgaccccgatgacaatgctgataggtccgaaaccagttcaatcgccgacccgagttccccaaaccctttcgggagttctaatccctttaagtctaaatctaacgatcggcccgggcataagcggtttcgaactcagatgtcgaacctccaactgaaggtgttgaaagcatgtttttctgactatagaaccccgacgatgcaggaatgtgaaatgctgggtaatgagatcgggctgcctaagcgggtggttcaggtgtggtttcagaatgcacgagctaaagagaaaaagtttaaaatcaatattggcaagccattcatgattaaccagggcggcacagagggaactaaaccagaatgtaccctgtgcggcgtgaagtacagtgctaggttatccattcgagaccatatcttcagcaagcagcatatctctaaagtgagagaaactgtgggaagccagctggatcgagaaaaggattacctggcaccaacaacagtaaggcagcttatggctcaacaggagctggatagaattaaaaaagcatccgatgtgctcgggctgacagtgcaacagccgggaatgatggacagcagctcgctacatggaatctccctcccaacggcctaccccggcctccctggtctgccacccgtgctgctgccgggtatgaatggcccttcctccctgcccgggtttccccagaactcaaatacattgactcccccaggggccggcatgcttggttttcctactagcgcgacaagctcgcccgctctctctctctcctctgccccaactaagcccttgctccagacccccccacccccaccccccccccccccgcctccgccatcatcttccctctcaggacagcagacggagcaacagaataaagagagtgagaaaaagcagaccaaaccgaataaggtgaagaaaattaaagaggaggaattggaagccactaagcctgagaagcatccaaagaaagaagaaaaaatctcctccgcattatccgtgctgggaaaggtagtgggtgagacacacgtcgatcctatccagctgcaggcgttacaaaatgcaattgcaggcgatcctgcatctttcatcgggggccagttcttaccctacttcatcccgggcttcgcatcttattttactccccagctccctgggaccgtgcagggcgggtactttcctccagtgtgtgggatggagagcctgttcccctatgggcctacaatgccgcagactttggcaggcttgtcccccggtgccctcctacaacagtaccagcagtaccagcagaacttgcaggaatctctccaaaagcaacaaaagcagcaacaagagcagcagcagaagccagtccaggccaagacttccaaggtggagtctgatcagccacaaaattcaaacgatgcttcagagacaaaggaagacaagtccactgcgaccgagagtacaaaagaggagccccagcttgaaagtaagagcgccgacttttctgatacgtatgtggtgcctttcgttaagtacgaatttatttgcaggaagtgccagatgatgttcactgacgaggacgccgccgtcaaccaccaaaaatcattctgctacttcggacagccgttaatcgacccccaggagacagttttgcgagtgcccgtctccaagtatcagtgtctcgcttgcgatgtggctattagtggaaatgaagccctctcacaacatctgcagagctccctgcacaaagagaaaacaattaaacaggctatgaggaacgcaaaagagcatgtgaggctgttaccacacagtgtttgctctccgaatcctaacaccacttctacctcacaatctgcagcctcttcaaataacacgtatcctcacctgagttgcttctccatgaaatcctggccgaacatcctcttccaggcgtcagctcgtagggctgcctccccaccaagctctccacccagtctttctttgcccagtacggtgacttcctctctctgctccactagtggcgttcagacatcccttcctacagagagctgttcagatgaatctgattcagaacttagtcagaagctggaagacctcgataattcactggaagttaaagccaaaccagcctcaggtctcgatggaaacttcaacagcatccgtatggacatgttctccgtttag

SEQ ID NO: 211829 - DNA, 468 bp, synthetic construct
  misc_feature 1..468: note = Description of Artificial Sequence: Synthetic coding sequence
  source 1..468: mol_type = other DNA
atggagacctgcgacagcccccccatcagccggcaggagaacggccagagcactagcaaactgtgcggaacgacacagttggataacgaagtccccgaaaaagtagccggcatggaacccgatagagagaatagctcaaccgacgacaaccttaagacagacgaacggaaatcggaagccctactgggctttagtgtagaaaacgctgccgccacccaggtgacttccgctaaggaaatcccttgtaacgaatgcgccaccagctttccctcgctccagaaatacatggagcatcattgcccaaacgcccgcctgcctgttcttaaagacgataacgaatcagaaatttccgagctcgaggattccgacgtggagaacttgacaggtgaaatcgtgtaccagcccgacggcagcgcctatattattgaagactcaaaagagtccggccaaaacgctcagaccgggtag

SEQ ID NO: 211830 - DNA, 10773 bp, synthetic construct
  misc_feature 1..10773: note = Description of Artificial Sequence: Synthetic coding sequence
  source 1..10773: mol_type = other DNA
atggagacctgcgacagcccccccatcagccggcaggagaacggccagtctacttcaaagctttgtggaactactcaattagataacgaggtgcccgagaaggtggccggaatggaacccgatcgtgagaactcatcaacagatgataatttgaaaactgatgaaaggaaaagtgaggctctcctggggttcagtgtggaaaacgctgctgcaacacaggtaacctcagccaaggagattccatgcaacgaatgcgccacaagttttccatccctgcagaagtatatggagcatcactgtccgaacgcacgacttccggtgcttaaggacgacaatgagtctgagattagcgagttggaagattccgacgtcgagaatctcacgggggaaatcgtctatcagcctgacggcagcgcctacataattgaggatagcaaggagtctggtcagaacgcccagacaggggccaattctaaactgttctctacagctatgttcctcgatagcttggcgtccgctggagagaaatccgaccagagtgcgagcgcccccatgtcattctatccacagatcatcaacacattccacatagccagttccttaggcaagccttttactgccgaccaggcctttcccaatacatctgccttagccggcgtgggaccagttcttcattcttttcgggtttacgatctcaggcataaaagggagaaagactatttgacaagcgacggcagcgcaaagaactcatgcgtttccaaagacgtgccaaacaacgtggatctgtctaagtttgacggctgtgtctctgatgggaagcggaagccggttctgatgtgcttcttgtgcaagctatcattcggctacatccgttccttcgtcactcatgctgtgcatgaccaccgcatgacactgaacgacgaggaacaaaaattgttgagtaataaatgcgtgtctgccataatccagggcattggcaaagacaaggagcctctaatttccttcctggagccgaagaagtccacctctgtgtacccccacttctccaccaccaatctgataggtcctgatcctacgtttagaggactatggtccgcattccacgtggagaacggcgacagcctcccagctggtttcgcgtttctgaaagggtctgcgtctaccagctcttccgccgagcagcctctgggaatcacccagatgcccaaagcggaggtgaacctgggcggacttagcagcctagtcgtaaatacaccaatcacctctgtgtccctctcacactcctcaagtgagtcctcaaagatgagcgaaagcaaggatcaagagaacaattgtgaacgaccaaaggagtcaaacgttctgcaccccaatggcgagtgtccagtcaaaagcgagcctacagaaccaggagatgaagatgaggaggatgcatactcaaatgaactagatgacgaggaggtgctgggcgaacttactgacagcatcggaaataaagacttccccctccttaatcaatctatctccccactgtctagctcggtgcttaaattcatcgaaaaaggcacgagctcttcctccgccacagtgagtgatgatacggaaaagaaaaagcagaccgccgctgtccgtgcatcgggtagtgtcgcctccaactatggcatcagcggaaaggattttgccgacgcatcagccagcaaggactctgctacagctgctcacccttccgaaatcgctcggggtgacgaggacagttcagctaccccccatcagcatggctttaccccctccacgccaggcacaccgggtcccggtggagatggctctcctggaagtggcattgagtgtccgaagtgcgacacagtgctaggatcatcacgcagcttgggaggccacatgacaatgatgcattccaggaactcgtgtaaaactctgaaatgcccgaagtgtaattggcattataaataccagcagacactcgaagctcacatgaaggagaaacatcccgagcccgggggttcttgtgtatattgtaaaaccggccagccccatccccggctcgcccgaggcgaatcatatacctgtggctacaaaccgtttaggtgtgaggtctgtaattacagcactactaccaaaggcaacctctcgatccatatgcagtctgataagcacctgaataatgtgcagaatttgcagaatggcaacggcgagcaggtgttcggccactccgcccccgctcccaacacgagcctgtctgggtgtggtacacctagcccaagcaagcccaagcagaaaccaacctggcgctgcgaggtgtgcgattatgagactaatgtcgcaagaaatttgaggatccatatgacctccgagaagcacatgcacaacatgatgctgctgcagcagaatatgaagcaaatccaacacaatctgcaccttggactggccccagccgaggccgagctgtaccagtattacctggcgcaaaacattggacttacgggaatgaagttagaaaaccccgccgacccccaattgatgatcaacccttttcagctcgacccagccaccgcagcagccctcgcccctggtttaggtgaactaagcccttacatttctgaccctgctttgaagctgttccagtgcgccgtttgcaataaatttaccagcgattctttagaggcgctctccgtccacgtatccagtgaacgatctctccccgaagaggagtggcgcgcggtgatcggtgatatttaccagtgtaaactttgtaactacaatactcagttgaaggccaattttcagctacattgtaaaactgacaaacatatgcagaagtaccaattggtggcccacataaaggaagggggcaaaagcaatgaatggaggcttaaatgcatcgccatcggcaaccccgtgcacctgaaatgtaatgcctgcgattactatacaaactccgttgacaagctgcgactacacaccaccaaccaccggcatgaggcagccctgaagctttataaacacttgcagaagcaggagggagctgtcaatcctgagagttgctactactactgcgcggtgtgtgattataccacaaaggttaagctcaatttagtccagcacgtgcgatctgtgaaacaccagcagactgaagggttacgcaagctgcagcttcatcagcaagggctagccccggaggaagataatctctctgagatcttcttcgtgaaagattgtcctccaaacgagctggagacagcctcgctgggcgctcgcacttgcgacgacgacctgacagagcagcaactgcgttccacctccgaagagcagtcagaagaggccgagggggccataaaaccgacagctgttgctgaggatgacgaaaaggacacatccgagagggataactcggagggaaaaaatagcaacaaggacagtggaatcattactcccgaaaaagagcttaaggtgtcagtcgcggggggaacacagcctctgctgctcgcgaaggaagaggatgtagccacaaagaggtctaaacctacagaggacaacaaattttgtcacgaacagttctaccagtgcccttactgcaactacaactcgagggaccagagcaggatccaaatgcacgtactgtcccaacattccgtgcaaccggtgatctgctgtccactatgccaggacgtgctgagcaataaaatgcacctgcagctccacctgacccacctgcatagcgtgagtccagactgcgttgagaaactgctgatgaccgtgcccgtccccgatgttatgatgccaaactctatgttgctgcccgcagccgccagtgagaaatcagaacgggatacccccgctgcagtcaccgctgagggttcgggaaaatactccggagagtccccaatggatgacaaaagcatggcgggactggaggacagtaaggctaatgtggaagtcaagaatgaagaacagaaacctacaaaagagccactagaggtatcagagtggaacaaaaattcctctaaagatgtgaagattcctgacacccttcaggaccagctgaatgagcaacaaaagaggcaacctctgtccgttagcgatcgtcacgtgtacaaatacagatgcaaccactgttcgctggcgtttaagaccatgcagaagctgcagattcactcccaataccacgctatccgagcggccaccatgtgcaacttatgtcaacgtagtttccgcacattccaggcccttaagaaacatttagaggccggccaccccgaactgtctgaggctgagctgcagcagctctacgcctccctacccgtcaacggggagctgtgggctgagtccgagactatgagccaagatgatcacggcttagagcaggaaatggagagagagtacgaggtggaccacgagggaaaggcctcaccagtgggatccgacagtagtagtattcccgatgacatgggctcagaacctaagcgaactctcccattcaggaaagggcccaattttacaatggagaaatttcttgacccatctaggccctacaaatgcacagtttgtaaagagtcatttactcagaagaatatcctgctggtacattataacagcgtctcgcacctgcacaagctgaagaaagttctacaggaggcttccagcccagtgcctcaagagaccaactctaacacggataacaagccctacaaatgctctatctgtaatgtggcctacagtcagtcctcgacactggagattcacatgagatcagtcctgcatcaaaccaaggcaagggcagccaagctggaaccgtccggacatgtagctggcggtcatagcatcgctgctaatgtgaattcccccggccagggtatgctggacagcatgagtttggctgctgtaaattccaaagacacacacctggacgcaaaagagctcaacaaaaaacagacgcctgacctgatcagtgcacagcccgcccaccacccacctcagtctcccgcccagatccagatgcagctgcagcacgagctccagcagcaagcagcttttttccagcctcagttcttaaacccagcgttcttgcctcattttcccatgacgcccgaggccctcctgcagtttcagcagccacagtttctgttcccattctacatcccaggtaccgagttttccttggggccagatcttggccttcccgggtctgctacttttgggatgcccggcatgacaggcatggccgggtctttgctcgaggatctgaagcaacagatccagacccaacaccacgtgggacagactcagcttcagatcttacaacagcaagcgcagcagtaccaggcaacacagccacaactgcagcctcagaaacaacagcagcagccaccccctccacagcagcagcagcaacaacaggcctcaaaattacttaagcaggaacagtccaatatagttagtgctgactgtcagatcatgaaggatgttcccagttataaagaggcggaagacattagcgagaagcccgagaagcccaaacaggagttcataagcgagggtgagggcctcaaggagggaaaggacaccaaaaaacaaaagtccctggagccctccattcctccgcctaggattgcatcaggggcccggggaaacgccgccaaggcactccttgagaatttcggcttcgagttagtcatacaatacaacgagaatcggcagaaagtgcagaaaaagggaaagagcggtgagggcgagaacacagataagctcgagtgtggtacctgcggcaagttattctccaacgtgttaattctgaaatctcaccaggaacacgtgcacgggcaattttttccatacgcagcattggaaaagttcgcacgtcagtatcgggaggcatacgataagttgtatcccatcagccctagttctcccgagacaccaccacccccgccccctcctccccccctgcctccggctccgcctcagccttcaagcatgggcccagtgaaaatacctaacacggtcagtacacccctgcaagcgcctccaccgacgccacctccccctccaccaccaccaccacccccccctcctccgcctccacccccgcctccatccgctcccccacaagtccagttgcccgtaagcctggaccttccactatttccctccatcatgatgcagccggtccaacatccagcactaccacctcagcttgcactgcagttgccccagatggatgccctcagcgcagatctgacccagctctgtcagcaacagttaggtttggaccccaattttttgcgccactcacagttcaagagaccaaggactcggatcacagacgaccagctgaaaatcttaagagcctattttgatattaacaactcacccagcgaagaacagatacaggagatggctgagaagtccggcttatcccagaaagtaattaagcactggttcagaaataccctatttaaggagcggcaaagaaataaagatagcccttacaatttctctaacccccctatcacggtccttgaggacatccgcatcgatcctcagcccacatctctcgaacactacaagagcgatgcatcattttccaagcgatcttcccggaccagatttactgactaccagctgcgggtcctgcaggactttttcgacacgaacgcctaccccaaggatgacgagatcgagcaactctctaccgtgttgaacctgcccaccagagtgatagtggtgtggttccaaaatgcacgccagaaagcgcggaagagttatgagaaccaggccgagacaaaggacaacgagaagagagagcttaccaacgagcgctacatcaggacatccaacatgcagtaccaatgcaagaagtgcaacgtggtgttccctagaattttcgatttgattactcatcagaagaagcaatgctacaaagacgaggatgacgatgcgcaagacgagagtcaaacagaggactctatggacgccactgaccaggttgtgtataaacattgtacagtgagcgggcagacagacgcggcaaagaatgccgctgccccggctgcatctagcggaagcggaacaagcacaccattgatccctagtcccaagcccgagccggaaaaaacttcccccaagcctgagtatccagccgaaaagcctaagcagtccgacccgtcacctccttcccaaggcactaagcctgcgctgccattggccagcacgagcagcgatccccctcaggcctccaccgctcagcctcaacctcagcctcagcctcctaagcagccccagctgattgggcgaccgccgtccgcctcacagactccagtgccgtcctctcctctgcagattagcatgacttccctccagaattctctgccaccacagctactccagtaccagtgcgaccagtgtacggtcgcctttccaactctggagctgtggcaggaacaccaacatatgcattttctggcagcccagaatcagttcctgcactcccccttcctggagcgtcccatggatatgccatacatgattttcgatccgaataatccactgatgaccggccagctccttggatctagtctcacacaaatgcccccacaagccagctcatcacataccacagctcccacaaccgtggctgcttccctcaagagaaagctggacgacaaagaggacaacaactgtagcgagaaagaagggggtaattcgggagaagatcagcaccgagataaaagactcagaaccaccataactcctgagcagctggagatactatacgagaagtacctcctagatagcaatccgacccgcaagatgctggatcacattgctcgagaagtaggcctgaagaaaagggtcgtgcaagtatggtttcagaatacccgggcacgggagcgtaagggccagtttagagcagtggggcccgctcaaagtcacaaacgctgcccattttgtagagccctttttaaagcaaagagtgcactcgaatctcatatacggagtcgtcactggaacgaggggaaacaggcgggttacagcctccccccgtctcctttaatatcaaccgaagatgggggtgaatccccccaaaagtatatctactttgattacccctctctcccccttacaaagattgaccttagttcagagaacgaactggcctcaaccgtctcaacaccagtaagcaaaaccgccgagttatcccctaagaacctcctgtcaccgagcagttttaaggccgagtgtagcgaagacgtggaaaacctgaacgctccaccggccgaagcagggtatgaccaaaataaaactgatttcgatgagacctcatcaattaatacagcaatcagtgacgccacgactggcgacgagggcaacactgagatggagagtacaacaggttctagcggagacgtgaagcctgcgctttcgcctaaagagcctaagacacttgacacgttaccaaaacccgccacaactccaacaacggaggtgtgtgatgataagttcctgtttagcctgacttctcctagtatccacttcaacgacaaggatggtgaccacgaccaatccttttatattaccgatgaccccgacgataatgctgatcggtctgagacctcgtccattgccgatccttctagccccaatccattcggcagtagcaatcccttcaagagcaaaagcaatgatcggcccgggcacaagaggttccgtactcagatgagtaatcttcaactaaaggtgttgaaggcctgcttttctgattatcgcactcccactatgcaggagtgcgagatgctcggtaatgagatcggccttcctaagcgagttgtgcaggtctggttccagaatgcacgagcgaaggaaaagaagtttaagattaacatcggtaaaccattcatgattaatcagggtggaacggagggtacaaagcctgagtgtaccttgtgcggggtgaagtacagcgcgagactgtccatcagggaccacatctttagcaagcagcatattagtaaagtcagggagactgtgggcagtcagctggacagggaaaaagattacctagcccccaccactgtgagacaattgatggcccaacaggaattggaccggataaaaaaggcgtctgacgtcctggggctgaccgttcagcagccgggaatgatggattctagcagccttcacggaattagcctccctacagcttacccaggactccctggcctgccccctgtgctccttcccggaatgaacggcccgagcagcctgccagggtttccccaaaatagcaatacactgacacctccaggtgccggcatgctcggcttcccaaccagcgccacgagttcccccgctctcagcttgagctctgctccgaccaaaccactgctacagactccccctcctcctcctccaccacccccccctcccccgtcaagctccctatctggccagcagacagagcagcagaacaaagagtctgagaaaaagcagacaaaaccaaacaaagttaagaagataaaggaggaagaactggaggcgaccaagccagagaaacaccctaaaaaggaggagaagatttccagcgccctgtcagttctggggaaggtagtgggggagactcatgttgatccaattcaactgcaggccctccagaacgcgattgcaggcgaccccgcatcctttattggtggacagtttttaccctatttcatcccggggttcgctagttattttaccccccaactccctggaactgttcagggaggttattttcctcctgtgtgtggcatggagagtttgttcccctacggacccactatgccccaaactctcgcggggctgagcccaggggccctcctacagcagtaccagcagtatcagcagaatctccaggagtcacttcagaaacagcaaaagcaacagcaggaacagcagcagaagcctgtgcaggcgaagacttccaaggtcgagtcagatcagccccagaactccaacgatgcctcagaaactaaagaagacaagtctactgccacggagagcacaaaagaggaaccccaactagagagtaaaagcgcagatttttctgacacatacgtggtaccctttgttaagtatgaatttatttgtagaaagtgccagatgatgttcacagatgaagacgctgccgtaaaccaccagaagagcttctgttacttcggacagcccctaatcgatccccaggagaccgtcctcagggtgcctgtgtcaaagtatcagtgtctggcttgtgatgtagcaattagcgggaacgaagccttgtcacagcacttgcagagcagccttcacaaggaaaagaccatcaagcaggccatgcgcaatgctaaggagcatgttaggctgcttccacactctgtctgctcccctaaccccaatactacatctacaagtcaatcggccgccagttcaaacaatacataccctcatctgagctgcttctcaatgaagtcatggcccaatatactttttcaggcctctgccaggagggcagcctctccaccttccagtcctccgagcttgtcactgcctagtaccgttacctcttcattgtgctcaacttccggagttcagaccagccttccaaccgagtcttgtagtgatgagtcggactcagagctgagtcagaagctcgaggatctcgataactccctggaagtgaaggccaaaccggcaagcggacttgatggcaattttaatagcattagaatggatatgttttcagtctag

SEQ ID NO: 211831 - DNA, 468 bp, synthetic construct
  misc_feature 1..468: note = Description of Artificial Sequence: Synthetic coding sequence
  source 1..468: mol_type = other DNA
atggagacctgcgacagcccccccatcagccggcaggagaacggccagagcactagtaagttgtgtggaaccacacagctcgacaatgaagtgcctgaaaaggtcgctggcatggaaccagaccgggagaacagttccacagacgataatctgaaaaccgatgaacgtaagagcgaggctttacttggctttagcgttgagaatgctgcagcgacgcaggttacttcagccaaagaaattccatgtaatgagtgtgccacatcttttccatccctccaaaagtacatggaacaccattgccctaacgcacggctgcccgtcctgaaagatgataacgaatcagagattagtgagttggaggatagcgacgtcgaaaatctgaccggagagatcgtttaccagccagatggaagcgcctacattatcgaagattcaaaagaatcaggacagaatgctcagaccggctag

SEQ ID NO: 211832 - DNA, 10851 bp, synthetic construct
  misc_feature 1..10851: note = Description of Artificial Sequence: Synthetic coding sequence
  source 1..10851: mol_type = other DNA
atggagacctgcgacagcccccccatcagccggcaggagaacggccagagtacatctaaactgtgcggaactacccagctcgacaacgaggtgcctgaaaaggtcgcgggtatggagccagaccgtgagaacagcagtactgatgacaatcttaaaaccgatgagcgaaagagcgaggccctgctgggatttagcgttgaaaatgctgccgctacgcaggtcactagtgctaaggaaatcccttgtaacgagtgtgcgacctcattccccagtctgcagaagtacatggaacatcactgccctaacgccagattgcctgtcctgaaagatgacaatgagtcagagatttcagaacttgaggactcagacgtggagaatctgaccggggaaattgtttatcagcctgatggatctgcttacatcattgaagacagcaaagagtccggacaaaacgcccagacaggcgctaacagcaagttgttctccactgcgatgttcctagactccctggccagcgcgggcgagaaatcagatcagagcgccagtgcgcccatgtccttctacccccagataattaataccttccacatcgcttcctccctgggcaagcctttcaccgccgaccaagcctttccaaataccagtgcgctggcgggcgttggcccagtgcttcactccttcagagtgtatgatcttcggcacaagcgggagaaggactatctgacgtccgacggtagcgccaaaaatagctgtgtgagcaaggacgtgcccaacaatgtcgacttgtccaaatttgacggatgcgtgtctgacgggaaacgaaaacctgttctgatgtgcttcctgtgtaagctgtctttcgggtacatccgcagctttgtgacccatgctgtccacgaccatagaatgactctcaacgatgaggaacagaagctgctcagcaacaaatgtgtctcagctattatccaaggaatcggcaaggacaaagaaccgctcatcagtttcctggagcccaagaagtcaaccagcgtttacccgcatttttctacgacaaatctaattgggccagatcctacttttagaggtctgtggtccgcattccacgtggagaacggggacagtctccccgcggggtttgcatttctcaagggctcagcctctacatcttccagcgcagaacagccactcggaattacacagatgcccaaggccgaagtgaatttgggcggcctgagttctctggtggtgaacacccccatcacctcagtaagcctgagtcattcttcctccgagtcgtccaaaatgagcgagtccaaggatcaagagaacaactgcgagcgacctaaggaaagtaatgttttgcaccccaacggggaatgcccagtaaagtctgagccaaccgaaccaggcgacgaggacgaggaagacgcctatagcaatgagttggacgatgaagaagtcttaggtgaactcacagacagtattggcaacaaggatttcccactgctaaaccagagtatttcgccactgtcttcctctgtcctgaagttcattgagaaaggaactagcagttcttccgcaacggtgtcagatgacaccgagaagaagaagcagaccgccgctgtccgcgctagcgggagcgtcgctagtaattatgggatcagcggcaaagattttgctgatgcctctgcaagcaaagactcggcaaccgccgcccacccctccgaaatcgccaggggagacgaagattcaagtgctacacctcaccagcatgggttcacaccatccacccccggaaccccgggaccaggcggagatggctcccctggttcgggcattgaatgccccaaatgcgataccgtgttggggagctcgcgctcattgggcgggcatatgaccatgatgcattcacgtaattcctgcaagacactgaagtgtcctaaatgtaattggcactataagtatcagcagaccctggaggctcacatgaaggagaagcaccccgagcctgggggcagttgcgtgtattgcaagaccgggcagcctcacccacggctcgcgcgcggcgaaagttacacctgtggatacaagcctttccgctgcgaggtctgcaactactcgacgaccaccaagggaaatctgtccatccacatgcaatccgacaagcatcttaataatgtgcagaatctacagaacggtaacggggaacaggtttttgggcactctgctcccgccccaaacacctcactctcgggctgtgggactcctagtccaagtaagcctaagcagaaacccacttggcgttgcgaagtatgcgactacgaaaccaatgttgcaaggaatttacgcattcatatgacttccgaaaaacatatgcataatatgatgttgctgcagcaaaacatgaagcagattcagcacaatctgcatctgggtttagccccggcagaagcggaactgtatcagtactatctggcgcagaatatagggctgacgggcatgaaactcgaaaatcccgccgatccacagctgatgataaaccctttccagttagatccggcaaccgcggccgctctggctcctggcctcgtgaataatgagcttccgccagagatccgcttagcctcagggcagctcatgggagacgacttatctctgctgaccgccggggaattgtccccttacatttccgaccccgctctcaagctctttcagtgcgcagtctgtaacaaatttacatcagattctttagaggcactgagcgtccatgtgagttctgagcggagtctgcccgaggaggagtggagggccgtgattggcgatatctatcagtgcaaactgtgcaattacaatactcagcttaaagctaattttcaactgcattgcaaaactgacaaacacatgcaaaagtaccagctagtcgcccacatcaaagagggcgggaagtccaatgaatggcgcttgaaatgtattgcgatcggtaacccggtgcatctgaaatgtaacgcgtgcgattattacacaaattctgttgacaagctccgccttcacactaccaaccacagacatgaggctgcgctgaagctttataagcatctgcagaaacaagagggagctgtgaatcctgagtcttgttactactactgcgccgtctgtgattataccaccaaggtaaagctgaatctggtacaacatgtgcgctcagtgaaacatcaacaaactgaggggctgcgaaaactccagctgcatcaacaaggccttgctcccgaggaagataatctatctgagatttttttcgtcaaagattgcccccccaatgaactcgagacagcaagtttaggggccaggacctgtgatgacgatttaaccgaacagcagctcaggtccacttccgaggaacagagtgaggaggctgaaggggctatcaaacctaccgccgtggccgaggacgacgaaaaggatacttccgaaagggacaatagtgaaggtaagaactccaacaaagattcaggtattatcacacctgaaaaggagctcaaagtgtccgtggctggagggacacagccactgctgcttgccaaggaagaagacgtagcgacaaagagaagtaaaccaaccgaggataacaagttctgccacgagcagttctaccagtgtccatactgtaactataactcaagagatcagtctaggatacaaatgcacgtgttgagccagcattccgtccaaccagttatatgttgccccttgtgccaggacgtcctttcaaacaagatgcacctgcagctgcatttgacccatctgcattcggtgtctcccgattgcgtggaaaaacttctgatgaccgtacccgttccagatgtcatgatgcccaactcaatgctgctccctgctgctgctagcgaaaaaagcgaaagagacacacccgcagcagtgacagccgaagggagcggaaaatatagcggtgaatccccaatggatgataagtccatggccggcctggaggactctaaggctaatgtggaggtaaaaaacgaggagcagaagcccactaaggaaccactggaggtctctgagtggaacaagaattcctctaaagacgtgaaaataccagatactctgcaggatcagcttaacgagcagcagaaaaggcaaccgctaagcgtgagcgaccggcatgtgtacaagtacaggtgtaaccactgttcgctagctttcaaaacgatgcagaagcttcagattcattcacaataccatgccattagagcggcaactatgtgtaacttatgccaacgtagcttcagaacatttcaagctctgaaaaaacatcttgaagccggccatcccgagctgagcgaggccgagctgcagcagctatatgcttcgttgcctgtcaatggtgagctttgggctgaatcggaaactatgagccaggatgaccacggcctcgagcaagagatggagagggaatacgaggtcgatcacgagggtaaagcctctcccgtaggctcagactcatcttcgatcccagatgacatgggctcagagcctaaacgtacactccccttccggaagggccccaactttaccatggagaaattcctcgacccaagccgtccgtacaagtgcactgtttgcaaggagagcttcactcagaaaaatatcctgcttgtgcactacaatagtgtctctcatttacataagctcaaaaaggtgctgcaagaggctagtagcccagtcccccaggaaaccaacagcaatactgacaacaagccatataaatgttcgatctgtaatgtcgcctacagtcagtcatcaacattggagatccatatgagaagcgtactacatcagaccaaggcccgtgcggcaaagctggaacccagcgggcacgtggccgggggtcactccatcgctgcgaacgtgaattcgccagggcaggggatgctggacagcatgagtttagcggcggtgaactctaaagatacacaccttgacgccaaggagctaaacaaaaaacagacccccgatttgatttctgctcagcccgcacatcaccccccccagtctcccgcccaaatccaaatgcagctacaacacgaattgcagcagcaggccgcattctttcagccgcagtttttgaacccggccttcctgccacatttcccaatgactcctgaggctttacttcagtttcagcagccacagtttttgttccctttttacattccaggcacagaattttctcttgggccagatctcgggctgcctggcagcgcaacgttcggcatgccagggatgactggtatggccggcagtttgctggaggacctcaagcagcagatccaaacacagcaccacgtcggccagacccagttgcagatcctacagcagcaagcccagcagtatcaggccacccagcctcagctgcagcctcagaagcaacaacagcagcctccaccccctcagcagcagcaacagcagcaggcctccaaactcctcaagcaggagcagtcaaatattgtcagtgccgattgtcaaatcatgaaggacgtccccagctacaaggaggcagaagacatcagcgaaaaaccggagaagcccaagcaggagtttatctcagagggcgagggcctgaaagagggtaaggacacaaagaaacagaaatcccttgaaccctctatcccaccacctcggattgccagcggggcccgcggcaacgctgctaaggctctgctcgaaaactttggctttgaattggttatccagtacaacgagaatcgccagaaagttcaaaagaagggaaaaagcggagaaggtgaaaacactgacaagctcgagtgtggcacatgtggaaagctgttcagtaatgtcttaatcctgaagagtcaccaggaacatgtgcatggacagttcttcccctatgccgccctagagaaatttgcacggcaatacagggaagcatacgataagctgtatccaataagcccctctagccctgagactcccccacctcctcctccccctcctcctcttccacccgcgccaccacaaccaagttccatgggccccgtcaaaatcccaaataccgtcagcacccctttgcaagctccaccacccacgcccccaccccctcctcctcctccacctccccctccgccccctccaccccccccccctccgtccgcccctccccaggtgcagctgccggtgagcttagatttgcctctgttcccatcaatcatgatgcagcccgtccaacaccccgctctaccgccacagctcgccctccagttgcctcaaatggacgcactgagcgcagacctaacccagctgtgccagcagcagctcggactcgatccaaattttctgcggcacagccaattcaaaagacctcgcacaagaattacagacgaccagctgaaaatcctgagggcctacttcgatattaataactctccctcagaggaacagatacaggaaatggccgaaaagtctgggttatctcagaaagtcatcaaacattggttccgaaatactcttttcaaagaaagacagcgtaacaaagattctccatataatttttcaaacccaccaattacagttctggaggacattagaattgatccccagccaacgtctctggaacactataagtccgacgcaagtttttccaaacgctcctctagaacccgattcactgattatcagttgagggtattgcaagacttctttgatactaatgcttatccaaaagacgatgaaatcgaacagctctctaccgtcttaaacctgcccacccgcgtcatagttgtgtggtttcagaacgcccgccagaaagctagaaagagttatgaaaaccaggcagaaacaaaagataatgaaaagcgggagctcacgaatgagaggtatatccgtacaagtaatatgcaatatcagtgcaagaaatgcaatgtggtgttcccccggatttttgatctgatcacccaccagaaaaagcagtgctacaaagatgaggatgacgatgcccaggatgaatcgcagacggaggacagcatggatgcaaccgatcaggtagtttataagcactgtacagtctccggccagaccgacgcagcgaaaaacgcggcagcccccgctgcaagtagcggtagcgggacgtcaacccctctaatcccaagtcccaaacctgagcccgagaaaacttccccaaagccagaatacccagccgagaaacctaagcaaagtgatccaagccctccttctcagggcaccaagcccgctctgccattggcctccacttcttccgaccctccacaagcgtcaaccgctcaacctcagccccagccgcagccaccgaagcaaccacagctgataggaaggcctccatctgctagccagacacccgtgccaagtagccctctccagatatccatgacatccttacaaaatagccttcctccacagcttctgcaatatcagtgcgaccaatgtaccgtcgcctttcccactttagaactgtggcaggaacatcagcatatgcacttcctggccgcacaaaaccaatttcttcattctccttttctggaacgacctatggatatgccctatatgatctttgacccaaataatccattaatgacgggccagctcctcggtagtagcctcacacagatgcccccacaggcaagttcgtcccacacgacagccccaaccactgttgctgcgtctctgaagcgcaagctggatgacaaggaagacaataactgttccgagaaggagggggggaactcaggagaggaccaacacagagacaagagactccggacgactatcacgcccgaacagctcgaaatcctttacgaaaagtacctcttggattctaatcccacacgcaagatgcttgaccatatcgctagagaggtcggcttaaaaaagagagttgtccaggtctggttccaaaataccagggccagggagaggaagggccagtttcgcgcggtgggtcctgcccagtctcacaagagatgccccttctgtcgcgccctcttcaaggcgaaaagcgccctggagagccatatccggtcacggcactggaatgaggggaagcaggctggctacagcctcccgccatccccgctgatttccacggaagatggaggtgagtctccccagaaatatatctatttcgactacccgagtcttcctttgacaaaaatcgacctgtcctcagagaatgagcttgcctctactgttagcacaccagtgtccaagactgcggagctgagccccaagaacctcctttcgccttcttcatttaaagcagaatgcagtgaagacgttgagaatctcaacgctccccccgcagaagccggttatgaccagaacaaaacagacttcgacgagacatctagtatcaacactgccataagcgatgcgacaaccggggacgaaggaaacacagagatggaaagcacaacaggaagctccggtgacgtgaagcctgccctttcccccaaagagccaaagacgctggataccctgcccaagccagctactacccctacaaccgaggtgtgcgacgataagtttttgttcagcctgacgtcaccttcaatccactttaacgacaaagacggagaccacgatcagagtttctatatcaccgatgaccctgacgataacgcagatagatccgagacttcgtccatcgcagacccttcttctcccaacccatttggctcctccaacccattcaaatccaagagcaacgatcggcccggccacaaaagattccgcacccaaatgagcaatctccagctgaaggtgctgaaggcctgtttcagcgactatcggacaccaaccatgcaggagtgcgagatgctgggcaacgaaataggcttaccaaaacgggtcgtgcaggtttggtttcagaacgctcgagcaaaagaaaagaaattcaagatcaatattggcaaacccttcatgatcaatcaaggggggacagagggtaccaagcccgagtgcacattgtgtggagtgaagtacagtgcaagactcagcattcgcgatcacattttctcaaaacagcacatcagtaaggtgagagagactgtgggcagccagctagatcgagagaaagattacctggctccaactacagtgcggcagcttatggctcagcaggagctcgatcgcatcaagaaggcctcagatgtactgggtctgactgtgcagcaacccgggatgatggactctagctcactgcacgggatttcgctgcccacagcctaccccggcctccccgggctccccccagtgctattgccgggcatgaacggcccctcaagcctgccagggtttcctcagaacagcaatacattgactccacccggcgcaggtatgctgggttttcctacttctgctacctcctccccggcgttgtctttatcaagtgcgccaacaaaacccctccttcagacgccgccgccccccccacccccccctccgccacctccttcttcttctctgtcaggccagcaaaccgagcagcaaaataaagagtccgaaaagaagcagactaaaccaaacaaggtgaagaaaatcaaggaggaggagctagaggctacaaaaccagaaaagcacccaaagaaggaagaaaagatatcttcagccctgagcgtactgggcaaagtggtaggagagacccatgtggaccctattcaattgcaggcccttcagaacgccattgccggtgatcctgctagcttcatcggcggtcagttcctgccatatttcatccccggatttgcgtcctatttcacaccacaattgccaggaaccgtacagggcgggtatttcccaccggtgtgcggaatggagagcctatttccttatgggcctactatgccccagacattggctggactgagccccggcgcactgttgcagcagtatcagcagtatcagcagaatctacaggagtctctccaaaaacaacagaaacaacaacaagaacagcaacaaaagcctgtgcaggcaaagacttccaaagtggagagcgatcagccgcagaacagcaacgacgcgagcgagacgaaagaagacaagtcaactgctaccgaatctacaaaagaggagcctcaacttgagtccaaatccgcggacttctcagatacatacgtcgtgccatttgtgaagtacgaattcatctgcaggaaatgccagatgatgttcactgacgaagatgcagcagtgaaccaccagaaatcattctgttactttggacagccattaatcgatcctcaagagaccgtcttgcgcgtgcctgtctccaagtatcaatgccttgcttgcgacgtcgcgataagcgggaatgaagccctgagccaacacttacagagtagtttgcacaaagagaagacaatcaaacaagccatgcggaatgccaaggagcacgtgcggttgttaccacactccgtgtgctcacccaatccaaatactaccagcacatcccagtccgctgcgtccagcaataacacttacccccaccttagctgtttctctatgaagtcgtggcccaatattttgttccaggccagcgcacggagagcagcctcaccacctagttcgccaccctctctttcactgccctccacagttacatccagtttgtgttctacatccggggtccagaccagccttccaacagaatcatgcagtgatgagagcgactccgagttaagtcagaagctggaagacctcgataatagcttagaggtgaaagctaagccagctagcggccttgatggaaatttcaacagtatcagaatggatatgttcagtgtatag

SEQ ID NO: 211833 - DNA, 423 bp, synthetic construct
  misc_feature 1..423: note = Description of Artificial Sequence: Synthetic coding sequence
  source 1..423: mol_type = other DNA
atggagacctgcgacagcccccccatcagccggcaggagaacggccaatcgacttcaaaactgtgtgggaccactcagctggataacgaggttcccgagaaagtcgccggcatggaacctgatagggagaactcctctacagatgataatctaaaaaccgatgaacgaaaatctgaagccctgctagggttctccgtggaaaatgctgccgccactcaagtcacatcggcaaaggaaataccctgtaacgagtgcgctacctcttttccatccctccaaaaatacatggagcatcactgcccgaacgccaggctgccagtgctcaaggatgacaacgaaagcgagataagcgaacttgaggatagtgacgtggagaatctcacaggtgagatcgtctaccagcctgatggatctgcgtactag

SEQ ID NO: 211834 - DNA, 306 bp, synthetic construct
  misc_feature 1..306: note = Description of Artificial Sequence: Synthetic coding sequence
  source 1..306: mol_type = other DNA
atggagacctgcgacagcccccccatcagccggcaggagaacggccagtcaacatctaaactttgtggcaccacacagttggataacgaagtgcccgagaaagttgcagggatggaaccggacagagaaaatagctccaccgacgacaatctgaagacggatgagagaaagtccgaggctcttctggggttctcagtagagaacgccgcagccacacaggtgacttcagccaaagagattccttgcaatgagtgtgcaacatcttttccgtctttgcagaagtacatggaacatcactgcccctag

SEQ ID NO: 211835 - DNA, 2253 bp, synthetic construct
  misc_feature 1..2253: note = Description of Artificial Sequence: Synthetic coding sequence
  source 1..2253: mol_type = other DNA
atggagttcgtgagcggctaccgggacgagttcctggacttcaccgcactgcttttcggctggtttaggaagttcgtagccgagagaggagcagtcggcacctctcttgaggggagatgtcggcagctcgaggctcagattcgcaggctgccccaggacccagcactgtgggtgctgcacgtcctgcctaaccattccgtgggcatctctctaggacagggagcagagccaggccccgggcccgggctgggcacggcctggctgctgggagacaatccacctcttcacttaagggacttaagcccttatatctctttcgttagcttggaagacggcgaagagggcgaagaggaggaagaggaagatgaagaggaggaaaaaagagaagatggcggtgccggatccactgagaaggtcgaacccgaggaagacagagaactggcacctacctcccgggagtcaccccaggagacgaaccctcccggagaaagcgaggaggccgcccgggaggccggcggtggaaaggatggttgccgggaggaccgggttgagaacgaaaccaggccgcagaagagaaagggacaacgatcagaggctgcccctcttcacgtgtcctgtctgctccttgtgaccgacgaacacggcactattctgggaattgatctgttggttgacggtgcccaaggcaccgcctcttggggtagcgggactaaagatttagccccttgggcctatgcattgctgtgccactctatggcctgccccatgggcagcggagatccgaggaagcctcgacagcttacagtcggcgacgccaggttgcaccgggagctggagtctctcgtgcctagactcggcgtgaagctggccaaaacaccaatgcgcacatggggcccccgtccaggatttacctttgctagcctgcgggcccgcacctgccatgtctgccatagacattcctttgaggcgaagctgacgccatgccctcaatgttcggctgtcttgtactgtggcgaggcctgccttagggccgattggcagcgttgtcccgacgatgtatcccaccggttttggtgcccacggcttgctgcatttatggagcgcgctggagaactagccacgctgccattcacctacactgctgaggtgacatcagaaactttcaacaaggaggcattcctcgcctccagaggactcaccagagggtactggactcagttgagcatgttaatccctggcccgggatttagccggcaccccagggggaacacaccttccctctcattattgcgcggaggtgacccttatcaactgttacagggcgacggcacagccctaatgccgccagtgccaccccatccccctcgcggggtgttcggttcttggcaagattactatacgtggcgggggctgagcctcgattccccaattgcagtcctccttacttatcccttaaccgtgtactatgtgattacacacctggtccctcagtccttcccagagctgaatattcagaacaaacagtccttgaagattcacgtcgtggaggcaggaaaagagtttgatttggtaatggttttctgggagctcctggtgctgcttccccatgttgcactagagcttcaattcgtgggcgacgggcttccacccgagtcagatgagcagcacttcacccttcaacgtgattcactggaagtaagcgtccgccccggctctggaatcagcgcccgcccgagtagtggtactaaggaaaagggcggccgccgagacctgcagattaaagtctccgcaagaccttaccatttgttccagggaccaaaacccgacctggtaattgcttccccgtcctctctgtcagccggattcaacagtggttttgcgctaaaagacacctggcttcgcagccttcctcgcctccaatccctgagggttcccgctttctttaccgagtcctccgagtattcctgtgtcatggacgggcagacaatggctgtcgcaactggcggagggacctctccacctcagccaaatccctttcggtccccctttagactgcgagccgccgataattgcatgtcctggtactgcaatgcttttatttttcacctagtgtacaaacccgctcagggaagtggcgctaggccggcaccgggtcccccccctccctcacctacaccaagtgcacctcctgcccccaccaggaggagaaggggggagaagaaaccagggagaggggcaaggaggcggaagtag

SEQ ID NO: 211836 - DNA, 2112 bp, synthetic construct
  misc_feature 1..2112: note = Description of Artificial Sequence: Synthetic coding sequence
  source 1..2112: mol_type = other DNA
atggagttcgtgagcggctaccgggacgagttcctggacttcaccgccctgctgttcgggtggttcaggaagtttgtggctgagaggggcgccgtggggacgtccctagaggggagatgtcggcagcttgaggcgcagattcgcagattaccacaggatccagccttgtgggtgcttcacgtcctccccaatcactctgtggggatatctcttggacagggagcagaaccggggcctgggccggggctcgggaccgcctggctgctgggcgacaatccccctctgcacctcagggatttaagcccgtatatttcattcgtaagcctcgaagatggagaggagggggaagaagaagaggaagaagacgaggaggaagagaagagggaagacgggggggccggatctaccgagaaagttgagcctgaggaggatagagaactggcgccaactagccgggaatctccacaggaaacgaatccccctggcgaatcagaagaggcagccagagaggccggtggcggcaaggatggctgcagggaggacagagtggagaatgagaccagacctcaaaagcgtaaaggacagcgctcggaagcagccccgctccatgtgtcatgcctgttactggtgacagacgagcatgggacaattctcggcatcgacctcctggtcgatggcgctcagggcacggcatcttggggcagtggcactaaagatttggctccctgggcctatgccctcttgtgccactccatggcttgtccgatgggctctggagacccgagaaaaccacggcagttgacggtaggagacgctcggcttcaccgtgaacttgaaagcctggtaccaaggctgggtgttaagctagcaaagacgcccatgcgcacctggggacctagacctggattcacttttgcctccttaagagcccgcacttgccacgtctgtcacagacacagctttgaggctaaattgaccccttgtccccagtgctcagccgttttatattgcggcgaggcttgtttgcgggccgattggcagagatgtcctgacgatgttagtcataggttttggtgtcctcgcttagccgccttcatggaacgggccggcgaactcgcaactttgcctttcacttataccgctgaagtgacgtcggagacatttaacaaggaagcctttctggccagcaggggacttactagggggtactggacgcaactttctatgttgatccccggtccaggcttctcccgtcatccgcgtggcaatacaccatccctcagcctactgcgcgggggcgacccttatcaactgttgcagggcgatggcaccgccctcatgcctccagtacctccgcatccgccgcggggcgtttttgttccagagttaaatatacagaacaagcaatcactcaaaattcacgtcgttgaagctggcaaggagtttgatttagttatggtattttgggaattactcgtgctcttacctcacgtggcgcttgaactgcagttcgtaggagacggactgcctcccgagagcgatgaacaacattttaccctccagcgggattctctggaagtctctgtccggccagggtccggtatatctgcacggccgtcttctgggactaaggagaagggcggcaggagggatttacagattaaagtcagtgcccgcccatatcacctgtttcaagggcccaagcctgacctggtgattggtttcaactcaggctttgcactcaaggatacatggcttcgttccctgccccgcctgcagtcactcagagtgcctgcattcttcaccgaaagtagtgagtatagttgcgttatggacggccagacgatggcggttgccacagggggggggactagcccaccacagcccaacccttttagatccccttttagattgagggcagcagacaattgcatgagctggtattgtaatgcctttatcttccatctggtctataaacctgcgcagggcagtggggcccggcccgctccaggaccaccgcctccttcccctacgccttccgcgccgcccgcccctacgcgccgtcggcgcggggagaagaaacccggcaggggtgcaaggcgccgaaagtag

SEQ ID NO: 211837 - DNA, 1722 bp, synthetic construct
  misc_feature 1..1722: note = Description of Artificial Sequence: Synthetic coding sequence
  source 1..1722: mol_type = other DNA
atggacgccaagagcctgaccgcctggagccggaccctggtgaccttcaaagacgtatttgtggattttaccagagaggagtggaagctacttgatactgcccagcagattgtataccgaaacgtgatgctggaaaattataaaaacttggtctctctcggataccagctgacaaaaccggatgtgattctgagacttgaaaaaggggaggagccttggcttgtcgagagagagatccaccaagaaacacaccccgacagcgaaacagccttcgagattaaatcatccgtttcctcccgttccatctttaaagacaagcagagttgtgatattaaaatggaaggaatggcacggaacgatctgtggtacctgtctttggaggaggtgtggaagtgccgggaccaattagataagtaccaggagaacccggaacggcacctccgccaggtagcattcactcagaagaaggtgttaacccaggagcgggtgtccgagtccggaaaatatggggggaattgcctgctgccagcccagcttgtgttgcgggagtacttccacaagagggactcccatacaaagtctcttaaacatgatctggttctgaacggacaccaagacagctgtgcttctaactctaatgagtgcggccagacgttctgccaaaatatccacctgatccagttcgcgcggacccacacaggggataagtcttacaagtgtccagataatgataacagccttactcatgggagcagcctggggataagtaaggggatacacagggagaaaccatacgagtgcaaagaatgcggcaaattcttctcctggagaagcaatttaacccggcatcagctcatccacacgggagagaaaccatacgaatgcaaagagtgcggaaagtcttttagccgctcgagtcacttgatcgggcatcaaaagacgcatacaggtgaagagccatatgaatgcaaagagtgtggcaagtcattcagctggttttcacaccttgtcactcaccagaggactcacacgggggataaactctacacatgtaaccagtgtggcaagtcctttgttcatagctccaggctcatcagacaccaaaggacacataccggagaaaagccgtacgagtgcccagaatgcgggaaatctttcagacaatctacacaccttattctccaccagcgcacccacgtgcgagtgcgaccatatgagtgtaacgaatgcggaaaatcctattcacagaggtcacacctggttgttcaccaccgcattcacacaggcctgaagccgtttgaatgcaaggactgcggcaaatgtttctcccggagtagtcatctttattcacaccagcggacacatacaggagagaagccctatgagtgtcacgactgtggcaaaagcttcagtcagtcctctgctcttatagttcaccaacgcattcacaccggagaaaaaccttacgaatgttgccaatgtgggaaagcttttatacgaaaaaacgacctcatcaagcatcagcgtatccatgtgggcgaggagacttataaatgtaatcagtgtggtattatctttagtcagaatagccccttcattgtgcatcagatcgctcataccggagagcagtttcttacatgcaaccagtgcgggacagctctcgtcaatacgtcaaatctgatcggatatcaaaccaaccacatcagggagaatgcatactag

SEQ ID NO: 211838 - DNA, 1722 bp, synthetic construct
  misc_feature 1..1722: note = Description of Artificial Sequence: Synthetic coding sequence
  source 1..1722: mol_type = other DNA
atggacgccaagagcctgaccgcctggagccggaccctggtgacctttaaggatgtgtttgtggactttacaagggaggaatggaaacttctggatacagcccagcagattgtgtacagaaatgtaatgctggagaactacaaaaatctggttagcctgggatatcaacttacaaagcccgacgtgattttaagactggaaaagggggaggagccgtggctcgtggagcgagagattcaccaggagacccacccagactctgaaaccgccttcgaaatcaagtcctccgtgtctagtcggtctatcttcaaagataaacagagctgcgacatcaagatggaaggcatggcacggaacgatttgtggtacctgagccttgaagaggtatggaaatgcagagatcagctggacaaataccaggaaaaccctgaacgccacctgcgccaagttgccttcacacaaaaaaaggttctgacacaggagcgagtctctgaatccgggaagtatgggggcaactgcctccttccagcccagctggtgctgcgggagtactttcataagcgagattcccatactaagagcttgaagcacgacctcgtgcttaatggacatcaagacagctgtgcctccaatagtaacgagtgtggtcagacattctgtcaaaacattcacctgattcagttcgcacgaactcatacaggtgacaagtcttacaaatgccctgataacgataactccctaacccacgggtcgtccctgggcattagtaagggcatccaccgcgagaaaccatacgaatgtaaggaatgcggaaagttctttagttggcggagtaacctgacccgtcatcaattgatccacacgggagaaaaaccttacgaatgcaaggagtgtgggaagtcattctctcgcagctctcacttgattggccatcaaaagacgcatactggggaggagccttatgagtgcaaagagtgcggcaagtccttcagttggttctcacacctggttactcaccagcgcacccatacgggcgataaattgtatacctgtaatcagtgcggtaagtctttcgttcatagctctcgcctgatccgccaccagagaacacacaccggagagaaaccttacgagtgcccagaatgcggaaaatcctttcgtcagtcaacacacctgatcctgcaccaaaggacccacgtgcgggtacggccctacgagtgcaacgaatgtggaaaatcttactcacagagatcccacctcgtggtgcatcacaggatccatactggacttaagccctttgagtgtaaggactgcggaaagtgtttctcacgttcaagccacctgtacagccaccagcgaactcatactggtgagaagccttacgagtgccacgattgcggaaagtccttttctcaaagctcagctctgatcgtgcatcaaagaatccacactggagagaagccatacgagtgctgtcagtgtgggaaggccttcatacgaaaaaatgatttgattaagcaccaacggattcacgtcggtgaagagacgtacaagtgtaaccaatgcggtattatcttcagccagaactctccatttatcgtgcaccagattgctcacaccggtgaacagttcttaacatgtaaccaatgtggaacagcattggtgaacaccagcaatctgatcggttaccagaccaaccatatcagggaaaatgcctactag

SEQ ID NO: 211839 - DNA, 219 bp, synthetic construct
  misc_feature 1..219: note = Description of Artificial Sequence: Synthetic coding sequence
  source 1..219: mol_type = other DNA
atggacgccaagagcctgaccgcctggagccggaccctggtgacctttaaagatgtgtttgttgatttcacacgcgaggagtggaagttactggacacagcccagcagatagtgtatagaaatgtgatgttggaaaactacaaaaacctcgtgtcgttgggctaccagttgacaaagcctgatgtgatcctgaggcttgagaagggcgaagaaccctag

SEQ ID NO: 211840 - DNA, 132 bp, synthetic construct
  misc_feature 1..132: note = Description of Artificial Sequence: Synthetic coding sequence
  source 1..132: mol_type = other DNA
atggacgccaagagcctgaccgcctggagccggaccctggtgaccttcaaagacgtgttcgtagactttactagggaagagtggaagcttctggacacagcacagcaaattgtgtatcggaatgttatgtag

SEQ ID NO: 211841 - DNA, 144 bp, synthetic construct
  misc_feature 1..144: note = Description of Artificial Sequence: Synthetic coding sequence
  source 1..144: mol_type = other DNA
atggacgccaagagcctgaccgcctggagccggaccctggtgaccttcaaggacgtgtttgtggatttcacccgggaggaatggaagctccttgatactgcacagcagattgtatatagaaacgttatgctcgagaattattag

SEQ ID NO: 211842 - DNA, 1629 bp, synthetic construct
  misc_feature 1..1629: note = Description of Artificial Sequence: Synthetic coding sequence
  source 1..1629: mol_type = other DNA
atggacgacccccggtacggcatgtgccccctgaagggcgccagcggatgtcccggagcagaacgctccctccttgtgcagtcttactttgaaaagggtcccctcacattcagggatgtcgcaatcgaatttagcctggaagaatggcagtgtctggactccgcacagcaggggctataccggaaggttatgcttgaaaattatagaaacctggtattcctcgctggaattgctctgaccaaaccggacctaatcacctgcctggaacaagggaaagagccatggaatattaagagacacgaaatggtggctaagccgccagtcatctgctcccacttcccccaggatctatgggcagagcaggacattaaggacagtttccaagaggccatcctaaagaaatatggaaaatacggtcatgacaacctgcagctgcaaaagggttgcaaatccgtcgatgagtgcaaggtacacaaggagcacgacaacaagctcaaccagtgcttgattaccacccaatccaatattttccagtgcgacccaagcgctaaggttttccatacgttttccaacagcaataggcataaaatccggcacacccgaaaaaaaccttttaaatgtaaaaaatgcgaaaagtcattctgcatgctgctgcacctcacgcagcataaaagattccacataaccgaaaatagttatcagtgcaaggattgcgggaaagcgtttaattggttcagcaccttgaccactcaccggagaatccatacgggagaaaaaccctataaatgcgaagagtgcgggaaagccttcaacagatcctctcatctgacaacacataagatcattcacacaggtgagaagccatatcgctgcgaggaatgtggcaaagcatttaatagaagttcccacctgaccacccacaagaggatccatacaggagtaaagccctacaagtgtaccgagtgcggaaaggccttcaaccgctccagccatcttaccacgcatagaataatacatactggggagaagccctacaagtgtgaggagtgcggcaaagcattcaaccagtcctccactctcacaacccacaagatcactcacgccggggaaaagccctacaagtgcgaagaatgtggcaaggcattttacaggttcagctacctgaccaagcataaaacgagccatacaggcgagaagttctataaatgtgaagagtgtggaaaaggctttaactggtcttctgcacttaccaagcacaaaaggatccatacaggagagaagccttacaagtgtgaggaatgcggcaaagcctttaatgagtcttctaacctcaccacacacaagatgattcatacaggagaaaaaccatacaagtgtgatgagtgtggcaaggcttttaatcgctcctctcagcttactgcccacaaaatgatccacacgggggagaagccatataaatgcgaagagtgtggcaaagcgttcaaccgaagctccacgttaacaaagcacaaaattacccatacaggcgaaaagtcctacaagtgggaggagtgcggtaaagactttaatcagtctctgagtctcattaagcagaataactcttattggcgagagactctccagatgtag

SEQ ID NO: 211843 - DNA, 1311 bp, synthetic construct
  misc_feature 1..1311: note = Description of Artificial Sequence: Synthetic coding sequence
  source 1..1311: mol_type = other DNA
atggacagcgtggccttcgaggacgtggccgtgaacttcacccaggaggagtgggcgctgctatctccatcacaaaagaacctttatagggatgtgacactcgagacatttaggaatttagcgtcggtgggcatccagtggaaggaccaggatatcgagaacttatatcaaaacctcggcatcaagctgcggtcccttgtggagaggctttgtggccgaaaagagggcaatgagcatcgcgagacattctcacagatcccggattgccacctgaacaaaaagagtcagacgggggtgaagccatgtaagtgttctgtgtgtgggaaagtatttctacgacactcttttttggaccggcacatgcgggcccacgcaggacataagcgatctgagtgcggtggcgaatggagagagaccccacggaagcagaaacagcatggtaaagcatccatctccccatcatctggggcgagaaggaccgtcaccccgactaggaaaaggccctacgaatgtaaggtctgtggcaaagccttcaactccccgaatctttttcagattcaccaacggacgcacactggcaagagaagctataaatgcagggaaattgtgcgcgcctttacggtgagctccttcttccgcaagcacggcaagatgcacacaggggaaaaaagatacgaatgcaagtattgcgggaaaccaatagattatccctctctgttccagatccacgttcgaactcataccggggaaaagccatataagtgtaaacagtgcggcaaggcctttataagcgccgggtatctcagaacccatgagatccggtctcacgccctcgagaagagtcaccagtgccaggagtgtggcaagaaactgtcatgcagttcatcgttgcaccgccacgagagaacacacagcggcgggaaactgtacgagtgccaaaaatgcgccaaagtcttccgttgccccacaagcctccaggcccacgagagagcccatacgggcgaaaggccctacgaatgcaacaaatgcggtaaaaccttcaactacccgagctgtttcaggaggcacaagaaaacgcacagcggagaaaagccatacgaatgcactagatgcggaaaggcttttggatggtgcagctctctgaggcggcacgaaatgactcacaccggggagaagccatttgactgtaagcagtgcggcaaggtgttcacctttagcaactatctgcgtctccatgaaagaactcacctggcgggcagatcgcagtgtttcggcagaaggcaaggtgatcatctgagcccaggggtgtag

SEQ ID NO: 211844 - DNA, 1311 bp, synthetic construct
  misc_feature 1..1311: note = Description of Artificial Sequence: Synthetic coding sequence
  source 1..1311: mol_type = other DNA
atggacagcgtggccttcgaggacgtggccgtgaacttcacccaggaagagtgggcccttctgagccccagtcagaaaaatttgtaccgagatgtgacgctggagacctttcggaatctggccagtgtgggtatccagtggaaagaccaggatatagaaaacctctaccagaacctgggcatcaagctgagaagtctagtggagcgcctatgcggccggaaggaaggaaacgagcacagagaaacttttagccaaatacctgattgccacctgaataagaaatctcagaccggcgttaaaccatgcaagtgttcagtatgtgggaaagtctttctgaggcacagctttctggaccgccatatgcgcgctcatgcaggccacaaacggagtgaatgtggcggagagtggagagaaacaccacgtaaacagaaacagcacgggaaagcgtcaatttcccccagcagtggagcccgaaggacagtgactccaacccgaaagcggccttatgaatgtaaggtctgtggaaaggcctttaacagtcctaacctatttcagatccaccagaggactcataccggaaagcgctcatacaagtgcagggaaattgtgagagcattcaccgtttcgagctttttcagaaagcacggcaaaatgcatacaggggaaaaaaggtacgagtgcaagtattgcggcaaacctatagactatcccagtctgtttcagatacacgtacggacccacaccggtgagaaaccatacaagtgcaagcagtgcggcaaggcatttatcagcgccggatatctccgcacgcatgaaataagatcccatgcgctggagaagtcccatcaatgtcaggaatgtggaaagaagctgagctgttcctcgtctctacatcgccacgagcgcacccacagtggtggcaagctgtatgaatgccagaaatgtgccaaagttttccgatgtcccaccagcctgcaggctcacgaaagggcacacactggcgagcgaccatacgagtgtaataagtgtgggaaaacgttcaactacccctcttgttttaggcggcataaaaaaacccattcaggcgagaaaccttatgaatgtacaaggtgtgggaaagcattcgggtggtgtagcagccttcggagacacgaaatgactcatactggcgaaaagccatttgattgcaaacagtgtggtaaggtgttcactttcagtaattacctacggctccatgagagaactcacctggcgggaaggagtcagtgcttcggacgcagacaaggagatcacctttctcccggcgtgtag

SEQ ID NO: 211845 - DNA, 951 bp, synthetic construct
  misc_feature 1..951: note = Description of Artificial Sequence: Synthetic coding sequence
  source 1..951: mol_type = other DNA
atgcgggcccacgccggccacaagcggagcgagtgcggcggcgagtggcgcgagacacctagaaaacagaaacagcacggaaaggcgtccatttccccgtcgtccggcgctcgtcgaacagtaacacccactcgcaagaggccctatgagtgtaaagtgtgtggtaaggctttcaacagcccaaatttgtttcagattcaccaaaggactcataccggaaagcggtcttataagtgcagagaaatcgtccgcgcattcaccgtttcctccttctttaggaagcacgggaaaatgcataccggggaaaaaagatatgagtgtaagtactgcggtaagcctatagattatccatctctgttccagatccacgtgagaactcacacgggcgagaaaccatataaatgtaaacaatgtggaaaggcatttatatcagccggataccttagaacacatgagattcgcagccatgccttggaaaagagccaccagtgtcaggaatgtggaaaaaaactgagctgttcctctagcctgcacaggcacgaacgcacacattcaggcggaaaattgtatgaatgccaaaagtgtgccaaggtgttccgttgcccaacatccctgcaagctcacgaacgagcccacaccggcgagcgaccttatgagtgtaataagtgcggaaaaactttcaactatccatcttgtttccgtagacataaaaagacccatagcggagaaaagccctacgagtgcaccaggtgtgggaaagcattcggctggtgctcttccctacgacgccacgagatgacccacactggggagaagcctttcgattgcaagcaatgtggaaaagttttcacattttccaactatctcagactgcacgaaaggacacatctggctggtcgttctcagtgtttcggcagacgtcagggtgaccatctctcgccgggagtatag

SEQ ID NO: 211846 - DNA, 1311 bp, synthetic construct
  misc_feature 1..1311: note = Description of Artificial Sequence: Synthetic coding sequence
  source 1..1311: mol_type = other DNA
atggacagcgtggccttcgaggacgtggccgtgaacttcacccaggaggagtgggcattactgagccccagccaaaagaatctctacagagatgttacccttgagactttccggaatcttgctagcgtgggcattcagtggaaggaccaggatattgagaacctctatcagaacctgggaataaagttgcggtctcttgtggagcgtctgtgcggccgcaaggagggtaatgaacatagagagaccttttcccagatacctgattgtcatctgaataagaagagccaaacgggcgtcaagccatgtaagtgttccgtttgcgggaaggttttcctgcgccactccttcctggatcgccacatgcgggcccacgcagggcacaagaggagcgaatgtggcggagagtggcgggaaaccccacgaaagcagaagcagcacgggaaggccagcattagtccgtcatccggagcaaggcgcacagttaccccaactcgtaagcgcccctatgaatgtaaagtatgtggcaaggccttcaattcacctaacctatttcaaattcaccagcgcacccacactggcaagaggtcttacaaatgccgagagatcgtaagggcctttaccgtgtctagcttcttcagaaaacacggcaagatgcacacgggtgagaaacgatatgaatgtaaatactgcggcaagcccatcgattatcctagccttttccaaatacatgtccgtacgcacactggcgaaaagccttacaaatgcaagcagtgcggcaaggcttttattagtgccggctacttacggacccacgaaattcgatcccatgctctagagaaatcccatcagtgccaggaatgtggtaagaagttatcttgcagttcatcccttcaccggcacgagaggactcattctggtgggaagctgtacgagtgccagaaatgcgcgaaggtgttcagatgtccaacttcccttcaagcccacgaacgagcccataccggtgaacgtccttacgaatgtaataaatgcggaaagacatttaattatccttcctgctttagacgacacaagaagactcacagcggagaaaagccctacgaatgcacaaggtgtgggaaagcatttggctggtgttcctccctacggaggcatgagatgacacataccggagaaaagccattcgactgcaagcaatgtggaaaggtattcacattttccaattatcttcgcctccatgagaggactcatctggctggcaggtctcaatgttttggtagacgccagggtgaccatctctcacccggcgtgtag

SEQ ID NO: 211847 - DNA, 2352 bp, synthetic construct
  misc_feature 1..2352: note = Description of Artificial Sequence: Synthetic coding sequence
  source 1..2352: mol_type = other DNA
atggtggccaagccccccgtgatgagcttccacttcgcccaggacctgtggcctgagcagaacattaaggactcttttcagaaggtgaccctgcggagatacggtaagtgcgagtacgagaatttacaactccgcaaagggtgtaagcatgtggatgaatgcaccggccacaaagggggccataacaccgtgaatcagtgcctgactgcaactccatctaagatctttcagtgcaataagtacgtgaaggttttcgataaattttcgaattccaatagatataaacgccgtcataccggcaacaaacacttcaagtgcaaagaatgttcgaaatccttttgtgtgttgtcacaattgactcagcaccggcgtatccatacacgggttaatagctacaaatgcgaggaatgcggaaaagctttcaactggttctcaacactgacgaaacataaacgaatccacaccggcgaaaagccttacaagtgcgaggaatgcggcaaagctttcaaccaatcgtcccagctgacgcggcacaaaataatccatacagaagagaagcccaataaatgcgaggagtgtggaaaggccttcaaacaggccagtcacttgaccatccataaaattatccacacaggcgaaaaaccatataagtacgaggaatgtggcaaggttttcagccagtccagtcacctgaccacccagaagatcttacacactggagaaaatctctataagtgcaaggagtgcggaaaggcttttaatctcttctccaatctgaccaaccataaaagaattcacgccggcgaaaagccctacaaatgcaaggagtgcgggcgggcgttcaatatctccagtaacctaaacaaacaagagaaaatacatactggggggaaactgaataaatgtgaggaatgtgacaaagccttcaacagatctcttaagctgaccgctcataaaaagatcctcatggaagaaaaaccttacaaatgcgaagagtgcgggaaggtcttcaatcagttttcaactctgacccggcacaagataatccatacaggagagaagccctacaagtgcaaagagtgtggtaaggcctttaatcagtcttccaacctgactgagcataaaaagatccacactgcggagaagtcctacaagtgcgaggaatgcggcaaagcctttaaccagcactccaatctcattaatcatcgaaagatttatagtggagagaagccatacaagtgcgaagagtgtggaaaagcgtttaataggtcttctaccttaacccgacacaagaaaatccacaccggagagaagccttacaaatgcgaggagtgcgatcgggctttttctcagtccagcaatctgacagaacacaaaaaaattcatactggagagaagccatacaaatgcgaggagtgcggcaaagcttttaatcggttctccaccctgaccaagcacaagagaattcatactggcgagaaaccttataaatgcgaagagtgcggaaaagcttttaaccaaagttaccagctcacacgccacaagatcgtgcatacaaaagaaaaactcaataaatgtgaagagtttggaaaagcgtttaagcaatcctcccaccgaaccatccacaaaatcatccacacgggagagaagccttacaagtgcgaggagcatggcaaggtgttcaatcagagtagcaacttaactacacaaaagattatccatactggggaaaacctctacaaatttgaggagcacggaaaggcgtttaacttgttttccaacattacgaaccataagattatctataccggcgaaaagcctcataagtgcgaagaatgtggcaaggcctacaatcgtttctctaaccttacgatccataagcgaatccacactggagagaagccttatcagtgcgccgaatgtggaaaagcattcaactgcagctctacattgaataggcataagattatccatacgggagagaagccctacaaatgcaaggaatgtggaaaggcctttaacttaagttctaccttgacggcacacaagaaaatccacactggggagaagccctataagtgcgaagagtgtggcaaagcattcaatcagtcctctaacctcacaactcacaagaaaatccatacctctgagaagccatataagtgtgaagaatgcgggaagtcatttaatcagttttcaagcctgaatatccataaaattatccataccggagagaaaccttacaaatgcggggattacggcagagcattcaatttgtcctccaacctgaccacccacaagaaaattcacactggggagaagccatataaatgcgagtatggcaaaacgtag

SEQ ID NO: 211848 - DNA, 276 bp, synthetic construct
  misc_feature 1..276: note = Description of Artificial Sequence: Synthetic coding sequence
  source 1..276: mol_type = other DNA
atggtggccaagccccccgtgatgagcttccacttcgcccaggacctgtggcccgagcagaatatcaaggacagctttcagaaggtaaccctccggcgatatggcaagtgtgaatacgaaaatttgcagctcaggaaaggctgtaaacacgtggacgagtgtaccggtcataagggaggacataatacagttaaccagtgcctgacagccactccttccaagatctttcagtgcaataagtacgttaaagtgttcgacaaattcagcaattcctag

SEQ ID NO: 211849 - DNA, 2352 bp, synthetic construct
  misc_feature 1..2352: note = Description of Artificial Sequence: Synthetic coding sequence
  source 1..2352: mol_type = other DNA
atggtggccaagccccccgtgatgagcttccacttcgcccaggacctctggcccgaacagaacattaaggatagcttccaaaaggttacgctgagaaggtacgggaaatgcgagtatgagaatctccagcttaggaaaggctgcaagcatgtcgatgagtgtaccggccacaaaggcggacacaatactgtcaatcagtgcctcactgctacgccaagcaaaatcttccaatgcaacaagtatgttaaagtgttcgacaagttctccaactcgaacaggtacaaacgcagacacaccgggaataaacacttcaagtgcaaggagtgttctaagtctttttgtgtcctgtcacagctgacccagcatcggcggatccatacaagggtcaacagctataaatgcgaggagtgcggcaaagccttcaactggtttagcaccttgaccaaacacaaaagaattcacacaggcgaaaaaccttataagtgcgaagagtgcggaaaagcctttaatcagtcctctcagctgacccgtcacaagatcatccacaccgaagagaaacccaacaagtgtgaggaatgcggaaaggcatttaagcaggccagccatttgaccatccacaaaattatccacactggagaaaaaccctacaaatacgaggaatgcggcaaggtttttagccagtcatcccatctcacaactcagaaaatcctccataccggagagaacctctacaagtgtaaggaatgtggtaaagccttcaacctttttagcaacctgactaatcacaaacggatccacgccggggaaaaaccttacaagtgtaaggagtgcggtagagccttcaacatctcctctaacttgaacaaacaggaaaaaatccataccgggggtaaattgaataagtgcgaggagtgcgacaaggccttcaacaggtctcttaagctgactgctcataagaagattctgatggaggagaagccctacaagtgcgaagaatgtggaaaggtttttaatcaattttccaccttgacccgccataagataatccacaccggcgagaaaccttataaatgtaaagaatgcggcaaagcattcaatcagagcagtaacctgacagagcacaagaagatccacacggcggaaaagagctacaagtgcgaggagtgcgggaaggcgtttaatcagcacagtaacctgatcaaccaccgcaagatctatagtggggagaagccgtacaaatgcgaggaatgtgggaaggcatttaaccgcagcagcaccttgacaaggcacaagaagattcatacgggcgaaaagccatacaaatgcgaggagtgcgacagagcattttcccagtcttccaacctgacggagcacaaaaagattcataccggagaaaagccctataaatgcgaagaatgtggcaaggcctttaatcgattctcaactctaacaaagcataaacgcattcacaccggagagaaaccttacaaatgcgaagagtgcggaaaagcattcaaccagagctatcagctgacccggcataagatagttcacactaaagagaaactcaacaagtgcgaagagtttgggaaggctttcaaacagtccagccatcgtacaatacacaaaattatccacactggcgaaaaaccttacaaatgcgaagaacatggcaaggtgttcaaccaatcgagcaacctgaccactcagaaaatcattcataccggtgaaaatctctacaagtttgaggagcacggtaaagcctttaatctgttctccaacattacgaatcataagattatctatacaggcgagaagccccataaatgcgaagagtgcggcaaagcctataaccgcttttccaacctgacaatccacaagagaattcacactggtgaaaagccctaccagtgcgctgaatgtggtaaggcattcaactgttcttcaaccctcaatcggcacaaaatcatacatacaggcgaaaagccttacaagtgcaaggaatgtggcaaggcattcaacctcagctcaacgctgactgctcataaaaaaattcacactggggaaaagccctataagtgcgaggagtgcgggaaagcgttcaaccagtcaagcaaccttactacccataagaaaatccatacgtctgagaaaccctacaagtgcgaagagtgtggaaaatcatttaatcagttttcaagcctgaacatccacaagatcatacacactggggaaaaaccttacaagtgtggggactacggacgcgcttttaatttgagttctaatttaaccacccataagaaaatacacacaggcgaaaaaccctataagtgcgaatacgggaaaacgtag

SEQ ID NO: 211850 - DNA, 2352 bp, synthetic construct
  misc_feature 1..2352: note = Description of Artificial Sequence: Synthetic coding sequence
  source 1..2352: mol_type = other DNA
atggtggccaagccccccgtgatgagcttccacttcgcccaggacctgtggccagagcagaatatcaaagattcttttcagaaagtcacactgagacgctatggcaaatgcgaatatgaaaatctacagttaagaaaagggtgcaagcacgttgacgagtgcaccggccacaaagggggccacaacaccgtcaatcagtgcttgactgctaccccctccaaaattttccagtgcaataagtacgttaaagtgttcgacaagttttctaactctaaccgctataagaggcggcatacaggaaacaagcatttcaagtgcaaggagtgtagcaaaagcttctgcgtgttatcccaactcactcaacacaggagaatccatactagggtgaattcatataagtgtgaagaatgcggcaaggccttcaattggttttccacattaaccaagcacaagcgcattcatacaggtgaaaaaccttataaatgtgaagagtgtggcaaggctttcaatcagagttcacaactaactagacacaagataattcacacggaggagaagcctaataaatgcgaggaatgtggcaaagcttttaaacaggcctcacacttgaccattcataagataatccataccggcgagaagccttacaagtacgaagagtgtggaaaggtgtttagccagtcgtctcaccttacaacccagaaaatactgcatacaggtgagaatttatataaatgtaaggaatgtggtaaagctttcaacctgtttagcaatctgacgaaccacaaaaggatccacgctggggaaaaaccctataagtgcaaggaatgtggcagggccttcaacatttcctccaatcttaataagcaggaaaagattcacactggcggcaaactgaacaagtgtgaagaatgtgataaagcattcaatcggagcttgaagttgacagcacacaaaaagatccttatggaagaaaaaccctataagtgcgaggaatgcgggaaggtgtttaatcagtttagcactctgacgcggcacaagattatccacacaggagaaaagccctataagtgcaaagagtgtggcaaggctttcaaccagagcagtaacctaacggagcataaaaagatccacacagccgagaaatcctacaaatgtgaagagtgcgggaaggcgtttaaccaacattccaatctcatcaatcaccgcaaaatttattctggggagaagccctataaatgcgaggagtgcgggaaagctttcaatagaagctccaccctgacacggcacaaaaaaattcacacaggagagaagccatataagtgtgaggagtgcgatagggctttttcccaaagtagcaaccttactgaacataagaagattcatacaggtgagaaaccctacaagtgcgaggaatgtgggaaagcattcaatagattctcaactctgacaaagcacaagagaattcacacgggagagaagccttataaatgcgaagaatgcggcaaagcatttaaccaaagttatcaactaaccagacataaaatcgttcacaccaaggaaaaactcaacaaatgtgaagaatttggtaaagcctttaaacaatctagtcaccggaccattcataagatcatacacacgggggaaaagccctataagtgtgaggagcacggcaaggtcttcaaccagtcgagcaatctgaccacacagaagataattcatactggagaaaacctatataagtttgaggaacacgggaaggcctttaatctcttctctaacatcactaatcacaagataatctatactggagagaaaccccacaaatgtgaggaatgcggaaaagcatataacaggttctcaaatctcactatacacaagcggatccatacaggcgaaaagccgtatcagtgcgccgagtgcggaaaggctttcaattgttcatctactctcaaccggcacaagatcatccacactggggaaaagccctacaaatgcaaggaatgcggtaaagctttcaatttaagctctactctgacggctcataagaagatccacacaggtgaaaagccgtacaagtgtgaagaatgcggcaaggcttttaatcagtctagcaacctcacgacccataaaaaaatacatactagtgagaagccctacaaatgtgaggagtgcgggaagtccttcaatcaattctcaagccttaatattcacaagatcatacacactggagagaaaccctacaagtgtggggattatggaagagcttttaacctgagcagtaacctcacaacccataagaagattcacaccggtgagaaaccttacaaatgtgaatatgggaagacctag

SEQ ID NO: 211851 - DNA, 453 bp, synthetic construct
  misc_feature 1..453: note = Description of Artificial Sequence: Synthetic coding sequence
  source 1..453: mol_type = other DNA
atggtggccaagccccccgtgatgagcttccacttcgcccaggacttgtggccggagcagaatattaaagatagctttcagaaggtaacattgaggagatatggcaaatgcgaatatgagaacttgcagctgagaaaaggctgcaagcatgtcgacgaatgtacaggccacaaagggggacataatacagtaaatcagtgcctaaccgccaccccttctaaaatcttccagtgcaacaaatacgtgaaggtgtttgataaattctccaacagtaacaggtacaagcggcgtcatactgggaataaacactttaaatgcaaggagtgctctaaaagtttttgtgtcctgagccaacttacacaacacagacgcatccatacaagggtgaactcctataaatgtgaggaatgcggaaaggcaataatcatctgttccgattttacccagcattag

SEQ ID NO: 211852 - DNA, 1254 bp, synthetic construct
  misc_feature 1..1254: note = Description of Artificial Sequence: Synthetic coding sequence
  source 1..1254: mol_type = other DNA
atgagccaggacagcgtgaccttcgccgacgtggccgtgaacttcaccaaagaggaatggaccttgctagaccccgctcagagaaacctttatcgcgacgtgatgctggagaattcccgaaatctggcattcatcgactgggcaactccatgtaagaccaaggatgcaacgccccagcctgacatcctcccaaaacgaacgtttccggaggccaaccgcgtctgcctcacatcaattagtagtcagcattccactctgcgcgaagactggcgctgtcctaagacagaggaaccgcaccggcagggagttaacaacgtaaaaccccctgcagtagcccccgagaaagatgagtccccagtatccatttgcgaggatcatgagatgcgaaaccactccaagcctacctgccggctcgtaccctcccaaggtgactcaataaggcagtgcatcttgacaagagacagttcgatcttcaagtacaaccccgtcctaaacgatagtcagaaaacacacgagaacaacgaggatgacggcgttttgggctggaatatccaatgggttccctgcggacgaaagaccgagcttaaatccagcacatggaccggcagtcaaaacaccgtccatcatatccgcgacgaaatcgacaccggtgccaacaggcatcagcgcaaccctttcgggaaagctttccgtgaagatgggagcctgcgagcccacaacacacatggccgggagaaaatgtatgatttcacacaatgtgaaaacacatcgcggaataatagtattcacgccatgcaaatgcagctgtacactgcagagacaaacaaaaaggactgtcaaacaggggccacaagcgccaacgccccgaactctggaagccacaaatctcactgtacaggggagaaaacacacaagtgcccggaatgtggcagagccttcttctaccagagcttcctgatgaggcatatgaagatacatacaggggagaagccctatgaatgtggcaaatgtggcaaagcctttaggtactctctccaccttaataaacatctgagaaaacacgtggtccagaagaagccctatgaatgtgaggaatgtggaaaagtaattcgcgagtcatccaaatacactcacattaggagccacacaggtgagaaaccttataagtgtaagacctgcggcaaggacttcgctaagtctagtggtctgaaaaaacatctgaaaacacacaaggacgagaagccatgcgaatag

SEQ ID NO: 211853 - DNA, 1254 bp, synthetic construct
  misc_feature 1..1254: note = Description of Artificial Sequence: Synthetic coding sequence
  source 1..1254: mol_type = other DNA
atgagccaggacagcgtgaccttcgccgacgtggccgtgaacttcactaaggaggaatggaccttactcgacccagcacagcgcaacctctacagagacgtaatgctcgagaactcacggaatttggccttcattgactgggccacaccatgcaagaccaaagacgccactccacagcctgacatactgccaaaaaggactttcccagaggccaaccgggtgtgtctgacgtcaatcagctctcagcactcgacccttagggaagattggcgttgcccaaagactgaggagccgcacaggcaaggggtcaacaacgtgaaaccccccgccgttgcccctgagaaagatgagtcccctgtgtccatttgcgaagatcacgaaatgcgaaatcatagtaaaccgacttgtaggttggtgccatctcagggcgattccatccggcagtgcattctcacacgggacagctccatctttaaatataacccagtcctgaacgattctcaaaaaacacatgagaataatgaggacgatggcgtgctggggtggaacattcagtgggttccttgcggcaggaaaacagagctgaagtcctcaacatggactgggtctcagaacaccgtgcatcacattagagacgagattgatacaggggccaataggcaccagcgcaacccatttgggaaagcatttcgggaggacggatcccttagggctcataacactcacgggcgagaaaagatgtacgattttacccagtgtgaaaacacaagtaggaataatagcatccatgcgatgcagatgcaactgtacaccgccgagacaaataagaaggattgtcagactggcgcaacatcagcaaatgcccctaattctggctcccacaagagccactgtaccggggaaaagacacacaagtgtcctgagtgtgggcgggcctttttctatcagagttttctgatgagacatatgaagattcataccggagagaaaccctacgagtgtggcaagtgcggaaaagccttccgctacagtctgcacctaaataaacaccttcgtaaacacgtggtccagaagaagccctacgagtgtgaggagtgtggcaaagtcatccgtgaatccagtaagtacacccacatcagatcccacacaggtgaaaagccatataagtgcaagacatgtggaaaagatttcgccaagagttcgggcctgaaaaagcaccttaaaacccataaagatgagaagccctgcgaatag

SEQ ID NO: 211854 - DNA, 1452 bp, synthetic construct
  misc_feature 1..1452: note = Description of Artificial Sequence: Synthetic coding sequence
  source 1..1452: mol_type = other DNA
atgaagcggcacgagatggtggccaagcacctggtgatgttctactatttcgcccagcacctttggcctgagcagaacatccgtgattcctttcagaaggtcactctacgtcgttaccggaaatgtggatatgaaaacctgcagctcagaaagggctgtaaatcagtcgtggagtgcaagcagcacaagggcgactacagcggtctgaatcaatgcctgaagaccactctgagtaaaattttccaatgcaataaatacgtagaagtgtttcacaagatttcaaatagcaacaggcacaaaatgcggcacaccgagaacaagcactttaaatgtaaggagtgcagaaagaccttttgtatgctaagccatctaacccagcataagcgaatccaaacgagggttaatttctacaagtgtgaggcgtatggccgcgcattcaattggtccagcacccttaacaagcataagcggatccacaccggtgagaagccgtacaagtgcaaggaatgcggtaaggcttttaaccagacatcgcatctgattagacataaacggattcacaccgaggagaagccgtataagtgcgaagaatgcgggaaggcttttaaccagagctcaacactgactacccacaacataattcacactggcgaaatcccttataaatgtgagaagtgtgtgcgcgccttcaaccaggccagcaaactgaccgaacataaactgattcacactggagagaaaagatacgagtgcgaagaatgtggaaaggcatttaaccgatcctccaagttaaccgaacacaagtacattcatacgggtgaaaagctgtacaaatgtgaagagtgcggaaaagcattcaatcaatcaagcaccctcactacacataaaaggatccatagcggagaaaagccatacaagtgcgaggaatgcggcaaggcgttcaagcagttcagcaatctcaccgatcacaaaaaaatccatacaggcgagaagccttacaagtgcgaggagtgcggcaaggcattcaatcagcttagcaacctgactcggcataaggtcattcacaccggcgaaaagccatataaatgtggcgagtgtggaaaggcctttaatcagagcagcgctttgaacactcacaagattatccatacaggggagaacccccacaagtgtcgagaatctggtaaagtcttccatctgtcctccaagttgtctacctgtaaaaagattcatacaggcgagaagctgtacaagtgcgaagagtgtggcaaagccttcaatagatcctccactctgataggtcataagagaatccacacaggtgagaaaccatataagtgcgaggagtgcggcaaagcttttaatcagagtagcacccttacaacacacaaaattatccacacagaggagaaacagtacaaatgcgatgagtgcggaaaagcctccacatag

SEQ ID NO: 211855 - DNA, 1152 bp, synthetic construct
  misc_feature 1..1152: note = Description of Artificial Sequence: Synthetic coding sequence
  source 1..1152: mol_type = other DNA
atgaagcggcacgagatggtggccaagcacctggtgatgttctactacttcgcccagcacctgtggcccgagcaaaatatacgcgactctttccagaaggtcacgctccgtcgttatagaaagtgcggctacgagaatttgcaattgaggaaagggtgtaagagtgtggttgaatgcaagcagcacaaaggcgattattctggtttaaaccagtgtctgaaaaccacactgtccaaaatttttcagtgtaataaatatgtggaggtgtttcacaagatttctaactcaaacaggcacaagatgcggcacactgaaaacaagcacttcaaatgcaaagaatgccggaagactttttgtatgctaagccatttgacacaacacaagagaattcagactcgagttaatttctacaaatgtgaggcctacggacgggcattcaattggagctccacactgaataaacataaacgtattcataccggtgaaaaaccctataaatgtaaagaatgcgggaaggccttcaatcagaccagtcatttgataagacataaacgcatacacacagaagagaagccttacaaatgtgaggagtgtggtaaagctttcaaccagtcaagtactctgacaacccacaatatcattcacactggtgagatcccatataagtgcgagaaatgtgtgagagccttcaaccaggctagtaagttgacagagcataagctgatacacactggggagaagagatatgaatgcgaggaatgcggaaaagcatttaatcgatcatcgaaactgaccgagcataagtacattcacactggggagaagctctataagtgtgaagaatgtggcaaagcctttaatcagagctcaacactcacaacacacaagcggattcactcaggagaaaagccctacaagtgcgaagagtgtgggaaggcctttaagcaattctccaaccttaccgaccacaaaaaaatccatacgggagagaaaccttataaatgtgaggagtgcggtaaagccttcaaccaacttagcaacctgacacgacacaaggtgatacacactggcgaaaagccatacaagtgcggggagtgcggcaaggctaacttaagttcaacgcttacaccacacaaaacaatccacatctag

SEQ ID NO: 211856 - DNA, 1368 bp, synthetic construct
  misc_feature 1..1368: note = Description of Artificial Sequence: Synthetic coding sequence
  source 1..1368: mol_type = other DNA
atgctggagaactacagcaacctggtgagcgtgggctaccacatcattaagccagatgtgatctctaagctggaacagggagaggagccttggatcgtggagggcgagtttttactgcagtcatatcccgatgaagtatggcagacagatgatctcattgagaggattcaggaggaggagaacaaaccctcccggcagaccgtttttatcgagacactgatagaggagagagggaatgttccgggtaaaacgttcgatgttgagacaaaccccgtgccttcacggaaaatcgcttacaaaaacagtctgtgtgactcctgcgaaaaatgcctcacaagcgtgtccgagtacatttcctcggacgggtcatatgcaagaatgaaagctgacgagtgtagcggttgcggcaagtccctactccatataaaactagagaaaacccatccgggcgatcaggcatacgagtttaaccaaaacggggaaccatacactctgaatgaggaaagcctgtatcagaaaatacggatccttgaaaagcccttcgagtacattgagtgccagaaagcattccaaaaggatactgtttttgtgaaccacatggaggagaagccttacaaatggaacggaagtgaaatagctttcctgcagatgtctgacctgacagtgcaccaaacatcacatatggagatgaaaccatatgaatgcagcgagtgtggaaagtctttttgcaagaaaagtaagttcatcattcaccagagaacccatactggggaaaaaccgtacgaatgtaaccagtgcggtaagagtttctgtcagaagggcacactcacagtgcatcaacgcacgcacacgggagagaagccctatgagtgcaatgagtgtggaaagaacttctaccagaaactccatcttattcagcatcagcgcacgcacagtggcgaaaagccttacgaatgcagctactgtgggaagtccttctgccagaaaactcatctgacacagcaccaaaggacgcactctggcgaaaggccttatgtttgtcacgactgcggaccatcaagacgttcccagcatctcatgcatcagaagattcacacaggtgtcaagctgtataaatgtagtgagtgtggcaaatgcttctgtaggaagtctacccttacgactcaccttcggacccataccggcgagaaaccgtacgaatgcaacgagtgtgggaagttcttttccagactgagctacctcacagtccattatagaacacacagcggcgagaaaccgtacgaatgtaatgagtgtgggaagaccttctaccttaactctgcgctgatgcgccaccagcgggtacacactggcgagaaaccatactag

SEQ ID NO: 211857 - DNA, 1980 bp, synthetic construct
  misc_feature 1..1980: note = Description of Artificial Sequence: Synthetic coding sequence
  source 1..1980: mol_type = other DNA
atgaacaagagcctgggccccgtgagcttcaaggacgtggccgtggactttactcaggaagaatggcaacaacttgaccccgaacagaaaattacttaccgcgacgtcatgctggagaattattccaacttagtgagtgtgggttaccacattatcaaaccggatgttatatccaaactcgagcagggcgaagagccatggatagttgaaggggagtttttgttgcagagctatcctgacgaagtttggcagacagacgatctaattgaacgcatacaagaggaggagaataaaccatcacggcagactgtcttcatcgaaaccctgattgaagagcgcgagtatatttcttctgatgggtcttacgcgaggatgaaggcagacgaatgttcgggatgcggaaaatccttattgcatatcaaattagagaagacacatcccggagaccaggcctacgagttcaatcagaacggtgagccttatactctaaacgaggaaagtttatatcagaagattcgaattttagaaaaacctttcgagtacatcgaatgtcagaaagcctttcagaaggacacagtttttgttaatcacatggaagagaagccatacaagtggaacgggagcgaaattgctttcctacagatgtccgatttgacagttcatcagacttctcacatggaaatgaagccttacgagtgctctgaatgcggaaagtctttttgtaagaagtcaaaattcataatccatcaaagaacccataccggcgagaagccatatgaatgtaaccagtgcggcaagtccttctgccaaaagggtactctcaccgtccatcaaagaacccataccggagagaagccatacgaatgcaacgaatgcggcaaaaatttctatcagaagttacacctgatccaacatcagcgaactcattccggggaaaagccgtatgaatgctcatattgcggcaagagcttttgccagaaaacacatttaactcaacaccaaagaacacactccggagaacggccctacgtgtgccacgactgcggcaagaccttcagccagaaatccgcacttaacgaccaccaaaaaatccacactggagtgaaactctacaagtgctctgaatgtgggaaatgcttctgccgaaagagtaccctaaccacacatcttcgtacccacaccggggaaaagccatacgaatgcaatgagtgcggaaaattttttagtaggttgtcttatctgactgtccattaccgaactcattccggcgaaaagccgtacgaatgcaatgagtgtggcaagacattctatctcaatagcgcgctgatgaggcatcagcgagtgcacaccggcgagaagccctacgaatgcaatgaatgcggcaagctcttcagtcaactgtcatacttaactatccatcataggacccacagcggtgtgaagccctatgagtgctccgaatgtggaaagactttttatcagaattcagcgctctgccgccaccgacgtatccacaagggcgaaaaaccgtatgaatgttacatctgtggaaagtttttcagtcagatgagttaccttacaatacaccaccggatccactctggtgagaaaccctacgagtgctcagagtgcggtaaaacattttgccaaaactcagccttaaacagacatcaaaggacccacacgggagagaaagcatatgagtgttacgagtgtggcaagtgcttttctcaaatgagctatctcactatacaccacaggattcactcaggcgagaaaccattcgagtgtaatgagtgcggcaaggcgtttagccggatgtcatatctgaccgtgcactataggacacacagcggggaaaaaccttatgagtgcacggaatgcggcaaaaagttttatcacaagtccgcattcaattcccaccagcgcattcataggcgaggtaacatgaacgtgatcgacgtaggacgcttgctatag

SEQ ID NO: 211858 - DNA, 2268 bp, synthetic construct
  misc_feature 1..2268: note = Description of Artificial Sequence: Synthetic coding sequence
  source 1..2268: mol_type = other DNA
atgcgggccaccgccctggtgcggtggaccggccgggacctggcctctcgaagagctccagcaaccgccattcccccccgacccgtgggttccggcggagccgaagctgccgaaccccaggaggacttgccacctctttcccaatcatctaggtttttccaggaacagcaaaaaatgaataaaagcttaggtccagtctccttcaaagacgtcgctgtggattttactcaggaagagtggcagcagctggatccagaacagaaaataacctatagagatgttatgttggaaaactacagtaacctggtgtccgtgggctatcatattattaagcctgacgtcatatctaagctcgaacaaggcgaggaaccttggatcgtggaaggtgaattccttctgcagtcttatcctgatgaggtctggcaaacagacgatcttatcgagcggatacaggaagaggagaacaaaccaagtaggcagacagtcttcattgagacgttgatagaggagcggggcaatgtccctgggaaaacttttgacgtggagaccaaccctgttccatctcgaaaaatcgcttacaaaaattccctctgcgattcctgtgagaaatgcctcacctcagtcagcgagtacatctcctccgacggatcatacgctcgcatgaaagctgacgaatgttctggctgcgggaaaagtctgctgcacatcaagctcgagaaaacacatcccggggatcaggcctacgagtttaatcagaatggtgagccctatactctaaatgaagaatcgttgtaccagaaaattagaattctcgagaagcctttcgaatacatcgagtgccagaaggctttccagaaggatacggtctttgttaaccacatggaggagaagccatacaaatggaacggatcagagattgcgttcttgcagatgagcgatctcaccgtacaccagacgagccatatggagatgaagccctatgagtgtagtgagtgcggaaagtccttctgtaagaagagcaaatttataatccatcagaggacccatacaggtgaaaaaccctacgaatgcaatcagtgcggcaaatccttttgccagaaaggaaccctgaccgtacaccagaggacccatactggagagaagccgtatgagtgtaacgaatgcggtaagaatttctaccagaaactgcacctgattcagcatcaacgcactcacagcggtgagaagccatacgaatgctcctactgcggtaagtctttttgccagaagacccatctcacccagcatcagagaacccattctggagaaaggccttatgtgtgccatgattgtggtaagacctttagccaaaagtcggccctgaacgatcatcaaaaaattcacactggagtgaagttgtacaaatgctccgaatgtggaaagtgcttctgccgaaagtcaactctgacaacccacttgagaacccacaccggggagaaaccatatgagtgtaatgagtgcggcaagtttttttcccggctgtcctatctaaccgtccactatcgtacccatagcggcgagaagccatacgaatgcaacgagtgcggtaagacgttttaccttaactcagccctgatgaggcaccagagagtgcataccggcgagaagccttacgagtgtaatgagtgtggcaagctgttctctcagctttcttatctgacaatccatcatagaacacattctggtgttaaaccatacgagtgctcagagtgcggtaaaaccttttatcagaactctgcactatgtcggcaccgcagaattcacaaaggcgaaaagccctacgagtgttatatctgtggcaaattctttagccaaatgagctacctgacgatccaccacaggattcattccggagagaaaccatatgaatgtagcgaatgcggaaaaaccttctgccaaaactccgccttaaatagacatcaacgcacacatacaggtgagaaagcctacgagtgttatgagtgcgggaaatgtttttcacagatgtcatacctgacaattcaccaccgaatccacagcggggagaagccgtttgaatgcaacgagtgtggaaaagctttctctagaatgtcttaccttacagtccactataggacacattcgggtgagaagccttatgagtgcacggaatgcggtaagaaattttaccataaatccgcttttaattcccaccagcgaatacatcgacggggcaatatgaacgtgatagatgtgggcaggctgctatag

SEQ ID NO: 211859 - DNA, 2094 bp, synthetic construct
  misc_feature 1..2094: note = Description of Artificial Sequence: Synthetic coding sequence
  source 1..2094: mol_type = other DNA
atgaacaagagcctgggccccgtgagcttcaaggacgtggccgtggactttactcaggaagaatggcaacagctggacccggaacagaagatcacttacagagacgtgatgctggagaattactctaatctggtgagtgtgggatatcacatcataaaacccgacgtgatatcaaagcttgaacaaggtgaagagccatggatcgttgaaggggagttcctgttacagtcctacccagatgaggtctggcagacagatgacctgatcgagcggattcaggaagaagaaaataagccgagtcgtcagacagtgttcatagagaccctcatcgaagaacgcgggaacgtgccaggaaaaactttcgacgtagagactaatcccgtaccatctcggaaaatagcttataaaaattcactatgtgactcttgcgaaaagtgtctaacttcggttagtgagtatatctcgtcagatggatcgtacgctcgtatgaaagcagatgaatgctctggatgtggcaaatcccttttacacataaagctggagaagactcacccaggggatcaggcgtacgaatttaatcagaatggagaaccgtacacactcaacgaggagtccctctaccaaaagatccgaatacttgagaaacctttcgagtatatcgaatgccaaaaggcatttcagaaagacacagttttcgttaaccatatggaagagaagccatacaaatggaacggtagcgagatagcctttttacaaatgtcagatttgaccgtgcaccagacgtcacacatggagatgaagccttacgagtgctcagagtgtggtaaatccttctgtaaaaagagcaaatttatcatccatcagaggactcatactggggaaaagccctacgagtgtaaccaatgtggaaagtctttctgccagaaaggcaccttgacagtgcatcagcgcacccacaccggagaaaagccgtacgagtgtaacgagtgcggcaagaatttttatcagaagttgcatctcatccagcaccagcgcacgcacagcggtgaaaaaccctacgaatgttcctactgcggcaagagcttctgtcaaaaaactcacctgactcagcaccagcgcacacactcaggggagcggccgtacgtgtgccatgactgcggtaaaaccttcagccagaaatccgccctcaacgaccaccagaagatacacacaggtgttaagttgtacaaatgctctgagtgcggtaaatgcttttgccgaaagagcacactgacgactcatctgcgtacacacacaggggagaaaccctacgaatgcaatgaatgtgggaagttcttctccaggctctcttacctgacggtacattacaggacccacagcggggagaagccatacgagtgtaacgagtgtgggaagactttctacctgaattctgcactgatgcgccatcagcgagtgcacaccggggaaaaaccatacgagtgtaatgaatgtggtaagttattctcccagcttagctacttgaccattcaccatcgcacacatagtggcgtcaagccttatgaatgctcagaatgcggcaagaccttctaccagaactcagccctctgccggcacaggcgcattcataagggcgaaaaaccctacgagtgttatatctgtggcaagtttttctcgcagatgagttatttgaccatacaccataggatccacagcggcgagaagccatatgagtgttccgagtgcgggaagacattctgtcaaaattcagccctgaataggcaccaacgaactcatacaggcgagaaagcctacgagtgctacgagtgcgggaagtgtttcagccagatgtcatacttgaccatccatcataggattcattctggagaaaagccctttgaatgtaacgaatgcggcaaagccttcagccggatgtcctatctgaccgtccactaccggactcatagcggtgagaaaccttatgagtgtacagagtgtggtaagaagttctaccataagtcagctttcaatagccatcaacgaattcacaggagaggtaatatgaacgtgatcgatgtgggcagactgctgtag

SEQ ID NO: 211860 - DNA, 1173 bp, synthetic construct
  misc_feature 1..1173: note = Description of Artificial Sequence: Synthetic coding sequence
  source 1..1173: mol_type = other DNA
atggccgagatccacaacggcggcgagctgtgcgacttcatggagaacggggagattttcagtgaacattcgtgtctgaacgcccacatggggactgaaaacactggtgatacctacgattgtgatgagtacggagagaattttcccatgttgcacaactcagctcctgccggcgagaccttgtctgttttgaatcagtgccgtaaggctttcagcctgcccccgaatgtgcaccaacgcacctggattggggacaaatcttttgagtactcggactgtgaggaggcctttgtcgaccagtctcatttacaggctaatagaattacacataacggggagacgctctacgaacagaaacagtgcggccgtgcctttacatactcaacatcgcacgcagtcagcgtgaagatgcacacagtggagaaaccttacgagtgtaaggaatgcggcaaattctttagatatagctcctacctgaattcgcatatgaggacccacaccggcgagaagccgtacgagtgcaaggagtgcggtaaatgcttcacggtgagctcacacctggtggagcatgtgcgaattcataccggcgaaaagccttatcagtgcaaagagtgcgggcgggcctttgcaggccgttccggcttaactaagcacgtgagaatccacaccggcgagaagccatacgaatgcaatgaatgcgggaaggcctacaatcgcttctacctgctaactgagcactttaagacccataccgaggaaaaaccattcgagtgtaaggtctgcggcaagtccttccgaagctcctcatgtctgaagaaccattttcggattcataccggcatcaagccttataagtgcaaagagtgtgggaaagcctttactgtctctagctcgttgcacaaccacgtgaagatccacacaggggagaaaccttatgaatgcaaggattgtggtaaggcattcgctacctcatcccaactaatcgaacacatccggactcacaccggtgagaagccatacatctgtaaagagtgcggtaaaactttccgcgcctcctcccacctacagaaacatgttcggatccacaccggagagaagccatatatctgtaacgagtgcgggaaggcctataaccggttttatctattaacaaaacaccttaaaacccactag

SEQ ID NO: 211861 - DNA, 1032 bp, synthetic construct
  misc_feature 1..1032: note = Description of Artificial Sequence: Synthetic coding sequence
  source 1..1032: mol_type = other DNA
atggccgagatccacaacggcggcgagctgtgcgacttcatggagaacggggagatcttcagcgagcacagctgcctgaacgcacacatgggtactgagaacaccggcgatacctatgattgtgatgagtatggtgaaaactttccaatgctacataacagcgccccagccggggaaactctgagtgtcctgaatcagtgtcgcaaagctttttcactgcctccgaacgtacaccagagaacttggataggtgataagtctttcgaatacagtgattgcgaggaagcttttgtagaccaatcacacctgcaggcaaacaggattacccacaacggggagacactctatgaacagaaacaatgtgggagggccttcacctattccacgagccatgcggtctctgtgaaaatgcataccgtggaaaaaccttatgaatgcaaagaatgcggaaagtttttccgctactcatcctacctgaactctcacatgcggactcacacaggagagaaaccctacgaatgcaaggagtgcggaaagtgcttcaccgtgtccagtcacctcgtggagcatgtgcgtatccataccggcgagaagccttaccagtgtaaagagtgtggtagagccttcgccgggcggtctggcctgaccaagcacgtaaggatccatactggggaaaaaccctatgagtgcaacgagtgtgggaaggcatataatcgcttttacttgctgaccgagcatttcaagacacacactgaggagaagcccttcgagtgcaaagtgtgcggtaaaagcttcagatctagctcctgccttaaaaaccatttcagaatccacaccgggatcaagccatacaagtgcaaagagtgtggcaaggctttcactgtgagcagctccctccataaccatgtgaaaatacacaccggagagaagccgtacgagtgtaaagactgcggcaaggcattcgccacctctagtcaactaatcgagcacatccgcacccatacttgtaacccttccacactgaggggatag

SEQ ID NO: 211862 - DNA, 870 bp, synthetic construct
  misc_feature 1..870: note = Description of Artificial Sequence: Synthetic coding sequence
  source 1..870: mol_type = other DNA
atgagcggccaccccggcagctgggagatgaacagcgtggccttcgaagatgtagcagtaaatttcactcaagaggaatgggccttgctcgacccctctcaaaaaaacctctaccgcgatgtcatgcaggagacttttcgcaacttagcttcaattggcaataaaggcgaagaccagtcaatcgaagatcagtataagaactcatctcgcaacttaagtagctttcagatacaccagcgcaaccataccggcgagaagccctatgagtgcatggagtgtggcaaggccctgggattctcccgctctttaaaccgacataagaggattcataccggggagaagcgctacgagtgcaaacagtgtgggaaggctttttcacggagcagccacctgagggatcacgagcgaacccacaccggcgagaagccatacgaatgtaaacattgtggcaaggctttcaggtattcaaactgtctccattaccatgagagaacacacacaggtgaaaagccttacgtgtgcatggagtgcggaaaggctttctcatgcctgtccagtctacagggacacataaaggcacacgccggggaggagccatatccctgtaagcagtgtggaaaagccttccgctacgcttcttcgttacagaagcacgagaaaactcacatcgcacagaagccatatgtctgcaataattgtgggaaaggattcagatgctcatcctccctcagagatcacgagagaacccacaccggtgaaaagccctacgagtgtcagaagtgtggcaaagctttttcacgcgcgagtacgctgtggaagcacaaaaagacacacaccggggaaaagccatataaatgtaagaagatgtag

SEQ ID NO: 211863 - DNA, 939 bp, synthetic construct
  misc_feature 1..939: note = Description of Artificial Sequence: Synthetic coding sequence
  source 1..939: mol_type = other DNA
atgcccaacttcaacctgaacaagaagatccccgcccgggtgaagcctcacgaatgtattgtctgtgagaagttttttatacggcatagcagcctacaccgccatattatctcacactccggcaataatccatacggatgcgaggagtgcgggaagaaaccttgtacctgtaagcaatgccagaaaacctcgctctctgtaaccagggtccatcgggataccgtcatgcataccggcaatggccattatggttgtaccatttgtgaaaaagtgttcaacatcccgagcagttttcagatccatcagcgcaatcacactggggaaaaaccttacgagtgcatggagtgcggcaaggccttggggttctctaggtccctgaatcgccacaaaaggatacatacaggggaaaagagatatgagtgcaagcagtgtggaaaggcatttagtcggtcctcgcacctgcgggatcacgagcgaactcacacgggggagaaaccctatgaatgtaagcattgcggaaaggccttccggtattctaactgcctgcattatcacgagaggacccatactggtgagaaaccttacgtttgcatggagtgcggcaaagctttctcatgtctgagcagtctgcagggccacataaaagcacatgcgggggaggaaccctacccttgcaaacaatgcgggaaagcattcagatacgcaagctctcttcaaaagcatgagaagactcatatcgctcagaagccatacgtttgtaacaattgcggaaaaggtttcagatgtagctcttccctgagggaccacgagcgcacgcacacaggagagaaaccatatgaatgccagaagtgtggcaaggcctttagccgggcctccacgctctggaagcacaaaaaaactcacaccggtgagaaaccctacaagtgtaagaaaatgtag

SEQ ID NO: 211864 - DNA, 468 bp, synthetic construct
  misc_feature 1..468: note = Description of Artificial Sequence: Synthetic coding sequence
  source 1..468: mol_type = other DNA
atgaacgccctgtgcgtgaagaacagcagctaccacagcagcctgcacaggcatattatctctcattcaggaaataacccatatggctgcgaggagtgcggaaaaaaaccttgcacttgtaagcagtgccagaaaacaagcctgtcagttacgcgagtacatcgggataccgtcatgcacactggcaacggccactatggctgcaccatttgtgagaaggtctttaatattccgagtagcttccagatccaccagcgcaaccacacaggtgagaagccatacgagtgcatggagtgtgggaaggcattaggctttagcagaagccttaatagacacaaacgtatacacaccggagagaaaaggtacgagtgtaaaaagtgcggcaaggcgttcagcagggcatctactctttggaagcacaagaaaacacataccggagaaaagccttataaatgcaagaagatgtag

SEQ ID NO: 211865 - DNA, 888 bp, synthetic construct
  misc_feature 1..888: note = Description of Artificial Sequence: Synthetic coding sequence
  source 1..888: mol_type = other DNA
atgaacgccctgtgcgtgaagaacagcagctaccacagcagcctgcataggcacatcatctcccattcgggcaataacccgtatggttgtgaggaatgtggcaaaaaaccttgcacctgtaaacagtgccagaagacctcactctctgtcactcgcgtgcatagggacactgttatgcatactgggaacggccattacggctgcaccatctgtgagaaagtgttcaatatcccatcaagtttccagatccatcagcgtaaccataccggtgagaaaccgtatgagtgcatggaatgtggcaaggcactcgggttctctagaagcctcaacagacacaagcgcatacacacgggtgagaagcgttacgagtgcaagcagtgtggaaaagccttcagtaggtcctcgcacctcagagaccacgagcggactcatacaggcgaaaaaccctatgagtgcaagcactgtgggaaagcttttagatattcgaactgcctgcactatcacgagcgaactcacactggagaaaagccatacgtgtgcatggaatgcggtaaagcgtttagctgtctgtcctccctgcagggacacataaaagctcacgccggagaagaaccatacccctgcaagcagtgcggcaaagcctttaggtacgcttcatccctgcaaaagcacgagaagacacacatcgcgcagaagccgtacgtgtgcaacaactgcggcaaaggcttccggtgttcttcttctcttagggatcacgagcgcacccacactggtgaaaagccctatgagtgccagaaatgtggcaaagccttctcccgtgcatcaacactatggaagcacaagaaaactcataccggagagaagccatataagtgcaaaaagatgtag

SEQ ID NO: 211866 - DNA, 222 bp, synthetic construct
  misc_feature 1..222: note = Description of Artificial Sequence: Synthetic coding sequence
  source 1..222: mol_type = other DNA
atgagcggccaccccggcagctgggagatgaacagcgtggccttcgaggacgtggccgtaaactttactcaggaggagtgggccctgctcgatccatcacagaaaaacctatatcgggatgtcatgcaagagacctttcgtaatttagcgtctattggcaacaaaggcgaggaccagagtatcgaggaccagtataagaattcatcacggaacttaagatag

SEQ ID NO: 211867 - DNA, 1770 bp, synthetic construct
  misc_feature 1..1770: note = Description of Artificial Sequence: Synthetic coding sequence
  source 1..1770: mol_type = other DNA
atggaggccgaggagaccatggagtgcctgcaggagttccccgagcaccacaaaatgatattagacaggctgaacgaacaaagagaacaggatcgctttacagacattacccttattgtggacggccatcactttaaggcccataaggcggtcctggccgcttgtagcaaattcttttataagttctttcaggaattcacacaagaaccactggtcgaaatagagggagttagcaagatggccttcaggcatttaatcgagttcacatacactgcaaagctaatgatacagggcgaggaggaagcaaatgacgtgtggaaggcagccgagtttctccagatgctagaagctattaaagctttggaggtccgaaacaaggagaattccgcgccactggaagaaaacaccaccggaaaaaacgaagcaaagaagcgtaaaatcgctgagacaagcaacgtcattaccgagtccctgccatccgcggaatctgagccagtggaaatagaggtggaaattgctgaaggaacaattgaggtagaggacgagggaattgagaccttggaggaagtcgcttcggccaaacagagcgtgaagtacatccagtctaccggtagcagtgatgattccgcgctggcccttctcgcagacattaccagcaaatataggcagggcgatagaaaggggcagataaaggaagacggttgcccttcagacccaacctctaaacaggagcatatgaaaagccactcgaccgagtctttcaagtgtgagatctgcaataagaggtatcttagggagtctgcttggaaacaacacctaaattgttatcatttggaggagggaggggtcagtaagaaacagagaacaggcaagaagatccatgtttgtcagtactgtgagaagcagtttgatcactttgggcacttcaaggaacacctgcgtaagcataccggcgaaaaacccttcgaatgcccaaactgccatgaaagattcgctcggaactcaacattgaaatgccatctgacggcatgtcaaacaggggtcggggctaagaaggggcggaagaaactatacgaatgtcaggtctgcaattcagtattcaattcttgggatcagtttaaggaccacctggtcatacacactggtgacaaacctaatcactgcacactgtgcgatctgtggtttatgcagggcaatgagctcaggcgtcatctctccgacgctcataacatcagtgagcgtctggtgaccgaggaagtgctgtccgtcgaaacacgggtccagactgaaccagttaccagtatgaccattattgagcaggtcgggaaggtacatgttctgccgctattacaggtgcaagtggatagcgcccaagtgacggtggagcaggtccaccctgatctgcttcaggatagccaggtacacgattcgcatatgtctgaactgcccgaacaggtgcaggtatcgtacctcgaggtcgggcgtatccagaccgaagagggaactgaggtgcatgtggaagaactacacgtagagagggtaaatcagatgcccgtagaggtacagactgagctgctagaggcagatctggatcacgttacgcctgagatcatgaaccaggaagagcgcgagtcatcccaagctgacgccgccgaggctgcacgcgaggaccatgaagacgcagaggatctggagactaagcccacggttgactccgaggccgaaaaggcagagaacgaggaccggaccgcattgcccgtgctggagtag

SEQ ID NO: 211868 - DNA, 1872 bp, synthetic construct
  misc_feature 1..1872: note = Description of Artificial Sequence: Synthetic coding sequence
  source 1..1872: mol_type = other DNA
atggaggccgaggagaccatggagtgcctgcaggagttccccgagcaccataaaatgatccttgatcgcctgaacgaacagagggaacaggaccgcttcacggatatcactctgattgttgatggacaccatttcaaggcccacaaagcggtgttggccgcctgctcaaagttcttctataagttctttcaggagtttacccaagaacccctcgtggaaattgagggagtttctaaaatggcctttagacatttaattgagttcacctacacggcaaagttgatgatccaaggagaagaagaggccaatgatgtgtggaaggcagcagagtttctccagatgcttgaagccatcaaggccctggaggtgcgcaacaaggagaactccgccccattggaggaaaataccaccgggaaaaacgaagccaaaaaaaggaaaattgcagaaacttctaatgtcataacggagagcctgccatccgcagagtctgagcctgtggagatcgaggtggagattgcagagggcaccattgaagttgaggatgaggggatcgaaactctggaggaagtggcaagcgccaagcagagcgtgaaatacatccagagcacgggcagtagcgatgattcagctttagcgctccttgctgatattacctctaagtaccggcaaggggataggaagggacagatcaaggaggatgggtgtccatctgacccaacctccaagcaagtggaaggtattgagatcgtggagctacagctgagtcatgtcaaggacctgttccactgtgagaaatgcaatcgatcctttaaacttttttaccacttcaaggaacatatgaaaagtcactctacagagagtttcaagtgtgaaatttgcaataaacggtacctaagagaatctgcttggaaacagcatctaaactgctatcacctggaggagggaggcgtcagtaagaagcaacgaactggaaagaagatccacgtgtgccagtactgtgagaagcagtttgaccactttggccatttcaaggaacatttacgaaaacacaccggagagaaacccttcgagtgccctaactgtcacgaacgcttcgctcggaattctaccctgaagtgtcatctcaccgcatgccagacaggcgtcggcgcgaagaagggacgaaagaaactctacgagtgccaagtatgtaactctgtgtttaattcttgggatcagtttaaggaccatctggtcatccatactggagataagccgaatcattgtacactgtgtgatctgtggttcatgcaaggaaacgaactgcggaggcatctcagcgacgcacataacatctccgaaaggctggtcaccgaagaggtgctgagcgtcgaaacccgcgtacagaccgagccggtgacatctatgaccatcatcgaacaagtgggcaaggtgcatgtgctgccactcctccaagtgcaggtggacagtgcacaggtaaccgtggagcaggtgcacccggatctcctgcaagacagccaggtccatgattcccacatgagtgagctaccagaacaggtacaggtgtcttacctggaagtcggtcgcattcaaactgaagagggaactgaagtgcatgtggaagagctgcatgtggagcgtgtcaaccagatgcccgtcgaagtgcagactgaactactggaggcagacttagaccacgtgacacccgagatcatgaaccaggaagagcgcgagtcctcccaggccgatgccgccgaggcagcacgcgaggatcatgaagatgcggaagatctggagacgaaacccaccgtggatagtgaagccgaaaaggccgagaacgaagatagaaccgctctcccggtactggaatag

SEQ ID NO: 211869 - DNA, 1770 bp, synthetic construct
  misc_feature 1..1770: note = Description of Artificial Sequence: Synthetic coding sequence
  source 1..1770: mol_type = other DNA
atggaggccgaggagaccatggagtgcctgcaggagttccccgagcatcataaaatgatcctggaccgtctgaacgaacagagagagcaggatcgttttacagacatcaccctgatcgtggatggacaccacttcaaggcacataaagcggtgctggctgcgtgctctaagtttttttacaaatttttccaggagttcactcaagagcccctggtcgagatcgaaggtgtgtctaaaatggctttccggcacctcattgaatttacttacactgccaagttaatgattcaaggcgaagaggaggcgaacgatgtgtggaaagcagcagagttcttgcaaatgctcgaggcaattaaagctctggaggtcagaaataaagagaactctgcccccctcgaggaaaatacaaccgggaagaatgaggccaagaagcggaaaattgctgagacctccaacgtgatcacagaaagtttgccgagcgcggagtcggagcccgtggaaatcgaagtggaaatcgctgaggggactattgaggttgaggatgagggaatcgagaccctcgaagaggtggccagcgccaagcagtccgtcaaatatattcagagtactggctcctctgatgattctgctctagccttactcgccgacatcacctccaaatatagacagggagacagaaaagggcagatcaaggaggatgggtgccctagcgatcctaccagcaaacaggagcacatgaaatcacacagcaccgaatccttcaagtgcgagatttgcaataagcgctacttacgcgagtctgcatggaaacagcacttaaactgttatcacctggaggaagggggcgtctcaaaaaagcagagaactgggaagaaaatacacgtctgtcagtactgtgaaaagcagttcgaccacttcggccattttaaggagcatctgcgaaaacatacaggagaaaaaccattcgaatgccctaactgccacgaaaggtttgcacgcaattccacactaaagtgccacctgacggcctgtcagacaggcgtgggcgcaaagaaaggcaggaaaaaactgtacgaatgccaggtctgtaacagtgtgtttaactcttgggatcagttcaaagaccaccttgttatccataccggggataaaccaaaccattgcaccttatgcgacctctggtttatgcagggaaacgaactgcgcagacatctgtctgacgctcacaatatttctgagcgactggtgaccgaggaggtgctctcggtggaaacaagggtgcagaccgaacctgtgacctccatgactatcatcgagcaggtgggcaaggtgcacgtgctcccactcctgcaggtgcaagttgactcagcccaggtcaccgtggaacaggtacaccccgacttgctccaagattcgcaagtccatgatagccacatgagtgagctgcccgaacaggtacaggtgagttatcttgaggtcgggcgcatccagacagaagaaggaaccgaggtacacgtggaggagctgcacgttgaaagggtgaaccagatgcccgtggaggtgcagaccgaactgcttgaagcggatctggaccatgttaccccagaaatcatgaaccaggaagagagagagtcatctcaggccgacgccgctgaagctgctcgcgaggaccacgaagatgccgaagatttagagactaaaccaacggtggactccgaagctgaaaaagctgagaacgaggatcgcactgctttaccagtcttggaatag

SEQ ID NO: 211870 - DNA, 456 bp, synthetic construct
  misc_feature 1..456: note = Description of Artificial Sequence: Synthetic coding sequence
  source 1..456: mol_type = other DNA
atggaggccgaggagaccatggagtgcctgcaggagttccccgagcaccataaaatgatcctggatcgcctgaatgaacagcgagagcaggaccggtttaccgacatcacacttattgtggatggtcatcactttaaagcacacaaagccgtcctggctgcctgttctaagttcttctacaaattcttccaagaatttactcaggagccacttgtggaaatcgaaggtgtttctaagatggcttttcgacatctaatcgagttcacttatacggccaagctgatgatacagggcgaggaagaagctaacgacgtgtggaaggcggctgagttccttcagatgctggaggccatcaaggctcttgaggtgcggaacaaggagaacagcgcgcctttagaggaaaatactacggggaaaaacgaggcaaagaaaaggaaaatcgcagaaacttcttag

SEQ ID NO: 211871 - DNA, 1872 bp, synthetic construct
  misc_feature 1..1872: note = Description of Artificial Sequence: Synthetic coding sequence
  source 1..1872: mol_type = other DNA
atggaggccgaggagaccatggagtgcctgcaggagttccccgagcaccacaaaatgatcctcgaccgcctgaatgagcagcgcgagcaggaccgttttaccgacatcacgctgatcgtcgacggacaccactttaaggcacacaaagccgtgcttgccgcatgttctaaattcttctataaattttttcaagaattcacccaagagcccttagtcgaaatagagggcgtgtctaagatggcctttcgccatcttatcgaatttacctataccgcgaagctgatgattcaaggcgaagaagaagccaatgacgtgtggaaggctgctgaattcttacagatgttggaagcaattaaagcgcttgaggtgaggaacaaggaaaattctgccccgctggaagaaaatacaaccggtaagaatgaggccaagaagagaaagattgctgaaacctctaacgttattactgaatccctgccaagcgccgaatcggagcccgtcgaaatcgaggttgagattgccgagggaacgattgaggttgaggatgaaggcatagaaacactcgaagaagttgcctccgcaaaacagtccgtcaagtacatccagagcaccggctcctccgacgattctgctttagccctgctggctgacattacctctaagtacaggcaaggagatagaaaaggacagatcaaagaggatggttgtccaagcgatccaacaagtaagcaggtggaaggcatagaaatcgtggaactgcagctgtctcacgtcaaagacctattccattgtgaaaaatgtaaccgcagttttaaactattctaccatttcaaagaacatatgaaatcacacagcacagaatcctttaaatgtgagatatgtaataagcgatacttgcgggagtctgcatggaaacaacacttaaactgctatcacctggaagagggaggcgtcagtaaaaagcagcgcaccggcaaaaagatccacgtgtgccagtactgtgagaaacagttcgaccatttcggccatttcaaagaacacctgcggaagcacacgggagaaaagccattcgaatgccccaactgccacgaacggtttgcccgcaattctacactcaagtgtcaccttacagcctgtcagacaggagtcggggcaaagaaaggccggaagaaactgtatgagtgccaggtgtgtaactctgtgtttaattcatgggaccagtttaaagatcacttagtgatacacaccggggacaagcccaaccattgcacgctgtgtgacctctggtttatgcaaggcaatgaactgcgtaggcatctttctgacgctcataacatcagcgagcggctcgtcacagaagaagtgctttccgtggaaacccgggtccagactgaacccgttacgtctatgactataattgagcaggtaggtaaggtccatgtgctacccctgctgcaggtgcaggtggattctgcgcaggttacagtggaacaggtgcacccagatctgctccaggattctcaggtgcatgacagccacatgagcgagctgccagaacaggtgcaggtgagctacttggaagttggaaggattcaaacagaggagggaacagaagttcacgttgaggagctacacgtggagcgagtgaatcaaatgccagtggaagtgcagaccgagctgcttgaggccgatctagaccatgtgacccctgaaattatgaaccaagaggagcgtgagagcagccaagctgatgccgcagaagccgcccgcgaggaccatgaggacgcagaggaccttgaaaccaagccaacagtcgattcagaggcagagaaggccgaaaacgaggaccgtaccgccctccccgttctcgagtag

SEQ ID NO: 211872 - DNA, 420 bp, synthetic construct
  misc_feature 1..420: note = Description of Artificial Sequence: Synthetic coding sequence
  source 1..420: mol_type = other DNA
atggaggccgaggagaccatggagtgcctgcaggagttccccgagcaccacaaaatgattctggacagactgaacgagcagcgggaacaggaccggtttacagacatcactttgatcgtggacggtcaccatttcaaagcacataaggcagtgttagccgcgtgcagtaaatttttctacaaattctttcaggaattcacacaggagcctcttgtggagatcgaaggcgtaagcaagatggcattcagacacctgatcgaattcacctataccgctaagctcatgatacagggcgaggaggaagccaacgacgtgtggaaagccgccgaatttttgcaaatgcttgaggctatcaaggccctggaagtgcgaaacaaggagaattccgcccctctggaggagaatactacaggaaagtag

SEQ ID NO: 211873 - DNA, 1770 bp, synthetic construct
  misc_feature 1..1770: note = Description of Artificial Sequence: Synthetic coding sequence
  source 1..1770: mol_type = other DNA
atggaggccgaggagaccatggagtgcctgcaggagttccccgagcaccacaaaatgatactcgatcgtttaaatgaacaacgagaacaggaccggtttaccgatattacacttattgtggatggccatcatttcaaggcccataaggccgtacttgctgcctgctctaagttcttttacaaattctttcaggaattcactcaagagccactagtggaaatcgaaggagtttccaagatggcctttaggcacctgattgaatttacttatactgcaaagttgatgatacagggagaggaagaggcgaacgatgtgtggaaagccgccgagtttctccagatgcttgaagccattaaggccctggaagtaaggaataaggaaaattccgcgccccttgaggagaataccaccgggaagaatgaggctaagaaaagaaagatcgctgaaacctcaaatgtgatcaccgaatctcttccgtcagccgagagtgagccggtcgaaattgaggtcgagatcgccgaaggaaccatcgaggtggaggatgaaggtattgaaaccctggaagaagtagccagcgccaaacaatctgtaaagtatattcagagcaccggtagcagcgatgactcagctctggcgttgctggcggacataacatccaaataccgccagggggatcgaaaaggccagatcaaggaagacggatgtccctccgaccccacaagtaagcaggagcacatgaaatcccattccacagaatcctttaagtgcgagatttgcaacaaacggtacctgagagagtccgcttggaaacagcatctaaattgctatcacctagaggagggcggtgtatctaagaagcagcgaactgggaagaaaattcacgtgtgtcaatactgcgaaaagcagttcgaccatttcggccactttaaagagcacctgaggaaacatacaggggaaaaaccatttgagtgtcctaattgccacgagcgattcgccaggaactctaccctgaagtgtcatctgaccgcctgccaaaccggggtgggtgccaagaagggccggaaaaaactttacgaatgccaggtgtgcaacagcgtgtttaattcttgggaccagttcaaggaccacctagtgattcacaccggggataagcccaaccattgcaccctgtgcgacctgtggttcatgcagggcaacgagctgcgacggcacctttcagatgcccataacatatccgagagactggttactgaagaagttctctcagtggagacaagagtgcaaacagagcccgtgaccagcatgactatcattgagcaggtagggaaagtgcacgtgcttccactgcttcaggtgcaggtggactcggcgcaggtaacagtggaacaggtccatcctgacctgctgcaggactcgcaggtgcacgattcccatatgtctgagctcccggagcaggtccaggtcagctacctggaagtgggacgaattcaaacagaggaagggactgaggtccacgtagaagagcttcatgtggaaagggttaatcaaatgcctgtcgaagttcagaccgaactgcttgaggccgacctcgatcacgtcacacctgaaatcatgaatcaggaggaacgagagtctagtcaggccgacgctgctgaagccgcacgggaggatcatgaggatgcggaggacttagagaccaagcccactgtcgacagtgaggccgagaaagctgaaaatgaggaccgtacagcactcccagtgttggaatag

SEQ ID NO: 211874 - DNA, 798 bp, synthetic construct
  misc_feature 1..798: note = Description of Artificial Sequence: Synthetic coding sequence
  source 1..798: mol_type = other DNA
atggaggccgaggagaccatggagtgcctgcaggagttccccgagcatcacaaaatgatactggacagactcaacgaacagcgcgagcaagatcgctttaccgatataacccttatcgtcgacggccaccactttaaagcccacaaggctgtgttggctgcatgttccaaattcttttacaagttcttccaggagttcactcaggaaccactggttgagattgagggggtcagtaagatggcgttccggcacctgatcgagttcacatatactgctaaacttatgatccaaggcgaggaggaggccaacgacgtatggaaggctgctgagtttttgcaaatgctcgaagcaatcaaagctctggaggtccggaacaaagaaaacagtgctcccctagaggagaatacaaccggcaaaaacgaagccaagaaaaggaaaatcgctgagacttctaacgtcatcacagaaagtctgccgagcgccgagagcgaaccggtggaaatagaggtcgagattgcagaaggtacgatcgaggtggaagatgagggcattgagactctggaagaggttgcttccgcaaagcagtctgtgaagtacatccagtctaccggctcatccgacgattctgctctggcacttctggctgacatcacctctaaatacaggcagggggaccggaaggggcagataaaggaggatggttgtccttctgatcccacatccaagcaggaacatatgaaatcccatagcactgagtcattcaagtgcgagatctgcaataaaaggtacctgagatag

SEQ ID NO: 211875 - DNA, 2121 bp, synthetic construct
  misc_feature 1..2121: note = Description of Artificial Sequence: Synthetic coding sequence
  source 1..2121: mol_type = other DNA
atggccctgcccagcccccaggtgctgatgggcctgcccgccctgttgatgggccccgcgcagcacaccagctggccatgcggctccgccgtgccaaccttgaaaagcatggttacattcgaggacgtggcagtgtatttcagccaagaagagtgggagctcctggatgccgcccagcggcatctctaccattctgtgatgttggaaaatctcgaattggtcacgtctttgggcagctggcacggagtcgaaggtgagggagctcacccaaaacagaatgtgagtgttgaggtcctccaggttaggatccccaatgctgaccctagcacaaagaaagccaacagttgcgatatgtgcggaccctttctcaaggacattctacatctggcggaacatcagggcacgcagagcgaggaaaaaccttatacttgtggggcatgtggccgtgacttctggctgaacgccaatctgcaccaacatcagaaagagcactctggtggcaagccgttcaggtggtataaggaccgagacgctttgatgaagagtagcaaagtgcacctgtctgagaaccccttcacctgtcgagaaggtggtaaagtgatcttagggtcttgcgatctcttgcagctgcaagcagtcgacagcgggcaaaagccttattccaatttagggcagttgcccgaggtgtgcactacgcaaaaattgttcgagtgtagcaattgcgggaaagctttccttaagtctagcaccctccccaaccatttgaggacacactcagaagagatcccatttacctgtcccacaggtgggaattttctcgaggagaaatcaatccttggaaacaagaagtttcacacaggggagattccccacgtttgcaaagagtgcggcaaggcattttcacattcctcaaaactgcgcaaacaccagaagttccataccgaagttaaatactatgagtgtatagcctgcggcaaaacattcaaccataagcttactttcgtgcaccaccagcggattcacagtggtgaaaggccctacgaatgcgacgagtgtgggaaggccttctccaaccgctcccacttgatccgccacgagaaggtgcatactggtgagcggccttttgaatgcctcaagtgtggtagggcgttcagtcagtccagcaacttcctcagacatcagaaagtgcacactcaagtccgtccctacgaatgcagccagtgcgggaaatcgttttcaaggtcatccgcccttatccagcactggcgcgtgcacaccggcgagcgcccatatgaatgttctgagtgcggccgcgctttcaataataatagcaacttagcccaacatcagaaagtacacactggcgaaaggcccttcgaatgcagtgagtgcggaagagacttctctcagtcctcgcacctgcttagacatcagaaggttcacaccggcgaaaggccttttgaatgctgtgattgtggcaaggcttttagcaacagcagtactctgatccagcaccagaaggtgcacacgggccagaggccatacgagtgttcagaatgccgtaaatcctttagtcgctcttcctccctgatacagcactggcggattcatacgggagagaagccttacgaatgcagtgagtgcgggaaggcgtttgcacacagttctactcttatagagcattggcgtgtgcacacaaaggagagaccatacgagtgtaacgagtgtggaaagttttttagccagaactccatcctcatcaaacatcagaaggtgcacaccggggaaaaaccctacaaatgttccgaatgcggcaaattcttttctcgaaagtcaagcctaatctgtcactggcgtgtccacactggggagcggccttatgaatgtagcgagtgcggtagggccttttcatccaatagccacctggtgaggcaccagagggtacatacgcaggaacgcccttatgagtgtatccagtgcggcaaggcgttctcagaacgatctacactggtacgccaccaaaaggtgcacaccagggagcgtacttatgagtgtagccagtgtggcaagctgttttctcatctatgcaacttagcgcagcacaagaagattcatacctag

SEQ ID NO: 211876 - DNA, 1191 bp, synthetic construct
  misc_feature 1..1191: note = Description of Artificial Sequence: Synthetic coding sequence
  source 1..1191: mol_type = other DNA
cccaccctgaagagcatggtgaccttcgaggacgtggccgtgtacttttcccaggaggaatgggaactactggacgccgcgcagcgccacttgtaccactccgtgatgctcgagaaccttgagctggtcacctccctggggaatgccctgagtcagcatgtttgcctgttccctatcgagtcctccgtgcatcctaaggctcgcagctgggtactgctgccctctcgcgtgagttgctgccgctgctggggcgctgaggtcttgctgggagtagagggtgaaggggctcacccaaagcaaaatgtgtctgtggaggttctccagcaccagaaggagcactctgggggcaagcctttcagatggtacaaggattcgagcgggcaaaaaccttatagcaacctgggtcaattgcctgaagtgtgtacaactcagaagctgttcgaatgttccaactgtggcaaggcctttctaaaaagcagcaccctccccaaccacttgaggacccactccgaggagatccccttcacatgccctaccggagggaatttcctggaggagaaatcaatcttaggtaataagaaattccatacgggggagatcccgcacgtctgtaaggaatgtgggaaggctttcagccatagtagtaagttgcgcaagcatcagaaattccatacggaagtgagaccatatgagtgctctcaatgtgggaaatccttctcgagatccagcgctttgatccagcactggcggatacatacaggagagaagccatacgagtgctctgaatgcggcaaagctttcgctcacagctctactcttatcgaacattggcgcgtgcataccaaggagagaccctatgagtgcaatgaatgcgggaagttcttcagtcaaaacagtatcctgatcaaacatcagaaagtacacaccggagaaaaaccatataaatgtagtgaatgtggcaagttcttttcccgaaaatccagtctcatatgtcactggagagtccacaccggtgagcgtccttacgaatgttctgagtgtggtagggccttctcatccaacagccaccttgtgagacaccagcgggtgcatacccaggagcgaccctacgagtgcatccagtgcgggaaggcgttctccgagagaagcaccctggtcagacatcagaaggtccatacccgggagcggtag

SEQ ID NO: 211877 - DNA, 1965 bp, synthetic construct
  misc_feature 1..1965: note = Description of Artificial Sequence: Synthetic coding sequence
  source 1..1965: mol_type = other DNA
atggccttccgggacgtggccgtggacttcacccaggacgagtggcgtctgctcagtcctgcccaacggacactttatagagaggtcatgctggagaactattccaatcttgtgtctttggggattagtttttctaaacctgagctgataactcagctggaacagggaaaggaaacctggagggaagagaaaaagtgcagtcctgccacgtgtcccgccgaccctgagccggaactgtacctagatcccttttgtcctccgggtttcagcagtcagaaattcccaatgcagcatgtgctctgcaaccatcctccttggatcttcacctgcctgtgcgccgaggggaatatacaacctggggaccctggtcctggggaccaagagaagcaacaacaggcctcagaaggacgcccatggtcagaccaagctgaaggtccagaaggcgagggtgccatgcctttgtttggcagaaccaagaaaaggaccctcggcgctttctcccggcccccacaaagacaacctgtgagcagccgtaatgggctgcgtggagttgaactggaggccagccccgctcaaagtggtaaccccgaagaaaccgataagttactaaagcggatagaggtgttggggttcggtactgtaaattgcggggagtgcggcctgtctttctccaagatgacgaacttactgagccaccagagaatccattccggggagaagccgtacgtttgcggtgtgtgcgagaaaggttttagtctgaaaaagtcactagctagacatcagaaggcccattcaggggagaagccaatagtgtgccgagaatgtggtagggggtttaaccggaagtctactctcataattcacgaacgcacacactccggggaaaagccctatatgtgttccgagtgcgggcgcgggtttagccagaaaagcaatctcatcatccaccagaggacccatagtggcgagaagccgtacgtttgcagggagtgcggaaaaggattttcccagaaatctgccgtggtgcggcaccagcgcacccacctggaagaaaaaacaatcgtgtgctcagattgcggtctggggttcagcgacaggtcaaacctgatttcacaccagcggacccactcgggcgaaaagccttatgcctgtaaagaatgcgggcgctgtttcagacagcgcactacactagttaatcaccagagaacgcactcaaaagagaaaccatacgtctgtggggtttgtgggcattccttctcacaaaacagcacactgatctcccatcgacgtacacacaccggtgagaagccatacgtgtgcggcgtctgtgggcgcggattttcactaaaatcccaccttaataggcatcaaaatattcattccggtgaaaaacccattgtttgcaaggactgcgggcggggcttctcccagcagtcgaatctcatccgccaccagcggacgcattctggggagaagcctatggtttgtggagagtgcggcaggggattcagccagaaatcaaacctcgtcgctcaccagaggacacattccggtgagagaccctacgtgtgtagggaatgcgggaggggattctcccaccaggccggcctaatccggcataagaggaaacactcaagggaaaagccttatatgtgtaggcagtgcggcttggggtttggaaataagagcgctctgatcacccataagcgtgctcatagcgaagagaaaccgtgtgtgtgtcgtgaatgcggtcaaggcttccttcagaaatcacacctcaccctgcaccagatgacacatacaggcgaaaaaccctatgtgtgcaagacctgcggccgagggttcagccttaagtcccacctttcccggcacaggaagaccacctctgtgcaccatagattacctgtgcagcccgacccagagccctgcgccgggcaaccctctgattcgctctactctctatag

SEQ ID NO: 211878 - DNA, 300 bp, synthetic construct
  misc_feature 1..300: note = Description of Artificial Sequence: Synthetic coding sequence
  source 1..300: mol_type = other DNA
atggccttccgggacgtggccgtggacttcacccaggacgagtggcgattgctctctcctgcacagcgcaccctctaccgggaggtaatgctagaaaattactcgaacctcgtgagcttgggaataagcttctcaaaaccagaattgattacccagctggaacagggtaaggagacctggagggaagagaaaaagtgttctcctgccacttgtcctgatcatcaggaatacggaaataattgcgatttgcaaaaggaggctgaccccgaacccgagctttatctggatcctttctgctag

SEQ ID NO: 211879 - DNA, 1962 bp, synthetic construct
  misc_feature 1..1962: note = Description of Artificial Sequence: Synthetic coding sequence
  source 1..1962: mol_type = other DNA
atggccttccgggacgtggccgtggacttcacccaggacgagtggaggcttctgtccccagcacaacggaccctatatagggaagtcatgctggaaaattactctaatctggtaagcctggggattagtttttcgaaacccgagctaatcacccagttggagcagggcaaggagacatggagagaagaaaaaaaatgctccccggccacctgcccggaccccgaaccagagctgtatctcgaccccttttgtcctccggggttttcctcgcaaaaattccccatgcagcacgtactgtgtaatcacccaccttggatcttcacctgcttgtgtgccgaaggcaatatacagcccggcgatcccggcccaggcgaccaggaaaaacagcagcaggcctctgaaggtagaccatggtctgaccaagccgagggacccgagggagaaggggcaatgccactctttggacgaactaaaaaaaggacactgggagcatttagtagacccccacagagacagcccgtgagcagtcggaacggcttgcgcggcgtcgaattagaggctagccccgcacagtccggtaaccctgaggagacggataagctcttgaagcggatcgaagtcctggggttcggcaccgtgaactgtggagaatgcggcctgtcctttagtaagatgacaaatctgctttctcaccagagaatacattcaggagagaagccatacgtctgcggggtgtgtgaaaaaggattctccctgaaaaaaagcctggcaagacatcaaaaagcccacagcggggaaaagcctattgtatgcagagagtgtggacgtgggttcaacaggaaatcaacactgatcatccacgaaaggacgcactccggtgagaaaccttatatgtgctctgaatgcgggaggggtttctctcagaaaagtaaccttataatacaccagagaacacattctggcgagaaaccatatgtgtgcagagagtgtggaaagggcttctcccaaaagtccgcagtggttcgtcaccagcgaacacatctggaggaaaaaactatcgtttgctccgattgtggcctgggcttcagcgaccgatcaaacctgatctcccaccagaggacacactcgggtgagaagccctacgcctgtaaagaatgcggtaggtgttttagacaaagaaccactctcgttaaccatcagaggactcatagtaaggagaagccttatgtctgcggtgtttgcggtcattcattctcacagaactcaactctaatctcacatcgtcgcacacacaccggtgagaaaccctacgtttgcggtgtgtgcgggagaggattttctctcaagagccacctgaaccgccaccagaacattcactctggcgaaaaaccaattgtctgcaaggactgcggcaggggattttcccaacagtcgaacctcatccgccatcaacgtactcattctggcgagaagcccatggtctgtggggaatgcgggagaggattcagccaaaaaagcaacctcgtcgcacaccagagaacccacagcggggagcggccctatgtttgcagggaatgcggtcgagggttttcccatcaggccggactgattaggcacaaacgtaaacattctcgggagaaaccctatatgtgtcggcagtgcgggttaggttttggtaacaagtcggccctgattacccacaaacgcgcacattccgaggaaaagccttgtgtatgtagggaatgtggtcaggggttcctgcagaagtcccacctcaccctccaccaaatgactcacacaggtgaaaagccatacgtatgtaaaacttgcggccgaggcttttctcttaagagccatctttcccggcaccggaaaacaacatccgtgcaccatcgcctgcctgtgcagcccgatcctgaaccttgcgcaggccaaccttctgattcgctgtactcactgtag

SEQ ID NO: 211880 - DNA, 1974 bp, synthetic construct
  misc_feature 1..1974: note = Description of Artificial Sequence: Synthetic coding sequence
  source 1..1974: mol_type = other DNA
atggcccacatggccttccgggacgtggccgtggacttcacccaggatgaatggcgtctgcttagccctgcgcagagaaccctgtatcgcgaggtcatgctggaaaattactcaaacttggtcagtctgggtatctcattttcaaagcccgagctcattactcagctggagcaggggaaggagacctggagagaggagaaaaagtgttccccagcaacctgcccggctgatcccgagccagagctgtacctggatcctttttgtccccccggcttttcctcccaaaagttcccaatgcagcatgtcctgtgcaatcatccaccatggatctttacctgtctttgcgccgaaggcaacattcaacccggcgaccccggtccaggagaccaggaaaagcagcagcaggccagcgaggggagaccctggagcgaccaagccgagggccctgagggtgaaggagccatgcccttattcgggcgtacgaaaaagcgaaccctgggagccttctcaagacctccacagcgacagcctgtttcttcaagaaatggtttgaggggtgtcgagctggaggccagccctgctcagtctggcaatcctgaggaaacagacaagctcctgaagcgcattgaagtgctgggattcggaacggtcaactgtggcgagtgtggactgtccttcagcaagatgactaacctcctctcacaccaacgcatccattccggcgagaagccttacgtttgcggggtttgcgagaagggtttctccctgaagaaatcgcttgcccgccatcagaaagcccactcaggggaaaagcctatagtgtgccgcgagtgcggacgtggattcaatcgcaagtccaccttgattatccacgaacgtactcactcaggagagaaaccttacatgtgtagtgagtgtggtagagggttcagtcagaagtcaaatcttattattcatcaacggacacacagcggagagaaaccgtatgtgtgcagggaatgtggcaagggcttcagtcagaaaagcgccgtagtaagacaccaacgcacacaccttgaggagaaaactatcgtctgctccgactgtgggctggggttcagcgataggtctaacttgatctcacaccagcgcactcattctggcgagaagccatacgcatgtaaggagtgtggacgctgtttcagacagcgcacaaccttagtgaaccatcagcggacacactccaaggagaagccctatgtgtgtggcgtttgtggacactccttctcacagaactcaaccctgatctcccatcgtcgcacccacactggggagaaaccgtacgtttgtggtgtatgcggaaggggctttagcctaaagagccatctcaataggcaccaaaacatacattccggcgagaaacccatcgtgtgcaaagactgtgggcgtgggttctcacagcagtctaacctcattcgccatcaaaggacccacagcggagagaaaccaatggtctgtggtgagtgcggtcgaggattcagtcagaagtcaaatttggtggcccatcagaggacacactcaggggaacggccttatgtctgccgggagtgtggtcggggattctcccatcaggccggcctcattaggcacaaaaggaaacattcaagagaaaagccgtacatgtgtcggcaatgcggactcggttttggaaacaaatcggctctgattactcataaacgggcccattcagaggagaaaccttgcgtgtgcagagagtgtgggcaagggtttttacagaaaagccatctcaccctgcatcagatgacacacactggagagaagccctacgtgtgtaagacctgcggcaggggctttagtttaaagagccacctgagcaggcacaggaagactacttcggtgcaccacaggctgcccgtacagcccgaccctgagccctgcgccggtcagccctctgattccctgtattctctctag

SEQ ID NO: 211881 - DNA, 1965 bp, synthetic construct
  misc_feature 1..1965: note = Description of Artificial Sequence: Synthetic coding sequence
  source 1..1965: mol_type = other DNA
atggccttccgggacgtggccgtggacttcacccaggacgagtggcgactcctcagcccagcgcagaggacactttatcgagaagtgatgctggagaattattcgaatttggtctcactggggataagtttttccaagcccgagctaatcactcaactcgagcagggaaaagagacatggcgggaagaaaagaagtgttccccagccacttgtcccgccgaccccgaacctgaattgtacctcgatcccttctgtcccccagggttttccagccaaaagttccctatgcaacacgtcctgtgtaaccacccaccatggatattcacatgcctgtgtgcggagggcaatatccagcctggcgaccctggcccgggggaccaagaaaaacagcagcaggcttccgagggacgcccgtggtctgatcaggcagagggccctgaaggggagggggctatgccactgttcgggcgcactaagaagagaaccttgggtgcttttagtcgccctccccagaggcaacccgtttcatcccggaatgggctgcgcggggtcgagctggaagcatctccagctcagagtgggaaccccgaagagacagataagcttcttaaaagaatagaggtcctgggctttgggacagttaactgcggggaatgcggcctgtcattttctaagatgactaatctactctcccatcaaagaatccactcaggagaaaagccatacgtgtgtggcgtgtgcgaaaagggcttcagccttaaaaaaagtttagcccggcaccaaaaagcccactccggcgaaaagcctatcgtttgccgcgagtgcggtaggggtttcaatcgcaagtccacgctgattatacacgagaggacccacagcggggagaagccctacatgtgttcagagtgtggccgaggctttagtcaaaaaagtaatttgattatccatcagagaacccactcgggcgagaagccatacgtttgtagggagtgtggcaaaggattcagccagaagagcgccgtcgtaaggcaccagcgaacccatttggaggagaaaaccattgtctgtagcgattgtggtcttggatttagcgacagaagcaacttgatctcccatcagcgcacgcacagtggagaaaaaccctatgcttgcaaggagtgcggtagatgctttcggcagcgcactactctggtaaatcaccagcgcacacactccaaggagaaaccctacgtttgtggcgtgtgcggccacagcttttcccagaacagcactttgatctcacatagaagaacgcacactggggagaagccttacgtgtgcggcgtctgcggcagaggattcagcctaaaatctcaccttaaccgccatcagaatattcacagcggagaaaaacccattgtctgcaaggactgtggaaggggcttctctcaacaatcgaatctcatccgacatcagcggactcacagtggcgagaaaccaatggtctgcggggagtgcggaagggggttctcacaaaaaagcaaccttgttgcacaccagcgcacacattcaggagaacggccttacgtgtgtcgcgagtgcgggcgcggcttcagccaccaggcagggttgatccggcataaaagaaaacattctagagagaagccttatatgtgccgtcaatgtggactggggttcggcaataaatctgctctgatcacccacaaacgggcccacagcgaggagaaaccctgtgtgtgccgcgagtgtggccagggcttcttgcagaagtctcatttgaccctccaccagatgactcacaccggggagaagccatatgtgtgcaagacctgcgggagaggctttagcctgaagagtcatctgtcccgacaccgcaaaacgacctctgttcaccaccggctgcctgtccagccagatcccgagccttgcgccggtcaaccatccgatagcctctattccctttag

SEQ ID NO: 211882 - DNA, 1776 bp, synthetic construct
  misc_feature 1..1776: note = Description of Artificial Sequence: Synthetic coding sequence
  source 1..1776: mol_type = other DNA
atgtgcaacggccggaagaccgtgctggccgaccccgagcccgagctgtatctggatccattctgccccccaggcttctcatcacagaaattccccatgcagcacgtgttatgtaaccaccccccgtggatctttacctgtttatgtgctgagggcaacattcagccaggtgaccccggtcctggagatcaggagaagcaacagcaggccagcgaaggccggccttggtcagatcaggcagaggggcccgagggcgagggcgctatgccactgtttggtaggaccaagaaacgaaccctcggagcctttagtcgacctccacagcgccagcctgtgtcgagtcggaacggcctacgcggcgtcgaacttgaggctagccctgcacaatcaggcaatccagaagagaccgacaaactgctgaaacgaatcgaggttctggggttcggaactgtaaactgcggtgagtgtggtttaagtttcagcaagatgactaatcttctgagccaccagaggatccactcgggcgagaaaccatatgtctgcggtgtttgcgagaaaggcttctcgcttaaaaagtcactcgctaggcaccagaaggcccattcgggcgagaagcccatagtgtgtcgggaatgcggaagaggtttcaatcggaaatcaaccttgataatccacgagagaactcatagcggtgaaaagccatatatgtgctccgagtgtgggcggggattctcccagaagtcaaatctgattattcaccagaggacacattctggggagaagccgtacgtttgtagggagtgtggtaaagggttttcccagaaatctgccgtggtccggcaccagaggacgcacctggaagagaagacaatcgtttgttccgactgtgggctgggcttctcagatagaagcaacctgatctcccatcagagaacccacagtggggaaaaaccctacgcttgcaaagagtgcgggcgctgcttcagacagaggaccacactcgtgaaccatcaacggactcactcaaaagaaaaaccttatgtatgcggcgtctgcggtcatagtttctcgcagaattctactctgatctctcatcggcgcacccacactggtgagaaaccctatgtctgtggggtgtgtggacgagggttttctttgaagtcccacctcaatcgccaccagaacattcactctggtgagaagccaatcgtgtgcaaagattgtgggagggggttctctcagcaatcaaatctgattcggcaccagcgcactcattctggagagaaacccatggtgtgcggggaatgcggcagagggttctctcagaaaagcaatttagtggcacatcagcgaacacactctggtgagcgaccctacgtgtgccgcgagtgcggcagggggttcagccaccaggcgggtttaatcagacataagcgcaaacactcgcgtgagaagccatacatgtgcagacagtgtggcttagggttcggcaacaagtcagccttgatcacacacaaacgagcacattccgaagagaaaccctgcgtgtgtcgagagtgtggccaggggtttttgcagaagtcacatctgactctacaccaaatgacccatactggcgagaagccatatgtgtgtaagacttgtggtcgtggcttcagtctgaagagccacctgagccggcacagaaaaacaacttccgtacaccacagactgcctgtgcaacccgaccccgagccctgcgccggacagcccagcgactcactttatagcctttag

SEQ ID NO: 211883 - DNA, 540 bp, synthetic construct
  misc_feature 1..540: note = Description of Artificial Sequence: Synthetic coding sequence
  source 1..540: mol_type = other DNA
atggccttccgggacgtggccgtggacttcacccaggacgagtggcgcctactttctccggcccagcgcacgctctatagggaagtgatgctcgagaactactctaacttagttagtctgggcatcagcttctctaaaccggagttgattacacagcttgaacagggaaaagagacctggcgggaggagaaaaaatgtagcccagctacatgccctgcagacccagaaccagagttgtatttggacccattctgcccacctggcttttcctcacagaagttccccatgcagcacgtgctatgcaatcatcccccttggatatttacctgtctgtgcgcggaagggaacatacagccaggtgaccccggcccaggagaccaagagaaacagcagcaagcgtctgaagggagaccttggagcgatcaggcagaggggccagaaggggaaggcgccatgccactgttcggtagaacaaaaaagcggactctgggtgcttttagtagacctccacagcgccagcccgtctcttctagaaattag

SEQ ID NO: 211884 - DNA, 432 bp, synthetic construct
  misc_feature 1..432: note = Description of Artificial Sequence: Synthetic coding sequence
  source 1..432: mol_type = other DNA
atggccttccgggacgtggccgtggacttcacccaggacgagtggaggctcctttctcctgctcagcggaccttataccgcgaagtcatgctggagaactacagtaacttagtatccttgggaatctccttcagcaagccagagctcattacccaactcgaacagggcaaagaaacctggagggaggagaagaagtgcagcccagccacttgccccgccgatcccgaaccagagctatacctggacccgttttgccctccaggattttccagccaaaaattcccaatgcaacacgtgctctgcaatcatcccccatggatcttcacctgcctctgtgccgaaggcaacattcagcctggcgaccccggccctggagaccaggaaaagcagcagcaggcgtcagagggacgtccatggtctgatcaggcttag

SEQ ID NO: 211885 - DNA, 1680 bp, synthetic construct
  misc_feature 1..1680: note = Description of Artificial Sequence: Synthetic coding sequence
  source 1..1680: mol_type = other DNA
atgcagcacgtgctgtgcaaccaccccccctggatcttcacctgcctttgtgctgagggcaatatccagcccggagacccgggtcccggcgaccaggagaagcagcagcaggcctcagagggtcggccttggtctgatcaggcggaggggccagaaggggagggagccatgccactgttcggcagaaccaagaaaaggaccttgggcgccttcagtcgcccaccccagcgccagcctgtcagctcacggaatggcttgcggggagtcgagctagaagcctcacctgcgcagtccgggaaccccgaagagacagacaagttactgaaacgcatcgaggtactcggtttcggcaccgtcaattgcggggagtgtggtctgtctttttccaaaatgacaaatctgctgagccatcagcgcatccactctggagaaaaaccttacgtgtgtggcgtgtgcgaaaaaggattctctttaaagaaaagtttagccaggcatcagaaggcccacagcggcgagaaacctatagtttgccgcgaatgtggccgcggatttaatcgcaagtctacgttgattattcatgagagaacccattctggcgagaagccttatatgtgttccgaatgtggccgagggtttagccagaagagtaatttaatcatccatcaacggactcatagtggcgaaaagccgtatgtatgtagggagtgtggaaagggattcagccagaagtccgccgtcgtgaggcaccagcgaacgcatctggaggagaaaactattgtgtgttcagactgtggacttggcttctccgatcgctccaacctgatctcccatcagcggacacattcaggagagaagccctatgcctgtaaggaatgcggccggtgctttcgccagcgtaccaccctggttaatcatcaacgtactcactctaaggagaaaccctacgtgtgcggcgtttgtgggcacagcttcagccagaacagcaccttaatcagccaccgacggacacacacgggagagaagccgtatgtgtgcggcgtttgtggtcgcgggttctctctgaagtcacatctcaatcgccaccaaaacatacattctggggagaagccaatcgtttgcaaagattgcggccgcgggttctctcaacagagcaatctcattcgccatcagcggacgcacagcggtgaaaaaccgatggtctgcggggagtgtggtcgggggtttagccagaaatctaacttggtcgcccatcagagaacacacagtggcgagcgaccttacgtgtgcagagaatgtggccgtggtttttcacaccaggcaggtttgatcagacacaaacggaaacacagcagagagaagccttacatgtgccgtcaatgtgggttgggcttcgggaataagagcgcacttatcacacacaagagggcgcattccgaagagaagccatgtgtgtgtcgggagtgtgggcagggtttcttgcaaaaatctcacctgaccttacatcagatgacccatacaggcgaaaagccatacgtgtgtaagacctgcggtcgaggatttagcttgaagtcccacctctccagacataggaagaccacctccgtgcaccatcgcctgcccgtacagcccgaccccgagccatgtgccggtcagccctccgattccctatatagcctgtag

SEQ ID NO: 211886 - DNA, 1680 bp, synthetic construct
  misc_feature 1..1680: note = Description of Artificial Sequence: Synthetic coding sequence
  source 1..1680: mol_type = other DNA
atgcagcacgtgctgtgcaaccaccccccctggatcttcacctgcctgtgtgctgaggggaacatacagccaggggatcccggccccggggaccaagagaaacagcagcaggcctccgaggggagaccatggtctgaccaggccgagggtccagagggcgagggggcgatgcctttgtttggcaggactaagaagcgaacattgggtgccttttctcgaccccctcagcgtcagccagtctccagcaggaatgggctgaggggcgtggagttggaagccagtccagcacaaagcggaaatccggaagagacagacaaattgctaaagcggattgaggtgctaggctttgggacagttaattgcggagaatgtgggctcagctttagcaagatgaccaaccttctatcgcatcaacgcattcactccggcgaaaagccctatgtgtgcggagtttgcgaaaagggcttctccctcaaaaaaagtctggcccggcaccagaaagcacacagcggggagaagcctatagtctgccgggaatgcggaagaggctttaatcgcaaatctaccctgatcatccacgaaaggactcacagcggcgaaaagccctatatgtgttccgaatgtggaaggggcttctcacaaaaatcaaacctgattatacaccagcgtacacactccggagaaaagccatacgtctgtcgtgaatgtgggaaggggttttcacagaagtcggccgtggttcggcaccaacggacacacttggaggagaagacaattgtgtgctccgattgcggcctgggattctcagaccgatcaaatcttatctcacaccagagaactcactctggcgagaaaccatacgcctgcaaagagtgtggaaggtgtttccgccagcgaacaactctcgttaatcaccaacgcactcacagcaaagaaaaaccgtacgtttgcggcgtgtgcggacattcattctctcagaatagcactctcatttcgcacaggcgaacacataccggcgagaaaccctacgtgtgtggcgtctgcggacgcgggttttctttaaagtcccatctgaatcggcaccagaacatccatagtggcgagaagcccattgtgtgtaaggactgcgggaggggcttcagtcagcaaagcaatctcataaggcatcagcgaacccatagcggtgaaaaacccatggtctgtggcgagtgcgggaggggctttagtcagaagagtaatcttgtggctcaccagcgcacccactcaggggagcggccgtacgtgtgtcgtgaatgtggaagggggtttagccaccaagctggcttgattaggcataagcggaaacattccagagaaaaaccatatatgtgtcggcagtgcggcctcggattcggaaacaagagcgctctgatcacgcacaaacgagcacattctgaggaaaaaccatgcgtctgcagggaatgtggacagggattcctccagaaaagccacttaacgttacaccaaatgacacacactggcgagaaaccatacgtctgcaagacatgcgggcgcggcttctctctgaagagccatctgtcacgacatcgcaagacgactagtgtccaccataggctccccgtacagccagatcctgagccttgtgctggacagccttctgactcactgtactccttgtag

SEQ ID NO: 211887 - DNA, 1284 bp, synthetic construct
  misc_feature 1..1284: note = Description of Artificial Sequence: Synthetic coding sequence
  source 1..1284: mol_type = other DNA
atgaccctggtgaccgccggcggcgcctggaccggccccggctgctggcacgaagttaaagacgaagagtctagcagtgaacagagcatttctatagccgtatcccatgtgaacacaagcaaagcaggactgcccgctcagaccgctctgccttgcgacatctgtgggccgatactgaaagacatcctgcatttagacgagcatcagggtacgcaccatgggctgaaacttcatacttgtggagcctgcggaagacagttctggttctccgccaatcttcatcagtaccagaaatgttattccattgagcagcccctacgccgagataagagtgaggcttccattgtgaaaaattgtaccgtcagcaaagaaccgcacccttctgagaagccgttcacctgtaaagaagagcaaaagaatttccaggccacgctcggcggctgccaacagaaggccatacactcaaaaaggaaaacccatcggtcaacagaaagcggcgacgcattccatggagaacagatgcattacaaatgtagtgagtgcgggaaagccttctccagaaaagacaccctggtccagcaccaacgaatccactccggcgaaaagccatacgagtgctctgaatgcggcaaagctttctcccgcaaagcgacccttgtgcagcatcagagaattcatactggagagcgcccctatgagtgtagtgaatgtggtaagacattcagtcgaaaagataacctgacacagcacaagaggatccataccggagaaatgccgtacaagtgtaacgagtgtggaaaatatttttctcaccactcaaatctaatcgttcatcagcgagttcacaatggagctagaccctataaatgcagcgactgcggaaaggtgtttaggcacaagtctacactggtgcagcacgagagcatccacactggagagaatccctacgattgctccgattgtggaaaatctttcggccacaagtatacactcattaaacaccagaggatccacaccgaaagcaagccattcgagtgtatcgagtgcgggaagttcttttccagatctagtgattacattgcccaccagcgggtgcacacaggagagaggcccttcgtgtgttccaagtgtgggaaggatttcattcggacttcgcacttggttcgccaccagagggtccacacaggcgagcgcccctatgaatgctccgagtgcggtaaggcctacagcctaagcagccacctgaaccgccatcaaaaggtccataccgcgggcagactctag

SEQ ID NO: 211888 - DNA, 1485 bp, synthetic construct
  misc_feature 1..1485: note = Description of Artificial Sequence: Synthetic coding sequence
  source 1..1485: mol_type = other DNA
ctgcggtggaaccaccggagccggagcagcggcctgctgggcggcagtgaggtcaccgaggccggtggttgtgggcgaagccgatgttccctgtgcggcgtcgctagacagcggcggccaaggctgaggccaaggggtcgtacgacagcagtcccaggcagccgggacttgggccccccaagagggtccgggtggtcaaccaattgtgacgggggtggcaggggagatggaccaggggccggctgctggcacgaagtcaaagatgaggaaagctcgagcgagcagtctatctcaatcgctgtgtctcatgtcaacactagtaaggccggtctccccgctcagacagcgttgccatgcgatatatgtggtcctatactgaaagacatcctgcacctggacgagcaccaaggcacgcatcacggcctaaaactgcatacatgtggcgcctgcgggcggcaattctggttttcggcaaatttgcaccaataccagaagtgttacagcattgaacaacctctgcggcgagataagtctgaagctagtattgttaaaaactgtactgtcagtaaggagccccatccatccgagaaacccttcacctgtaaggaggagcagaagaattttcaggccactcttgggggctgccagcagaaggcaattcacagcaagcggaagacccaccgctccaccgaaagcggggatgctttccacggggaacagatgcactataagtgttccgagtgtggcaaggctttctctcgaaaggataccctggtgcaacaccagcgcattcactctggtgagaaaccctatgaatgttctgaatgcggaaaggcttttagccggaaggccaccttggtccagcaccaaaggattcacacgggcgagcgaccctacgagtgcagcgaatgcggtaaaacattcagccggaaagataacctcacgcagcacaagaggattcacaccggcgaaatgccttacaagtgtaatgaatgtggaaagtactttagccatcatagcaacctcattgtgcaccaacgtgtgcataacggagcccgcccttataagtgctctgactgcggtaaggtgttcagacacaaatctacgttggtacagcacgaatcaattcatacaggagagaatccctatgactgtagtgattgcggcaagtcatttggacataaatacactcttataaaacatcaacgaattcacaccgagtctaagccgttcgagtgtattgagtgcggtaagttcttttcacgatcctcagattatatcgctcaccagagagtgcatacaggtgaaaggccatttgtgtgcagcaagtgtggcaaggatttcatcagaacttctcatttggttcgacaccagcgggtgcacaccggcgaaagaccctacgaatgtagtgaatgtggtaaggcttattcactgagttcacatctcaataggcatcagaaggtccacaccgcgggccggctctag

SEQ ID NO: 211889 - DNA, 1044 bp, synthetic construct
  misc_feature 1..1044: note = Description of Artificial Sequence: Synthetic coding sequence
  source 1..1044: mol_type = other DNA
atgtggggcatgtgggagaccatcctggtgcagtgcctgcaccagtaccagaaatgctactctattgagcagcctctgagacgtgacaagtctgaggcttctatcgtgaagaattgcactgtgagtaaagagcctcatcctagcgagaagccctttacctgcaaggaggaacagaagaatttccaggccaccctgggcggatgccagcaaaaggcgatccacagcaaacgaaagacccatcgatctactgaatcaggtgacgcatttcatggggagcagatgcattacaagtgctctgaatgtggcaaagcgttctctaggaaggacactctagtgcagcaccagcggatccattctggcgagaagccatacgagtgttccgaatgcggcaaagctttctcccgcaaagctacattagtacagcatcagaggattcatacaggcgaacgcccatacgaatgtagtgagtgcggaaagacgttttcacgcaaggacaatcttactcagcacaagcgcatccacactggagagatgccgtataaatgtaatgagtgtggaaaatatttctcgcaccatagtaacctgatcgtgcaccaacgggtgcacaatggagcacggccatacaagtgctcagactgcggaaaagttttccggcataaatcaacattagtgcagcacgaaagcattcacactggggagaacccctatgactgctccgattgcggtaagagttttggacacaagtacactttgatcaaacatcaacggattcataccgagtctaagcccttcgagtgcatcgagtgcggtaagttcttcagccggtccagcgattatattgcacaccagagagtgcacacaggggagcggccatttgtgtgctccaagtgtgggaaggactttatccggacatctcacctggtgaggcatcagagggttcacactggcgagcggccctacgagtgctctgagtgcgggaaggcctatagcctgagctcccatctcaaccgacatcagaaggtgcataccgcaggcaggctgtag

SEQ ID NO: 211890 - DNA, 1977 bp, synthetic construct
  misc_feature 1..1977: note = Description of Artificial Sequence: Synthetic coding sequence
  source 1..1977: mol_type = other DNA
atgacccccggcgtgcgggtgagcaccgaccccgagcaggtgacctttgaggacgtggtcgttgggttcagccaggaggagtggggacagctgaagcccgctcagaggacactttacagggacgtcatgttagacacctttcgtcttctcgtaagcgtgggccactggctgcctaagccaaatgtgatatctctcttggagcaggaggcggagctgtgggccgtggagtcccgcctgccccagggtgtctacccagacttagaaacacgaccgaaagtcaagctgagcgtgcttaaacagggtatctccgaagagatcagcaactccgtgatcctggtggaaagattcttgtgggacggtctctggtattgcaggggggaagataccgagggacactgggaatggtcctgtgagtccctggagtctcttgccgtcccggtcgctttcacgccagtgaagactcccgtgcttgaacagtggcaacgcaacgggtttggagaaaatatctctctgaacccagaccttccacaccaacccatgactcccgagcggcaatcacctcatacctggggcactcgcggcaagcgcgagaagccagacctgaacgtcctccagaaaacctgcgtgaaggaaaagccctacaagtgtcaggaatgtggcaaggccttttctcactcctccgctctaatagagcatcacagaacccacacaggtgaacgaccctatgagtgccacgagtgccttaagggctttagaaactctagcgcactgacaaagcatcagcggatccatactggagaaaaaccttacaaatgtacacagtgtggtagaactttcaatcagatcgcacccctcattcagcaccaacggacccacactggagagaaaccctacgaatgttccgagtgtggcaaatccttcagcttccggtcatcattctcacagcacgagcgaacacacactggcgaaaaaccttatgaatgcagtgagtgcggaaaggcctttcgacagtctatccacctcacacagcacctccgcatccatactggcgagaaaccttaccaatgcggagagtgtggcaaggccttctcacattcttcaagtttaacaaagcaccagaggattcataccggggaaaagccttatgaatgtcacgaatgcgggaaagcatttacccaaattaccccactgatccagcaccaaaggactcacactggagagaagccctacgagtgtggagaatgtggcaaagcgttcagtcaaagtacgcttcttaccgaacaccggaggattcacacaggtgaaaagccttatggctgcaatgagtgcggcaagaccttctctcattcctccagtctgagccagcacgagagaacacacacaggtgaaaagccttacgaatgcagtcagtgtggtaaagcatttcggcaatctacccacctcacccagcaccagcgcatccatacaggagagaaaccatacgagtgtaatgactgtggaaaggcatttagtcacagttcctccctcaccaaacaccagcgcatccacactggcgaaaagccttatgagtgcaaccaatgtgggcgcgctttctcacagctggccccactgattcaacatcagagaattcataccggagaaaagccttatgagtgcaaccagtgtggcagagccttcagccaatcctccctgctgattgagcatcagcggattcataccaaggaaaagccatacggttgcaacgagtgcggtaagagctttagtcatagtagctccttgtcccaacacgagcgaacacacactggagaaaagccttacgagtgtcacgactgcggcaaatcattccgccaatctacccacctaactcagcaccgtcgcatccacacaggggagaaaccctatgcttgtagagactgcgggaaggcctttacccacagctcttctctcaccaaacaccagagaacccatacggggtag

SEQ ID NO: 211891 - DNA, 1173 bp, synthetic construct
  misc_feature 1..1173: note = Description of Artificial Sequence: Synthetic coding sequence
  source 1..1173: mol_type = other DNA
atggagctgggcagccggcggcggagcgtgggctgccggtgccggggtctctgcctcgccgtgaggagggaacaggtaacattcgaggacgtggtggtgggattctcccaagaggagtggggacaacttaaacccgcccagaggaccctctaccgggacgtcatgttggacaccttccgactgctcgtttctgtgggccactggctccctaaaccaaatgttatttctctgctggagcaggaagcggaactgtgggccgttgagtctagattgcctcagggcgtctaccccgacctcgagacccggcccaaggttaagctgtccgttctaaaacagggcatctcggaggaaattagcaacagtgttatactggtggagaggttcttatgggacggactttggtactgtcgtggggaggacacggagggccactgggagtggtcctgcgagtctctggaaagcctcgccgtccctgtcgcctttacaccggtgaagacaccagtgctggaacaatggcagcggaatggatttggtgagaatatctcccttaatccagacctgccacaccaaccgatgacacccgagcgtcagtccccccatacctggggcacaaggggaaagcgcgaaaaacccgatctgaatgtgctgcagaagacatgtgtgaaagaaaaaccatataagtgtcaagaatgcggtaaagccttctcccactccagtgcccttatagaacatcacaggactcatacaggggagagaccttacgagtgccatgaatgcctgaagggctttcgaaactcttcagccctgacgaagcatcagcggattcacaccggagaaaaaccttataagtgcactcagtgcgggcggacctttaaccagatcgcccccctcatccagcaccagcggacccacacaggagaaaagccctacgagtgttcagagtgtggaaagagtttctctttccgatctagctttagccagcacgagcgcacgcatactggcgaaaagccgtatgagtgtagcgagtgtggcaaagcatttaggcagtccattcatctgacccagcatctacgaatacataccggcgagaagccttaccagtgcggggaatgtggaaaggcctttacacacagctcatctctgacaaagcatcaaagaacacacacaggttag

SEQ ID NO: 211892 - DNA, 2049 bp, synthetic construct
  misc_feature 1..2049: note = Description of Artificial Sequence: Synthetic coding sequence
  source 1..2049: mol_type = other DNA
atggagctgggcagccggcggcggagcgtgggctgccggtgccgggggctgtgccttgctgtccgtcgggaacaggttacattcgaggatgttgttgttgggttttcgcaggaggaatggggccagctaaagcctgcccagcgtactctgtaccgcgatgtgatgttggacacctttcgtctgctggtgtccgtgggccactggctcccaaagccaaacgtgatctctctgctggagcaagaagccgaactctgggctgtcgaaagccgactgccccagggggtctaccctgagatcaaaggacatttccagtttctactccttagtgatcttgaaactagaccaaaagttaaactgagcgttctgaagcagggaatcagtgaagagatcagcaattctgtgatcctggtggaacgcttcctctgggatggactgtggtactgcaggggggaagacactgaaggccattgggagtggtcttgcgagagcttagagtcgctggctgtgcctgtggcatttacccctgtgaagacaccagtcctagagcagtggcaaagaaacggctttggggagaatatttccctaaacccggacctccctcatcagccgatgaccccggaaagacagtcccctcatacttggggaaccaggggaaagagggagaaaccagacctgaacgtgcttcagaagacatgcgtgaaggaaaagccttacaaatgccaagagtgtggaaaggcctttagtcatagctccgctctcattgagcaccatagaacccacactggcgaaaggccctatgagtgtcacgaatgcctaaaggggttccggaacagctctgctcttactaagcatcagagaattcacaccggcgagaagccctacaagtgtacacagtgtgggcgcaccttcaatcagatagccccgttgatccagcatcagcggacacacaccggtgaaaaaccctatgagtgttccgaatgcggcaagtctttcagctttcggtcttccttttcacagcacgaacgaacgcacaccggagaaaagccttatgagtgctctgagtgcggcaaagctttccgccagtcgatccacctgacgcagcacttacgcatccacacaggagagaaaccataccagtgtggagagtgtgggaaagcgttctcacactcatcctctctgacaaaacatcagaggatccataccggagaaaagccatacgagtgtcacgaatgcgggaaagctttcacccagattacacccttgattcagcatcagagaacccatactggagaaaaaccgtatgaatgtggagagtgcgggaaagccttttctcagtctaccctcttaaccgaacatagacgcatccatactggagaaaaaccctacggctgcaacgagtgtgggaaaactttctcccactcctcttccctcagccagcacgaaaggacccacacaggcgaaaagccctacgagtgtagccaatgtggaaaggcttttagacagtccactcacttgacccaacatcagcgtatccacacaggtgagaagccttacgaatgcaatgactgtggcaaggccttctcccacagttcctcacttaccaagcaccaaagaattcacaccggcgaaaagccttatgagtgtaaccagtgcgggcgagcctttagccagctggcaccactgatccagcatcagcggatccatacaggcgaaaagccatacgagtgtaatcaatgtggtcgggccttttcccagtcctctctcctcattgagcaccagcggatacacaccaaggagaagccgtatggatgtaatgagtgcgggaagagcttttctcacagctcaagcctctcccagcatgaacggacccacacgggtgaaaaaccttacgaatgtcacgattgcgggaaatcgttccgtcaaagcacacatttaacccagcatcgccggattcacactggagagaaaccttacgcttgcagggactgtggcaaggccttcactcacagtagctcccttactaaacaccaaaggactcacacaggttag

SEQ ID NO: 211893 - DNA, 1977 bp, synthetic construct
  misc_feature 1..1977: note = Description of Artificial Sequence: Synthetic coding sequence
  source 1..1977: mol_type = other DNA
atgacccccggcgtgcgggtgagcaccgaccccgagcaggtgaccttcgaggacgtggtggtaggattctcccaggaggagtggggtcaactgaaacccgcacagcgcactctgtaccgggatgtgatgctggatacctttcgcttattggtcagcgtgggacactggttgcctaagcctaacgtcatttctctgcttgagcaggaggccgagttgtgggccgtggagagccgattgcctcaaggcgtgtaccctgacctcgaaacaagacccaaagttaaattgtctgtgcttaagcagggcatctcggaggagatctcaaacagcgtgattctagtggaacggtttctttgggatggactgtggtactgcagaggggaagatacagagggacattgggagtggtcctgcgagtctctggagtctctcgcggtcccagtggccttcactcccgtaaaaacgcccgtgctagagcagtggcaacgcaacgggtttggagagaatatatccctcaaccctgacctcccacaccagccgatgaccccagagcgccagagcccgcacacctgggggaccagaggaaagcgagagaaacccgacctaaatgtgttgcagaagacttgcgtgaaagagaaaccctacaagtgccaggagtgcggaaaggccttttcacattcctccgcactcatcgagcaccaccggacacataccggggagcgcccctacgaatgtcacgaatgtctgaaaggattccggaacagttccgcgcttacaaagcatcagcgcatacacaccggagagaagccatacaaatgcactcagtgtggccggacctttaaccagatagctcccctgattcagcaccaacgtactcatacgggagaaaaaccgtatgagtgtagcgagtgcgggaaaagtttctccttccggagctcctttagccaacatgagcgcacccacaccggcgagaaaccctatgaatgttcagagtgcgggaaagccttccgacagagcattcacctgactcaacacctgcgtattcatactggtgaaaagccctaccagtgcggagagtgtggcaaagcattcagccattcaagctcactcaccaaacaccagagaattcacacgggagagaaaccatacgagtgccacgaatgtgggaaggcattcacccagattacaccactgatacagcaccaaagaacccacaccggggagaaaccctatgaatgcggggagtgtggcaaagctttttcccaatccaccctacttacagaacatcggaggatccacaccggcgagaagccatacggatgcaacgagtgtggaaagaccttcagccactccagctccctgtcccaacacgagagaacacacacgggagagaagccatatgagtgctcacaatgtggtaaggccttccggcagagtacccaccttacccaacaccaaaggatacacacgggggagaagccatacgagtgtaacgattgcggaaaggccttcagtcattcctctagcctgactaaacatcagcgcatccacaccggtgagaagccctacgagtgcaaccagtgcggcagagcctttagccaactggcaccactaatccaacatcagcgaattcacacaggagaaaaaccatatgaatgcaaccaatgcggcagggctttttcacaatcctctttgttgatcgagcaccaaagaattcacacaaaggaaaaaccttacgggtgtaacgaatgtgggaagagctttagtcattctagcagcctaagtcagcacgaaaggacgcatacaggtgagaagccatatgaatgtcatgactgcggtaagtcattcaggcagtctactcacctcacgcagcatagaaggattcacaccggagagaaaccatacgcatgcagggattgtgggaaggcctttacgcattcatcatcactgaccaagcatcagcgaacacatactgggtag

SEQ ID NO: 211894 - DNA, 1851 bp, synthetic construct
  misc_feature 1..1851: note = Description of Artificial Sequence: Synthetic coding sequence
  source 1..1851: mol_type = other DNA
atgctggacaccttccggctgctggtgagcgtgggccactggctgccaaagccaaacgtgatctctcttctcgagcaggaggccgaactgtgggctgtggaatctcggcttccacagggggtgtacccagatcttgagactcggccaaaggttaagctgtcagtccttaagcagggcatcagcgaggagatctcaaactccgttattctggtggaaaggttcctctgggacgggctctggtattgccgaggagaagatacagaaggccactgggagtggagttgtgagtcactggaatccctagccgtgcccgtggcatttacccctgttaagaccccagtcctggagcagtggcagcgcaatgggtttggagagaatatatcactgaatccagacctgccacaccagcccatgacccccgaacgacagtccccacacacctggggcacaagaggaaagagagaaaagcccgatctgaatgtgctgcagaagacatgtgttaaggagaaaccgtacaaatgccaagagtgtgggaaagcttttagtcactcgtccgcactgattgagcatcaccgtactcacaccggggagagaccatatgaatgccacgaatgcctgaaaggttttcgtaattcctccgctctaactaaacatcagcgtatccatacaggcgagaagccgtacaaatgcacgcagtgcggccgaacttttaaccagattgcgcccctgatccagcatcagagaacgcatactggggagaaaccgtatgagtgtagcgagtgtggcaaaagcttcagttttcgcagttctttttcgcagcatgaacggacacacaccggagagaagccatacgagtgttcagagtgcggcaaggcatttcggcagagcatccacctgactcaacatttacgaatacacacaggcgagaagccttaccagtgcggcgaatgcggcaaggcatttagccactcttcgagcctgaccaagcatcagcgcatccacactggcgagaaaccctacgagtgtcacgagtgcgggaaggcctttactcaaattaccccactgatccagcaccagcgtacccacaccggggagaagccttatgaatgcggcgagtgtggcaaggccttctcccagagtacattgttaaccgaacaccgaaggatccatacaggagaaaagccctacggatgtaatgaatgcggtaagactttctctcattcatctagtctgagccagcacgagcgaacgcataccggagaaaagccctacgagtgctcacagtgtggaaaggctttcaggcagagtacccatctcacccagcatcagcgtatacacaccggcgaaaagccatacgagtgcaacgattgcggaaaagccttttcacactcatcaagtctgacaaaacaccaacggattcacacaggggaaaaaccttatgaatgcaatcagtgcggcagagccttttcgcagttagccccactgatccaacaccagcgcattcataccggagaaaagccctacgagtgtaaccagtgtgggcgcgccttcagtcagtcctcactgctgatagagcaccaacgcatccacaccaaagagaaaccatatgggtgcaacgaatgtgggaaatcattctctcatagctcttcccttagccagcatgaaaggacccacactggcgagaagccctacgaatgccatgactgcgggaagtctttccggcagagcacccatctgacccaacaccgcagaatacataccggcgaaaaaccttatgcatgtagggactgcggtaaggcgttcacacactcctctagcttgactaaacatcaaagaacccataccgggtag

SEQ ID NO: 211895 - DNA, 2013 bp, synthetic construct
  misc_feature 1..2013: note = Description of Artificial Sequence: Synthetic coding sequence
  source 1..2013: mol_type = other DNA
atgacccccggcgtgcgggtgagcaccgaccccgagcaggtgaccttcgaagatgttgtggtcggattctcccaggaagagtgggggcagttgaagccagcccagaggactctataccgggatgtgatgctggatacattcagacttctggtctcagttggacactggttacctaaacctaatgtgatttccctcctcgagcaggaagccgagctgtgggccgtagaaagccgcctgccccagggcgtttatccagaaataaaagggcattttcagttccttctgctgagtgacctcgagacacgccctaaagttaaactgtccgttcttaagcagggcatttcagaagagatctcaaactctgtcatcctagttgaacggtttctgtgggatggcctgtggtattgtaggggcgaggacacagaggggcactgggaatggagctgcgagtcactcgaatctcttgccgtccctgttgcattcaccccggttaaaactcctgtcttagagcagtggcaaaggaacgggtttggagagaacatctctctgaatcctgacttgccccaccagccaatgacccccgagcggcagagtccccacacatggggaacacgcgggaaacgcgagaaacccgaccttaacgtcctgcagaagacctgcgtgaaggagaaaccgtataagtgccaggagtgcgggaaagcgttttcgcattccagcgccctgatcgaacaccaccggacccataccggggaacggccatatgagtgccatgagtgcctgaaaggatttcgaaactcctcagctctgactaaacaccaaaggattcacaccggcgagaagccatacaagtgcactcagtgtggccgtacctttaaccagattgcccccctgatccagcaccagcggactcacactggcgagaagccgtatgaatgcagtgagtgcggcaagagcttctcatttaggtcgtcgttcagccagcatgaacggacccataccggggagaaaccctatgagtgctctgagtgcggtaaggcttttcgacagagcattcaccttactcagcacctccgtatacacactggagaaaagccttaccagtgtggagaatgcggcaaagctttttcgcactctagttctctaacaaaacatcagcgcattcatacaggtgagaaaccttatgagtgtcacgagtgcggcaaagctttcacacagattacccccctgatccagcatcaaagaacccacaccggagagaagccttacgagtgtggcgagtgcggtaaagcatttagccaaagcactttactgacagaacaccgccggattcacaccggcgagaagccctatggctgtaacgaatgtgggaagacatttagccacagctcatcgctgtcacagcacgagaggacccatacaggggaaaagccatatgaatgcagccagtgcggtaaggcattccgtcagtcaacccatctgacccagcaccaacgcatccacactggggagaagccctatgaatgcaatgattgtgggaaggcgttcagccattcatcgagcctcaccaagcaccaacgcatccacaccggggagaaaccctatgaatgcaaccagtgtggtcgggccttttcccagcttgcccccctgatccaacaccaacgaatacatacaggtgaaaaaccatatgagtgtaaccaatgcggacgtgcattctctcagtcttctcttctgatagagcaccaacgcattcacactaaagagaaaccctatgggtgcaacgagtgtggtaagtctttctcacatagttccagcctgtctcagcacgaacgcactcataccggggaaaagccctatgaatgtcacgactgtggcaaaagtttcagacaatccacccacctcacccagcacaggagaattcatacaggagaaaagccatatgcctgcagagactgcggaaaggcattcacacacagtagtagccttactaaacatcaacgtacgcatactggttag

SEQ ID NO: 211896 - DNA, 2031 bp, synthetic construct
  misc_feature 1..2031: note = Description of Artificial Sequence: Synthetic coding sequence
  source 1..2031: mol_type = other DNA
tgacggagcgtgggctgccggtgccggggcctgtgcctggccgtgcgccgcgaacaggtgacctttgaggacgttgtggtcggctttagccaggaggagtgggggcagcttaagcccgcccagaggacgttgtatagggatgtgatgctagacactttccgcctgctggtcagcgtgggccactggctgccaaaacccaacgttatctccctgctagagcaagaagccgagttgtgggccgtcgaatcccgcctcccgcaaggggtctaccccgagattaagggtcatttccaattcctgctgttaagtgatctggaaaccagaccgaaggttaaactgtcagtactgaagcaaggaatctccgaggagatttcaaatagtgtgatcctcgtggaaaggttcttatgggatggcctttggtactgcagaggtgaggatacagagggtcactgggaatggagctgcgagtctctggagtcgctcgcagtcccggttgcgtttaccccagtcaaaacaccagtcttagagcaatggcagaggaatggattcggcgagaacattagtttgaatccagatctgccccatcaaccgatgactccagagcgacagagcccccatacttggggcacccgcggaaagcgggaaaaacccgacctgaatgtcctgcagaaaacctgcgtcaaagagaaaccatataagtgccaagaatgcggaaaagcattttcccactctagtgccctaattgagcaccaccgaacccataccggagaaagaccctacgagtgtcacgaatgtctcaaaggctttaggaactcttctgcattaacaaagcaccaacgaatacatacaggtgagaaaccatacaagtgtacccaatgtggacggacttttaaccaaatcgccccactgatacagcaccagagaactcataccggcgagaaaccatatgagtgctcagaatgtggaaaatcattttccttcaggtcgagcttctcacagcatgagaggacccacaccggtgagaagccgtatgagtgtagcgaatgtgggaaggccttccggcagtccatccacctcacacagcacctgcggatccataccggtgaaaagccgtatcagtgtggagaatgtggcaaggcgttctctcactcgagcagtctgaccaaacatcagcgcatccacactggcgagaaaccatatgaatgtcacgaatgcggcaaggcctttacgcagatcacaccattgatccaacaccagagaactcacacaggcgagaagccttacgagtgcggggagtgcgggaaggccttttctcagtctacactcctcaccgagcaccgaaggattcacactggggaaaagccatacggctgtaatgagtgtggtaagacatttagccactcctcaagtctgagtcaacatgagcgaacccacactggcgagaagccatacgagtgctctcagtgtggtaaggcttttcgacagtctacgcatctgacccaacaccagcggatccacaccggcgagaagccttatgagtgcaatgattgcgggaaggcgtttagccactccagttcattgacaaagcaccagaggatccacactggggagaaaccttatgaatgcaaccagtgtggtcgcgctttctcacagctagcacctctgattcaacaccaacggattcatacaggggagaagccttatgagtgcaaccagtgtggaagagcctttagtcagtctagcctcctaatcgaacaccaacgcatccatacaaaagaaaaaccctacggctgcaacgagtgcggcaagtcattctcccacagcagcagcctcagccaacacgagcgcacacacacgggcgaaaagccttacgagtgccacgactgtggcaagagttttaggcaatctacccacctgacgcagcatagaaggatccatactggcgaaaagccgtacgcatgccgagactgtggcaaagctttcacccatagctcctctctgactaaacatcaaaggacccatactggctag

SEQ ID NO: 211897 - DNA, 1623 bp, synthetic construct
  misc_feature 1..1623: note = Description of Artificial Sequence: Synthetic coding sequence
  source 1..1623: mol_type = other DNA
atggacagcgtggccttcgaggacgtggacgtgaacttcacccaggaggaatgggctttgttggacccttcccagaaaaacctgtatcgggatgttatgtgggaaactatgcgtaatctggctagcattgggaagaaatggaaggatcagaacatcaaggaccactataagcatcgcggtcgcaacctgcggagtcacatgctagagaggttgtatcagacaaaggatggatctcaacgcggtggtatctttagccagttcgcaaaccagaatctgtctaaaaagatccccggggtaaagctttgtgagtccatcgtctatggcgaagtttccatgggacagagcagtctgaaccggcatattaaagaccattccggacatgagcccaaagagtatcaggagtacggagaaaagcccgacaccagaaaccagtgttggaaaccattttcttcccaccactccttcaggacccatgaaatcattcacactggggagaagctgtatgactgcaaagagtgcggtaagactttctttagcctgaaaagaatcaggaggcatataattactcactccggctatactccttataagtgcaaggtgtgtgggaaggctttcgactacccatctagattccggactcacgaacgctctcacacgggcgagaagccttacgagtgtcaagagtgtggcaaggctttcacttgcataacgagtgttcggaggcacatgatcaagcataccggcgatggcccctataaatgcaaagtgtgtggcaaacctttccactccctttccagcttccaggtgcatgaacgaatccacaccggcgagaaaccattcaagtgtaagcaatgcggaaaagccttttcctgctctccgaccttacgcattcatgagcgaactcataccggcgaaaagccttacgaatgtaaacagtgcggaaaagcattttcctaccttcccagcctccgactccatgaacgcatccacactggtgagaagcctttcgtgtgcaagcagtgcggcaaggcattcagatctgctagcacctttcaaatccacgagcggacacatacaggggagaaaccctatgaatgcaaggagtgcggcgaagccttctcctgtattccctctatgcgcaggcatatgatcaagcatacaggtgagggcccatacaaatgcaaggtttgtgggaagccgttccatagtctcagcccgttccgcatccacgaacgaactcacacgggcgagaagccatatgtgtgcaaacactgcgggaaggcctttgtgtcaagtacatctatccgtattcatgaacgcactcatacaggcgaaaaaccatatgaatgtaagcagtgcggaaaggcattttcctaccttaacagctttcggacacatgaaatgattcacacaggagaaaaaccgttcgagtgtaagagatgcgggaaggctttccgttcatcctcatctttccgactgcacgaacggacccacacaggacagaaaccataccactgcaaagaatgcgggaaagcctactcatgccgggctagctttcagcggcacatgcttactcacgcagaagacggtccgccctacaaatgcatgtgggaaagcctgtag

SEQ ID NO: 211898 - DNA, 1425 bp, synthetic construct
  misc_feature 1..1425: note = Description of Artificial Sequence: Synthetic coding sequence
  source 1..1425: mol_type = other DNA
atgctggagcggctgtaccagaccaaggacggcagccagcggggcggcattttttcacagttcgcaaaccagaacctgtctaagaagattcctggtgtcaagctctgcgaatccatagtgtacggggaggtgtcaatgggccagagcagtcttaaccggcacatcaaagatcattccggccacgagcctaaagagtaccaggagtatggagagaaacctgataccaggaaccaatgctggaagccattttcctcccaccactcatttagaactcatgagataatccataccggagagaaactatacgattgcaaggagtgcggaaaaacatttttcagcctgaagagaatccggcggcatattataacccacagcggatacactccttataaatgtaaggtctgcggaaaagccttcgactatccctctcgcttccgcactcatgagcgtagccacaccggcgaaaagccgtatgaatgtcaagaatgcggaaaagcatttacctgcatcacatctgtgagacgtcatatgatcaagcataccggagatgggccatacaagtgcaaggtgtgtggcaagccttttcacagcctttcctctttccaggtgcacgagcggatccacaccggcgaaaaacccttcaaatgcaagcagtgtggcaaggccttcagctgttctcctacgctgcgcatccatgaaaggacgcatacaggtgagaaaccttatgaatgcaaacagtgcgggaaggccttcagctacctgccgtcactccgtttgcatgagaggatacacacgggcgaaaaaccttttgtctgtaaacaatgtggcaaagcttttaggagcgccagcacctttcagatccatgagcgaacccatacgggggagaaaccatatgagtgcaaggagtgtggcgaagcattttcatgtattcccagcatgagacgccatatgatcaaacatactggggagggtccttataagtgcaaagtctgtggcaaaccatttcacagtcttagccctttcaggatccacgagaggactcatactggggaaaagccttatgtttgtaaacattgtggtaaggcttttgtatctagtacaagcatccgtatacacgaaagaacacataccggtgaaaagccatacgaatgtaagcaatgtgggaaagcgttctcatacttgaatagttttcggactcatgaaatgatccacactggcgaaaaaccctttgagtgtaagagatgcggaaaggcatttaggtcctctagcagctttcgcctacacgaaaggacccacacgggtcaaaaaccctatcactgcaaggagtgtggcaaagcctattcatgccgcgcatccttccagcgccatatgctcactcatgcggaggatggacctccctataaatgcatgtgggagtcgctatag

SEQ ID NO: 211899 - DNA, 960 bp, synthetic construct
  misc_feature 1..960: note = Description of Artificial Sequence: Synthetic coding sequence
  source 1..960: mol_type = other DNA
atgggccccctgaccttcatggacgtggccatcgagttcagcctggaggagtggcagtgcctggacaccgcccagaggaatgtttatcggcatgtgatgctggaaaactaccggaatctggtctttctggatttgatcacctgtctggaacagggcaaggaaccgtggaacatgaagcggcacgagatggtggtggcgaagcactccgccctgtgttcacggtttgctcaggacctatggctggagcagaatataaaggacagcttccagaaggtgactctcagcagatatgggaaatatggccataagaacctccagttgcgtaaaggatgcaagagtgttgacgaatgcaaaggtcaccaaggggggtttaacggacttaatcagtgtctaaaaattactacaagtaagattttccagtgtaacaagtatgtgaaggtgatgcacaagttctcaaatagcaacagacacaagataaggcatacagaaaataagcactttagatgtaaagagtgcgacaagtccctgtgtatgctctcccgccttacccagcacaagaaaatacacacgcgtgagaacttttataaatgcgaggaatgtggaaagacttttaactggtctacaaatttatcaaagccgaaaaagatacacacgggggagaaaccttacaagtgtgaggtctgtggaaaggctttccaccaatcctccatattgaccaaacacaaaataattagaaccggagaaaagccatacaaatgcgcccactgcggcaaagccttcaagcagtcttcacacctgacaaggcacaaaatcatccatactgaggaaaagccatataagtgcgaacaatgcggaaaggtgtttaaacagagtccaacccttacgaaacaccaaattatctacacaggtgaggagccgtataagtgcgaggaatgcggaaaagccttcaacctgagctag

SEQ ID NO: 211900 - DNA, 789 bp, synthetic construct
  misc_feature 1..789: note = Description of Artificial Sequence: Synthetic coding sequence
  source 1..789: mol_type = other DNA
atgaagcggcacgagatggtggtggccaagcacagcgccctgtgcagtagattcgcacaagatctctggcttgaacagaacattaaagatagcttccaaaaggtcacactgagcagatacggaaaatatggtcataagaacctccagctgcggaagggctgtaaaagcgtggatgagtgcaagggccaccaagggggctttaacgggctgaatcaatgtctgaaaatcacaactagcaagatcttccagtgcaataagtatgtgaaagtcatgcacaaattctctaattctaataggcacaaaattaggcatacagaaaacaagcacttccgatgtaaggaatgtgataagagcctgtgcatgctgtcccgtctcacacagcataaaaaaattcacacccgagaaaacttctacaagtgtgaggagtgtgggaagacattcaactggagcactaacttgagcaaacctaagaaaatccataccggtgagaagccttataagtgtgaggtttgcggtaaggcattccaccagtccagcattcttaccaaacacaaaattattagaacgggagaaaaaccatacaaatgcgcccactgtggtaaagccttcaagcagtcatctcacctaactcggcataagattattcacactgaagaaaagccatataagtgcgagcaatgtggaaaggttttcaagcagagccccaccctcaccaagcaccaaatcatttatacgggcgaagagccttacaagtgtgaggagtgtggtaaggcttttaacctgtcttag

SEQ ID NO: 211901 - DNA, 789 bp, synthetic construct
  misc_feature 1..789: note = Description of Artificial Sequence: Synthetic coding sequence
  source 1..789: mol_type = other DNA
atgaagcggcacgagatggtggtggccaagcacagcgccctgtgcagccgcttcgcccaggacctttggctggaacagaacattaaggacagcttccaaaaagtgacactgtcccgctatggcaagtatgggcataagaaccttcagctacgcaaaggctgcaagagcgtggatgagtgcaagggtcatcaaggcggcttcaatggcctcaatcagtgcctgaagatcacgacatccaagatctttcagtgcaacaaatatgtcaaagtgatgcacaagttcagcaacagcaacagacataagatacgacatactgagaacaagcacttccgttgcaaagaatgcgacaaaagcctctgtatgttaagcagactgacgcagcacaaaaaaatacacacccgggaaaacttctataagtgcgaagagtgtgggaaaactttcaactggagcacaaacctatccaaacctaaaaaaatccacacaggggaaaagccatacaaatgtgaggtgtgcgggaaagcatttcaccagagtagtatactgaccaagcataagatcatcagaacaggcgaaaaaccttacaagtgcgcccactgcgggaaggcctttaaacagtcctcacacctgactaggcacaagattatccacaccgaggagaagccctataagtgtgaacagtgtggcaaagttttcaagcaatcccccacccttaccaagcatcagattatttacaccggcgaggaaccctataagtgcgaggaatgtggcaaggccttcaacctgtcttag

SEQ ID NO: 211902 - DNA, 864 bp, synthetic construct
  misc_feature 1..864: note = Description of Artificial Sequence: Synthetic coding sequence
  source 1..864: mol_type = other DNA
atggacgtggccatcgagttcagcctggaggagtggcagtgcctggataccgcccagcgtaatgtgtatagacatgtcatgctggaaaactaccggaacctggtcttccttgccttgtgcagtaggttcgcccaggacttgtggttagagcagaatatcaaagatagttttcagaaggtgactttgtctaggtatggaaagtacggtcataaaaatcttcaactccggaagggatgtaagtctgtcgatgagtgtaaaggacatcagggggggttcaatgggctcaatcagtgtctcaagatcacaactagtaagatattccagtgtaataagtacgtgaaggtcatgcacaagttcagcaactctaatcggcataagatcaggcatacagagaacaagcactttaggtgtaaggagtgcgacaagagcctgtgcatgctgtcaagacttacccaacacaagaagatccatacacgggagaatttttacaagtgtgaggaatgtgggaagacatttaactggagcacgaatctgagcaagccaaagaaaattcacacaggtgaaaagccatacaaatgcgaggtctgcgggaaggcattccatcagtcctcgatcctgaccaagcataagatcattagaacgggggagaaaccatataaatgcgctcactgtggaaaggccttcaagcagagcagccacttaacccgacacaaaatcatccataccgaggagaaaccgtataaatgcgagcaatgtggtaaggtgttcaaacagagtccaacccttacaaaacaccagatcatctacaccggcgaggaaccctataaatgcgaggaatgtggcaaagcatttaatctgtcctag

SEQ ID NO: 211903 - DNA, 882 bp, synthetic construct
  misc_feature 1..882: note = Description of Artificial Sequence: Synthetic coding sequence
  source 1..882: mol_type = other DNA
atgggccccctgaccttcatggacgtggccatcgagttcagcctggaggagtggcagtgcctggataccgcccagaggaacgtgtaccgtcatgtgatgctggagaattatcggaacctggtgtttcttgccctgtgctccagatttgcccaagacctttggctggagcaaaacatcaaagattcctttcagaaagtgactctgtctagatatggcaagtacgggcacaagaatctacaattgagaaagggctgcaaatccgtcgacgagtgtaaaggccaccagggaggtttcaatggcttgaatcagtgcctcaaaatcacaaccagtaagatcttccaatgcaacaagtacgtgaaggtcatgcacaagttttcaaattctaataggcataaaattcgacatacagagaacaaacactttcggtgcaaagaatgcgacaagagtctgtgcatgcttagccgtctgacccagcacaagaagattcacactagggagaacttctataaatgcgaggaatgtggcaagaccttcaactggagcacgaatctttctaaacccaagaaaatccacacgggtgagaaaccctacaagtgtgaggtatgtgggaaggcttttcaccaatcctcgatactcaccaaacacaaaattatcagaaccggcgaaaagccttacaaatgcgctcactgcggcaaggctttcaagcagtcctctcacttgacccgacataaaatcatacacaccgaggagaaaccatacaagtgcgaacaatgtggcaaagttttcaagcagagtccaactctgaccaagcaccagataatctacacaggcgaggagccatataaatgcgaagaatgtggtaaggctttcaacctctcttag

SEQ ID NO: 211904 - DNA, 381 bp, synthetic construct
  misc_feature 1..381: note = Description of Artificial Sequence: Synthetic coding sequence
  source 1..381: mol_type = other DNA
atgggccccctgaccttcatggacgtggccatcgagttcagcctggaggaatggcaatgtctggacaccgcacaacgtaacgtgtatcgtcatgttatgctggaaaactacaggaacctggtgtttctcgaccttattacctgcctcgaacaaggtaaagagccgtggaacatgaaaagacacgagatggtagttgccaagcacagtgctgtggcctttacattcgatctgtctggtttaaacatcctgagctttcagagcattctccccttcgtttcggctctctatgtcatggggaacaggaaccagtgtctgcaaaagcaccttgaggcccgtaataaagacctgtgcgtgcttgttctgcccaagacgttcggttag

SEQ ID NO: 211905 - DNA, 1929 bp, synthetic construct
  misc_feature 1..1929: note = Description of Artificial Sequence: Synthetic coding sequence
  source 1..1929: mol_type = other DNA
atggacagcgtgagcttcgaggacgtggccgtgaacttcaccctggaggaatgggcactcctggattcctcccaaaaaaaactttatgaggacgtgatgcaagaaacgttcaaaaaccttgtgtgtctgggcaagaagtgggaagaccaggacatcgaggatgaccaccgcaaccagggcaaaaacagacgctgccatatggtggagaggctgtgtgagagccgccgaggttctaagtgtggcgagactacatctcagatgcctaatgtgaacattaacaaagaaacattcacaggggcaaaaccgcatgagtgctccttttgtggacgggattttattcaccacagtagtctgaatcgtcatatgagatctcacactggacagaaaccaaatgaataccaggagtacgaaaagcagccatgtaagtgcaaagctgtgggtaagaccttcagctaccatcactgctttaggaaacatgaacggacacatacaggcgtcaagccctacgaatgtaagcagtgcggcaaagcatttatttattatcagcccttccagagacatgaaagaacacacgcagggcaaaagccttatgaatgtaaacagtgtgggaaaacgttcatttactaccaatcctttcagaagcacgcacacaccggcaagaaaccgtatgagtgtaaacagtgtggcaaagcatttatctgttatcagagtttccaacgccataagcggacccatacaggcgagaaaccctatgagtgcaaacagtgtggcaaagctttcagctgtccaacttactttcgcacccacgagaggacgcacacaggcgagaaaccatataaatgtaaggaatgtggaaaggcatttagctttctcagctcgtttagacggcataaaaggacacactccggggaaaaaccctacgaatgcaaggagtgtggaaaagcgttcttctactccgcttcttttcgagcccacgttatcatccatacaggggcaaggccttacaagtgtaaagagtgcggcaaagcctttaactcctcgaacagttgcagagtgcacgaacgaacccatatcggggagaagccatatgaatgcaaacggtgcggcaagtcattcagttggagtatttccctcaggctgcatgagcggacccacacgggcgagaagccctacgagtgcaagcaatgtcacaagacattcagcttttccagtagcctgagggaacacgaaaccacccacaccggagagaagccatacgagtgcaaacagtgcgggaaaaccttctcgttcagttcaagcttgcagcgccacgagcgaacccacaacgccgaaaagccttacgagtgtaaacaatgcggcaaggcctttagatgctccagttatttccggatccacgagcggagccacactggggaaaagccttacgaatgcaagcagtgtgggaaagtgttcattcgatcttcctcctttagactgcacgagaggacgcacaccggcgagaagccgtacgagtgcaaactgtgcgggaagacttttagctttagctcctctctgagggagcacgagaaaattcataccggaaacaaacccttcgagtgcaaacagtgcgggaaagcgtttctaagaagttcccagattcgattgcacgagaggacacatacaggggagaaaccataccaatgcaaacagtgcggcaaagctttcattagctcttctaaatttcggatgcacgagaggactcacacgggcgagaagccctatcgctgcaaacagtgcggcaaagcgtttcgatttagctccagcgtgaggatccatgaaagatcccacactggggagaagccttacgagtgcaaacagtgtggtaaggcttttatttcctcatctcacttcagactgcacgaacgcactcacatgggggaaaaggtgtag

SEQ ID NO: 211906 - DNA, 1374 bp, synthetic construct
  misc_feature 1..1374: note = Description of Artificial Sequence: Synthetic coding sequence
  source 1..1374: mol_type = other DNA
atgagccagggcagcgtgaccttccgggacgtggccatcgacttctctcaggaggaatggaagtggctccagcccgcccagcgggacctgtatcgatgcgtgatgctggaaaactacgggcatctcgtcagcctgggcctgagcatttctaaacctgatgtggtctcgctcctggagcagggcaaggaaccttggttaggcaaaagggaagttaaaagggatctctttagtgtttcagaaagcagcggggaaatcaaggatttttcacctaagaacgtgatatacgacgacagttcccagtaccttatcatggaaaggattttgtctcagggcccagtgtatagcagtttcaaaggtggatggaagtgtaaagaccataccgagatgctgcaagaaaatcagggatgcattcgaaaggtgaccgtcagccatcaggaggcactggcacagcacatgaacatctccactgtggaacggccctacgggtgccacgaatgtggcaagacatttggccggaggtttagcctggttctgcatcagcgcactcacaccggagagaagccctacgcttgtaaagaatgcggcaagacattttcccagatttccaacttagtgaagcatcagatgattcataccgggaaaaaaccccacgagtgtaaagattgcaataaaacctttagctacctgagcttcctcatcgagcaccaaaggacacataccggcgaaaagccttacgaatgcaccgaatgtggaaaagctttcagtcgcgctagcaatcttacccggcatcagcgaatccacatcggaaaaaagcagtatatttgccgcaagtgcgggaaggcctttagcagcggctctgaactgatcaggcaccaaatcacgcacaccggggaaaagccgtatgaatgtatcgagtgcgggaaagcattccgcagattttcccacctgacaagacaccagtccattcacactacaaagactccctatgagtgcaacgagtgccggaaagctttcaggtgccacagcttcctaatcaagcatcaacgcattcatgccggagaaaaactttacgaatgcgatgaatgcggtaaagtctttacctggcatgcatcattgattcaacacactaaaagccacactggcgagaagccatacgcctgcgccgaatgcgataaggccttcagcaggtctttttccctcatcctacaccagcgcacgcacactggggaaaagccgtatgtgtgtaaggtctgtaataaaagtttttcatggtcatccaacctggctaaacaccagcgaactcacacactagacaatccctacgaatacgagaacagcttcaattatcacagtttccttactgagcatcagtag

SEQ ID NO: 211907 - DNA, 351 bp, synthetic construct
  misc_feature 1..351: note = Description of Artificial Sequence: Synthetic coding sequence
  source 1..351: mol_type = other DNA
atgagccagggcagcgtgaccttccgggacgtggccatcgacttcagccaggaggagtggaagtggctccaacccgcccagcgggacctctacagatgcgtgatgctcgagaattatgggcatctggtgagcctgggactgtctatcagcaaaccagatgttgtttctctcctcgagcaaggtaaagaaccgtggctggggaagagggaagttaagcgcgatctcttttcagtatccgagtcttctggggagataaaagatttttcccctaagaacgtgatttacgacgatagctcccagtatctgatcatggagaggatactaagtcagggcccggtgtatagctcatag

SEQ ID NO: 211908 - DNA, 684 bp, synthetic construct
  misc_feature 1..684: note = Description of Artificial Sequence: Synthetic coding sequence
  source 1..684: mol_type = other DNA
acccacaccggcgagaagccctacgcctgcaaggagtgcggcaagacctttagtcaaatttctaatttggtgaagcaccaaatgatacatactggaaaaaagcctcacgaatgcaaggactgtaataaaaccttcagctacttgtctttcctaatagagcaccaaaggactcatacgggagaaaagccatatgaatgcactgaatgcgggaaagccttctccagagcttctaatctgacccgtcaccagcgcattcatatcggcaagaaacagtacatatgtaggaagtgtgggaaggcctttagcagcggaagcgagctcattaggcaccagatcactcacacaggcgaaaagccttatgagtgcatagagtgcgggaaagcattccggaggttcagtcacttgacaaggcaccaacgaatccatgccggggagaagctctatgagtgcgatgaatgtggtaaagtttttacctggcatgccagcttgatacagcacacaaagtctcataccggggaaaaaccttacgcttgtgccgaatgcgacaaggccttctcacgttccttttctctgattttgcaccagcgcacacatactggagagaaaccctacgtgtgcaaagtgtgcaataagtcttttagctggagtagtaacctggccaagcaccagagaacccacacctag

SEQ ID NO: 211909 - DNA, 1065 bp, synthetic construct
  misc_feature 1..1065: note = Description of Artificial Sequence: Synthetic coding sequence
  source 1..1065: mol_type = other DNA
atggagcggatcctgagccagggccccgtgtacagcagcttcaaggggggttggaagtgcaaagatcacactgagatgctccaggaaaaccagggatgtatccgcaaggtgacggtctcgcaccaggaagccctcgcacagcatatgaacatttcaactgtggagcgcccctacggctgtcacgaatgcggcaaaacattcggacgccgcttctctctagtgctccatcagagaacacacacaggggagaagccatatgcatgtaaggaatgtggcaaaactttcagtcagatctcaaacctggtgaagcatcagatgattcacacaggtaaaaagccgcacgaatgtaaggattgtaacaagaccttctcctatttgagttttcttatcgagcaccagcgcacccataccggggagaagccctatgagtgcactgagtgtggtaaggccttctcgcgcgcttctaatctcactcgacatcagcggattcacattggaaaaaagcagtacatctgtagaaagtgcggcaaggctttttcttctgggtctgagctcatccggcatcagataacccatacaggggaaaaaccctatgagtgtattgaatgtgggaaggcatttcgacggttttcgcatctgaccagacatcagtccatccacaccaccaagactccctatgagtgcaacgagtgccggaaagcctttagatgccacagttttttgattaagcatcagcgaattcatgcaggcgaaaagctctatgagtgtgatgagtgtgggaaggtgttcacgtggcacgcctccctgatccagcacacaaaatcacatacaggtgagaagccgtatgcctgtgccgaatgcgataaagcttttagcagatctttcagtctgatcttacatcagagaacgcacacaggggagaagccatatgtctgtaaggtatgcaacaagtcgttttcctggtccagcaacctcgcgaagcatcagagaacccatactctggataacccctacgagtacgagaatagctttaactaccattcctttctgacggagcaccagtag

SEQ ID NO: 211910 - DNA, 1425 bp, synthetic construct
  misc_feature 1..1425: note = Description of Artificial Sequence: Synthetic coding sequence
  source 1..1425: mol_type = other DNA
atggagctgctgaccttccgggacgtggccatcgagttcagccccgaggagtggaaatgtctggacccagaccagcagaatttataccgagacgtgatgctggagaactataggaatcttgtgtcattgggcgtagctatatcaaaccctgacctggtaacttgccttgaacagcggaaagagccgtacaatgtaaaaattcacaagattgtcgcaaggcccccagcaatgtgttctcactttacccaggatcattggcctgttcagggcattgaggattcctttcacaagctgattttacggcgttatgaaaagtgcggccacgacaacttgcaactgagaaaggggtgcaagtcactcaacgaatgcaagcttcagaagggtgggtacaacgaattcaacgagtgcttgtctaccacccagtcaaagattctgcagtgcaaagcgtccgtaaaagtagtctctaagtttagtaacagcaacaaacgcaaaaccagacatacgggcgagaagcatttcaaggagtgcggcaagagctttcagaagttttctcatctgacccagcataaggtgatccacgcgggagaaaagccatacacttgtgaggagtgtggaaaggccttcaaatggtctcttatctttaacgaacacaagagaattcacactggagagaagcctttcacatgtgaggaatgtgggtcaatttttaccacaagctcccacttcgctaagcataagatcattcatactggagagaaaccgtataagtgtgaagagtgtggtaaggctttcaaccgctttaccacactcacaaagcacaagaggattcacgcgggcgagaagccgatcacttgcgaggagtgcagaaaaattttcacctcctctagcaatttcgccaagcacaagagaatacataccggtgaaaaaccctacaagtgcgaagaatgtgggaaggctttcaatagaagtacaactctcacgaagcacaagaggatccataccggggagaaaccctacacgtgcgaggagtgcggtaaggcattccggcagtcctccaaacttaacgaacataagaaggtgcacaccggagaaagaccatataaatgtgacgaatgtggcaaagctttcggccggtcacgggtgctgaatgagcacaaaaagatccataccggagaaaagccatataaatgtgaggaatgtggtaaagcgttccggagaagcacagatagatctcagcacaagaaaatccacagcgccgacaagccttataaatgcaaggaatgtgacaaggcattcaagcagttcagccttctcagccagcataagaagatccataccgtagataagccatataagtgcaaagattgcgataaggcatttaaacgtttttctcacctcaataagcacaagaagatacacacttag

SEQ ID NO: 211911 - DNA, 606 bp, synthetic construct
  misc_feature 1..606: note = Description of Artificial Sequence: Synthetic coding sequence
  source 1..606: mol_type = other DNA
atggagctgctgaccttccgggacgtggccatcgagttcagccccgaggaatggaaatgcctcgaccccgatcagcaaaatctgtatcgtgacgttatgctggagaactataggaacttggttagtctaggcgtggccattagcaatcccgacttggtaacctgtctcgagcaaaggaaagagccttataacgttaagattcataagatagttgcaaggcccccagctatgtgctcccacttcacgcaggatcactggccagtgcaggggattgaggactcatttcacaagctgatcctccgccgctatgaaaagtgtggacacgacaacctgcagctcagaaagggctgcaaatcgctcaacgagtgcaagctgcagaagggtggatataacgagtttaacgagtgcctctcaaccacacagtcaaaaattctccagtgcaaagcttcagtcaaggtagtgagcaaattctctaactccaataagaggaagacacgacacacgggcgagaaacattttaaggaatgcggcaagtccttccaaaaattctcccacctgacacagcacaaaaatagctcaatctcgatgacaaccagcccattctag

SEQ ID NO: 211912 - DNA, 5064 bp, synthetic construct
  misc_feature 1..5064: note = Description of Artificial Sequence: Synthetic coding sequence
  source 1..5064: mol_type = other DNA
atgaccgaccccctgctggacagccagcccgccagcagcaccggcgaaatggacggcttatgccctgagctgcttctgattcccccgcccctgagtaacagaggcatcctcggtcctgttcagtctccttgtccctcgcgtgaccctgcccccatacctactgaacctggatgcctgctcgtcgaggcaaccgcaaccgaggaaggacccggcaacatggagattatcgtcgaaactgtggctggtaccttaactcctggagctccaggggagacgcctgccccgaagctacccccaggagagagagagcccagccaggaggctggcacgccactcccagggcaggagacagccgaagaggagaacgtggagaaagaggagaaatctgatactcaaaaggattcccagaaagcggttgataaaggacaaggagcacagagattagagggcgacgttgtgtctggtacggaaagcctatttaagacgcatatgtgtcctgaatgtaaaagatgtttcaagaaaaggactcatctggtcgagcatctgcacctgcatttccctgacccatctcttcagtgtcccaattgccaaaagttcttcacgtcaaagtctaaacttaagacccatttgctgcgggagctgggcgagaaggcacatcattgccctctctgccactattcagccgtggaaaggaacgccctgaatcggcacatggctagcatgcacgaggatatcagcaatttctatagcgacacgtatgcctgccccgtgtgccgggaggagttccggctttctcaagccctgaaagaacacttaaaaagccatacagctgccgcagccgcagagcccctgcccctgagatgtttccaggagggatgctcctatgccgcaccggatcggaaagccttcataaagcatctcaaggagacacacggagtgcgagccgttgagtgtcgacatcattcctgtccaatgttatttgcaaccgctgaagcaatggaggcacaccataaatcgcattatgcattccactgcccccattgcgatttcgcctgttccaataaacatcttttcagaaagcacaagaagcagggccatccagggtccgaagagctgcggtgtacgttttgtccctttgccacgtttaaccccgttgcatatcaagatcacgtgggcaaaatgcacgctcacgagaaaatccaccagtgccctgaatgtaattttgccaccgctcataagagagttctcatccggcacatgctgctccatacaggcgaaaagccacataagtgtgaactttgcgactttacttgccgagacgtatcctatctgagtaaacatatgttaacgcacagtaacaccaaggactatatgtgtaccgaatgtggttacgtgactaagtggaaacactacctgagagtccatatgcggaagcacgccggagacctgcgctaccagtgcaatcagtgctcttatcgctgccacagggcagatcagctttcttcccataagctgagacatcagggcaaatcgctcatgtgtgaggtatgtgcatttgcctgcaagaggaaatacgaactgcagaagcatatggcatcccaacatcatccaggcaccccggctcctttgtacccatgtcattactgcagctaccagagcaggcataagcaagctgttttaagccacgaaaattgtaaacacacgcggctgcgggaattccactgcgctctgtgtgactatcgaactttctctaacacgactctgctcttccacaagagaaaagcccacgggtacgttcccggggaccaagcctggcagctcaggtacgccagtcaggaaccagagggtgccatgcaggggccaacaccacctcccgatagcgaaccttccaaccagctgtctgcccgtccggaggggccagggcacgagccgggcactgtcgtggacccttcactggaccaggctctgcccgaaatgtccgaagaggtgaatacaggccgacaggagggctccgaagcaccccacgggggggatttgggtggctccccctcgcccgcagaggtagaagaggggtcttgcacccttcatctggaagcgcttggagtggaactggagtccgtcactgagcctcctctggaggaagtgactgaaaccgcccctatggagttcaggcccctggggcttgaaggtcccgatggattggaagggcccgaattgtcctccttcgaagggattggaacctcggacctgtccgcagaagagaatcctctcctggagaaacctgtgtcagaaccatccaccaaccccccaagtctggaggaggctcctaataactgggtgggtaccttcaaaacaacgcctccagcggagaccgcgccgcttccacctttgcctgagtcggagagcttgctcaaagctcttcggcgtcaggacaaggagcaggctgaagccctggtgctggagggcagggtccagatggtcgtgatacagggagaaggcagagctttcagatgtccgcattgtccctttatcaccaggagggagaaggccttgaatctgcatagtcgtaccgggtgtcagggccgccgcgaaccgctgctctgccccgagtgcggagcgagtttcaagcaacagcgcggactgagtacccacctgctgaaaaaatgccctgttctcctcagaaaaaacaagggtctgccccgcccggactctccaattcccctgcagcccgttttacctggaacccaggcatcagaggacacagaaagtggcaaacctccccctgccagccaagaagccgagctgttgctccccaaggatgcccctcttgaactccccagagaacctgaggagacagaggagccattagccaccgtgtccgggtctcctgtgcctcctgccgggaacagcctgccaaccgaagcaccaaagaaacactgcttcgaccctgtccccccagccggaaactcttctccaacagaagccccaaagaagcaccacctggacccagtacccccagccggtaacagttcaccaaccgaggcactgaaaaagcaccggttcgaacagggtaagttccactgcaacagctgcccttttctttgctcaagactgtcgtcaatcaccagccacgttgccgaaggctgcaggggaggacgggggggcggaggtaagagaggaacaccccagactcaacccgatgtgtctcccttatccaacggggactccgctcctcctaaaaatggttccaccgagagttcatccggcgatggggacaccgtgcttgtgcagaagcagaaaggcgcacggttttcatgccctacttgtcctttttcctgtcaacaagagcgcgccctcagaacgcaccagatcagaggctgccctctggaggagtcaggtgaactgcactgctctttgtgtccttttacggcaccagcggccaccgcgctacgcttacaccagaaacggagacaccctactgcggcacccgcccgggggccaagacctcacttgcagtgtggcgattgtggctttacttgtaagcagtccagatgtatgcaacagcatagaaggcttaaacatgaaggggtgaagcctcaccagtgtcccttctgcgacttctcgacgacccgacgttatcggctggaagcccatcagtctaggcatactggtatcgggaggattccttgtagcagttgtccccagacattcggtacaaatagcaaacttcgcctgcatagactgcgagtccacgataagacaccaacccatttctgccctctgtgcgactactctggttacctgaggcacgatataacacgccatgttaactcgtgccaccagggaacacccgcgtttgcctgctcacagtgcgaggcgcagtttagtagcgaaactgcactcaagcagcacgctctaaggcggcaccccgaaccggctcagcctgcccccggtagtcccgccgagacaaccgaagggccactgcattgctcacgttgtggactgctctgtccatcaccggcctcactaagagggcatacccgtaagcagcatcctaggctggaatgtggggcctgccaggaggcctttccaagtagactagcactcgatgagcatcggagacagcagcacttctcacataggtgccagctgtgtgattttgctgccagagaacgggtcgggctcgttaagcattacctagaacaacacgaagagactagcgctgccgtagcggctagcgacggtgacggagacgccggacaacctcccctgcactgccctttctgcgatttcacctgccgccaccagctggtgctcgaccatcatgtgaaaggccatggcggtacccggctatataagtgcactgattgtgcatattcgaccaagaatcgccaaaaaatcacttggcactctaggattcacacgggtgagaaaccatatcactgccatctgtgcccctatgcgtgcgccgacccttcaagactcaaataccacatgaggatacataaagaagagcgaaaatatctgtgccccgaatgtggatataaatgcaagtgggtcaatcaactgaaatatcatatgaccaaacacaccggattaaagccctatcagtgtcctgagtgcgagtattgcacaaatcgggcggatgctctccgggttcaccaggaaaccaggcatcgggaagcacgcgccttcatgtgcgaacagtgcgggaaagcattcaaaacccgctttcttttgcgaacccacctcaggaagcatagtgaagcaaagccttacgtctgtaatgtgtgccatagagcatttagatgggccgctggtctgcgacatcacgcgctgacccacaccgacagacacccttttttctgcaggctttgtaattataaagcaaagcagaaattccaggttgtcaaacacgtgcgcagacaccatcccgatcaagccgatccgaatcaaggcgtgggcaaagaccccaccaccccaacagtgcatttgcatgacgtgcagctggaggacccaagccccccggcccctgccgcccctcacactggaccagaaggctag

SEQ ID NO: 211913 - DNA, 45 bp, synthetic construct; identical to SEQ ID NO: 105719
  misc_feature 1..45: note = Description of Artificial Sequence: Synthetic coding sequence
  source 1..45: mol_type = other DNA

SEQ ID NO: 211914 - DNA, 5064 bp, synthetic construct
  misc_feature 1..5064: note = Description of Artificial Sequence: Synthetic coding sequence
  source 1..5064: mol_type = other DNA
atgaccgaccccctgctggacagccagcccgccagcagcaccggcgaaatggatggcctgtgtccggaactgctgctgatcccgcccccgctttcaaatagggggattttgggaccggtgcagagcccatgcccttcccgcgatcccgcgcccatccctacagagcctggctgcctcctagtggaggccacggccacggaggaggggccaggcaatatggagatcatagttgaaaccgtggctgggaccttgacccctggcgctcctggggagaccccagcgccaaaactgcctccgggtgaacgcgaaccctcccaagaagcgggcactccccttcctggccaggaaaccgcagaagaagagaacgtcgagaaggaagagaagtctgacacgcagaaagatagccagaaggccgtggataagggtcagggcgcacagcgactggaaggggatgtggtgtctggcacagagtctctttttaaaacccatatgtgcccagagtgtaagagatgctttaagaagaggacccatctggttgaacacctacacctccactttcccgatccatccttgcaatgtccaaactgccagaagtttttcacaagcaaaagcaagctcaaaacacacttactgcgggaattgggtgagaaggcacaccactgtccattgtgtcattactccgcggttgaaaggaatgcactgaatcgacacatggcgtccatgcacgaggacattagcaacttctatagtgacacatacgcgtgtcctgtgtgcagagaagagttcaggttgagtcaagctttgaaggagcatctgaaaagtcacaccgcggccgctgcagccgaaccactccccttgcgttgctttcaagaggggtgcagttatgcagcgcctgatcgcaaagccttcatcaagcacctgaaggaaactcacggcgtgagggctgtcgagtgtaggcatcattcttgccccatgctgtttgctacagctgaggctatggaagcccaccacaagtcgcactacgcctttcattgcccccattgtgactttgcatgttcaaataaacacttgttcagaaagcacaagaaacagggacaccccggatctgaggaactgaggtgcaccttctgtccttttgccacattcaatcctgtggcctatcaggatcatgtagggaaaatgcacgcccacgagaaaattcaccagtgccctgagtgtaacttcgcgacagctcataaaagagtcctcattcgtcatatgctccttcacaccggagagaagccccacaagtgcgagctgtgcgattttacatgcagagacgtctcctatttatccaaacatatgctgactcatagtaatacaaaagactacatgtgtaccgagtgtggatacgtgacgaagtggaagcactatctccgggttcatatgcggaagcacgccggtgatctgcgttaccaatgcaaccagtgtagctataggtgccatcgtgctgatcaactctcttcccataagctacgccatcaagggaaatccctcatgtgcgaagtgtgcgcctttgcatgcaaaaggaaatacgagctccagaaacatatggcatcccagcatcatcccggtacacccgcaccgttgtacccttgccattattgcagttaccagtcacgccacaaacaggccgtgctgtcccatgagaattgtaagcacactagactgagggagtttcattgtgcattgtgcgactacagaacgttctctaacacaaccctgctgttccataagcgtaaagcgcatggttatgtccccggcgaccaggcctggcagctgcggtatgctagccaggagccggagggcgctatgcagggaccgacaccacctcctgacagcgagcccagtaaccagttgtcagcccggccagagggcccaggccatgaacctggtactgttgtggatcccagcctcgaccaggctctgccagagatgtccgaagaagtgaatacagggcggcaggagggttccgaagcacctcacggcggtgatctgggcggatctcccagcccagcggaagtggaagaagggtcatgtactttacaccttgaagcacttggagtggagcttgagtctgtgaccgaacccccgctcgaggaagtgacggagacagctcctatggaatttagaccactcggtctggaaggccccgatggtcttgagggaccggaattatcttcatttgaaggcatcggaacgtccgaccttagtgctgaagagaacccactcctggagaagcccgtaagcgaaccatccaccaacccaccttcacttgaagaggctccgaataactgggttgggacctttaaaaccacacctccagctgagactgcgccactcccccctctgcccgaatctgagtcactcctcaaagctctccggcgacaggacaaagaacaggcagaagctctggtccttgagggacgagtgcaaatggtagtaatccagggcgaaggaagagctttccgttgccctcactgcccattcataaccaggcgggaaaaggcccttaacttacacagtagaaccggctgccaagggcggcgggagcccctcctgtgccccgagtgcggcgcgagcttcaaacagcaaagggggttatctacccatcttctcaaaaaatgcccggtgctcctgcggaagaacaagggtctccctcgacccgacagcccaatccctcttcagcccgtactgcctggcacacaagctagtgaagatactgaatccggcaaacctcctccggcaagccaggaggctgagctcctgctgcccaaggatgcacccttggagctgcctcgggaacccgaggaaactgaggaacccctggcaaccgtgtccggctcccccgtgccccccgctgggaatagcctgccaaccgaagccccaaaaaaacattgtttcgatcccgttccgccagccggtaacagctcccctaccgaggccccaaagaagcaccacctggacccggtccccccggctggaaattcaagccccacagaggctctgaagaaacaccgtttcgagcaagggaagttccattgcaattcctgtccgttcctgtgtagccgcctgagctcgatcaccagccatgtagctgaaggatgccgcggcggccggggcggtggggggaagcgagggacccctcagacccagccagatgtgtcacctctgagcaatggagattccgcccctccaaaaaatggttcaacagagagttccagcggggatggagacactgtactcgtgcaaaagcaaaagggggcccggttcagctgccccacttgtcctttctcttgccaacaggagcgagcactgcggacacatcaaattcggggctgcccactagaagagtccggggagttacattgcagcttgtgtcctttcaccgcccctgcagcaacggccctccggcttcaccagaagaggcggcaccctacagccgcccccgcaaggggccccagacctcaccttcagtgtggcgattgcggctttacttgcaagcaaagtaggtgcatgcagcagcacagacgcctgaaacacgagggagtgaagccccatcaatgccctttctgcgactttagcacgacccgccgatatcgcctagaggctcatcagtcccgacacacgggcatcggtagaatcccttgttcttcctgtccccagacctttggaactaactccaagttacgactgcatagactacgcgtgcatgacaaaacccccacacatttctgcccactgtgtgactacagtggatatctgagacatgatatcactcgccatgtgaactcttgccatcagggaaccccagcctttgcatgttcccagtgcgaagcccagttcagcagcgagacagctttgaaacagcatgccctccgccgtcaccctgaacccgctcaacccgcccctggctcccctgccgaaacaactgaggggcctcttcattgttctcggtgtggcctgctgtgcccttcccctgcatccctgagggggcacacgagaaagcagcacccaagattagaatgcggtgcatgccaggaagccttcccctctaggttagcactggacgaacacaggagacagcagcacttctcccaccgctgccaactatgcgatttcgctgctcgagaacgcgtcggcctagttaagcactacctcgaacagcacgaggaaacgtcagccgccgtcgctgcatccgatggggatggggacgccgggcagcctcctctgcactgcccattctgtgatttcacatgccgacaccagctggtcctggaccatcacgtgaaaggccatggcggaaccagactgtataagtgtaccgactgcgcctactccacaaagaatcgacagaagattacttggcactcgcgcatccacacaggggagaaaccctaccattgtcatctctgcccctatgcatgtgccgaccctagccggctcaaatatcatatgcggatacacaaggaggagagaaagtatctttgccctgagtgtggctataaatgcaagtgggtgaatcagctgaaatatcatatgacaaaacatactggtttgaaaccatatcagtgccctgaatgtgagtactgtaccaatcgcgctgatgccctgcgggtccaccaagagacaagacatagggaagcccgggcgtttatgtgcgaacagtgcggcaaagcttttaaaactcgatttctgctgaggacccacctcagaaagcatagtgaggcgaagccgtacgtctgcaatgtgtgccaccgagcattcagatgggccgctggactgaggcaccatgctctcacccatacggatagacacccttttttctgtaggttgtgcaactacaaggcaaagcagaaattccaggttgtgaagcatgtgcggagacatcatcccgaccaggccgaccctaaccagggtgtgggcaaggacccaaccacccctactgtgcaccttcatgatgtccagctcgaggacccctcccccccagctccagccgccccccacaccggccctgaagggtag

SEQ ID NO: 211915 - DNA, 81 bp, synthetic construct
  misc_feature 1..81: note = Description of Artificial Sequence: Synthetic coding sequence
  source 1..81: mol_type = other DNA
atgaccgaccccctgctggacagccagcccgccagcagcaccggcgagatggatggcctctgtccagagctccttctctag

SEQ ID NO: 211916 - DNA, 1824 bp, synthetic construct
  misc_feature 1..1824: note = Description of Artificial Sequence: Synthetic coding sequence
  source 1..1824: mol_type = other DNA
atgctgctggcccagatcaaccgggacagccagggcatgaccgagtttcccggcggagggatggaggcacagcacgtcaccctgtgccttacagaggccgtgacagtcgccgacgctaagctgatcgacgggcaggtgatccaattggaggacggaagcgctgcctatgtgcaacatgtccctataccaaagagcaccggtgattcgcttcggctggaggacggccaggcagtacagctcgaggatggcacaacggcgtttatccaccacacctctaaggactcatatgatcagagcgccctccaggccgtgcaactggaagacggaacaacagcctatatacatcacgctgtgcaagtgccgcaaagcgatactatcttggcgatccaggccgatgggacagtggcaggtcttcataccggcgacgctactatagatcccgacactatcagtgctctagagcagtacgctgccaaggtgagcatcgatgggtcagagtccgtcgctggtacgggcatgattggggagaacgagcaggagaaaaaaatgcagatcgtgttacaggggcatgccactcgagtgactgccaaatctcaacagtccggggaaaaggccttccggtgcgagtacgatggatgcggcaagttgtacacaactgctcaccacctcaaggtgcatgaacggtcacacaccggcgatcgcccatatcagtgcgaacatgccgggtgcggaaaggcatttgccaccgggtatgggctgaagagccacgtccggactcacactggtgagaagccataccgatgcagtgaagacaactgcacaaagtctttcaaaacatccggtgatctacagaaacacattcgcacacacactggggagcggcccttcaagtgtcctttcgagggttgtggaagaagctttacgacgagcaacattagaaaggtgcacgtcaggacacataccggcgagcggccttactactgtacggaaccagggtgcggtcgggctttcgccagcgccacaaattacaagaatcacgtacgcatacatacaggcgagaagccctatgtgtgcacagtgcccgggtgcgacaaacgtttcactgaatactcaagcctgtacaagcatcatgtcgtgcatactcatagcaagccatataattgcaatcactgtggaaagacatataagcagatttctaccctggctatgcataagcgaacagcccacaacgataccgaacctattgaggaggaacaggaagcctttttcgaacctccacctgggcaaggagaggacgtgcttaaggggtcacagataacgtacgttaccggcgtggagggcgacgacgtggttagtacacaggtggctacagtcactcaaagcggactgtcccagcaggtcaccctgatcagccaggacggcactcaacacgtgaatattagtcaggctgacatgcaggctatcgggaacaccataacgatggtaacccaggacggcacacccatcaccgttcccgctcacgacgcagtaatctcgtctgctggcacccatagtgttgctatggtgacagccgaaggtactgaaggcgaacaagtcgccatagtcgctcaggacctggctgcctttcatacagcttcaagcgaaatgggtcaccaacagcactcgcatcacctggtcacgactgagaccaggccgctgacgctcgtagcaactagtaacggcacccaaattgctgtccagcttggtgagcaaccttcactggaggaagccatcagaatagcctcacgaattcagcagggagaaacgcccggcctggatgattag

SEQ ID NO: 211917 - DNA, 1917 bp, synthetic construct
  misc_feature 1..1917: note = Description of Artificial Sequence: Synthetic coding sequence
  source 1..1917: mol_type = other DNA
atgctgctggcccagatcaaccgggacagccagggcatgaccgagtttccaggaggggggatggaggcccagcacgtgacgctttgtctaaccgaggccgtgaccgtggccgatggtgataacctcgagaacatggagggagtgtctctacaggctgtaaccctagccgatggaagcacagcctatattcaacacaattccaaagacgctaaactgatcgatggtcaggtgattcagctagaggacgggagcgccgcgtacgtgcagcacgtacccattccaaagtccacgggcgatagcctgcgcctggaagatggacaggccgtccagttagaagatggcacgaccgctttcattcaccatacctcgaaggatagctatgatcagtccgctcttcaggctgtccagcttgaggacggaaccaccgcttatatccatcacgcagtccaggttccgcagagcgatactatactggcaatccaggccgacggcaccgttgctggcctccacacgggagacgcaaccatcgacccggacacgatcagcgcactggaacagtacgcagccaaggtgtcaattgacgggtcggagagtgtagctgggactggcatgattggtgagaacgaacaagagaaaaaaatgcaaatcgtgttacaaggccacgccactagagtgactgctaaatcccagcagtcgggggagaaggcattcaggtgtgagtacgacgggtgtggtaaactctacactacagcccaccacctcaaggtccacgagcggagtcatactggtgaccggccatatcagtgcgaacacgctggctgcggaaaagcgttcgcaaccgggtatgggttgaaatcccacgtacggacacacacaggtgagaagccgtatcggtgctctgaagataactgtactaaaagctttaagacatcgggtgacctccaaaagcacatccgaacccacacaggtgagaggccttttaaatgtcccttcgaaggttgtggacgctcctttaccacatcaaatatacgcaaagtgcacgtccggacccacacaggtgagaggccttattactgcacagaacctggctgcggccgggccttcgcttccgccactaactacaagaatcacgtgaggatacacacgggagaaaagccttatgtgtgtacagttcccgggtgtgataagagattcacagaatattctagcttatacaaacaccacgtggtccacacccactccaagccctataattgcaatcattgtggcaaaacctataaacagatttctacactggcaatgcacaaaaggacagcccataatgacaccgagccaatcgaagaggaacaagaggccttcttcgaaccaccaccaggtcagggcgaggatgtcctgaaagggtctcagattacatacgttactggcgttgagggagacgacgtggtttcaactcaggtcgcaaccgttacgcagtccggcctgagccagcaggtgacactcatctctcaagacggcacccagcatgtcaatatctctcaggccgatatgcaggctatcgggaatacaattacaatggttactcaggacggaaccccgataactgttccggcccatgacgctgtgatctcttctgccggcacacattcggttgccatggtgaccgctgaagggaccgaaggagaacaagtggccattgtggctcaggatctcgccgctttccacactgcaagctctgagatggggcaccagcagcactctcatcacctggtcaccacagaaacaaggcccctgactctggtggctacatccaacggcacccaaattgctgtgcaactgggagagcagccttcactggaagaggccatccgtattgcgtctcgtatccagcaaggtgaaacacctggactcgatgattag

SEQ ID NO: 211918 - DNA, 429 bp, synthetic construct
  misc_feature 1..429: note = Description of Artificial Sequence: Synthetic coding sequence
  source 1..429: mol_type = other DNA
atgctgctggcccagatcaaccgggacagccagggcatgaccgagtttcctggaggtgggatggaggcccagcatgtgaccctatgtctgactgaagcagtaaccgtggctgacggagacaacttagagaatatggaaggtgtgagccttcaggccgtaacacttgccgatggctccactgcatatatccagcacaattctaaggacgccaagctgatcgacggacaggtgatccagctggaagatggttccgctgcatatgtccagcatgtcccaatacctaagtctcgcgatagcctcaggcttgaggatggacaggccgtgcagctggaggatgggaccaccgcgttcatccatcacacatcaaaggatagctacgatcagtcagccctgcaggccgtccagctcgaagatggaacaacggcatag

SEQ ID NO: 211919 - DNA, 255 bp, synthetic construct
  misc_feature 1..255: note = Description of Artificial Sequence: Synthetic coding sequence
  source 1..255: mol_type = other DNA
atgctgctggcccagatcaaccgggacagccagggcatgaccgagtttcctggcggcggcatggaagcccagcacgtgactttgtgcctcaccgaagccgtcactgtcgctgacggagacaatctggagaacatggagggcgtgtcacttcaggccgttaccctggctgacggctcgacggcctacatacagcacaattcaaaggacgctaagctcattgatggacaggtgatccagctggaggatggctcttag

SEQ ID NO: 211920 - DNA, 222 bp, synthetic construct
  misc_feature 1..222: note = Description of Artificial Sequence: Synthetic coding sequence
  source 1..222: mol_type = other DNA
atgctgctggcccagatcaaccgggacagccagggcatgaccgagttcccaggcggcggaatggaggcccagcacgtcacactgtgcctcactgaagccgtgaccgttgcggatggagataatctggaaaatatggagggcgtaagtctgcaggcggtaactctggccgacggtagcacagcatatatccagcataattcaaaggatgctaaactcatctag

SEQ ID NO: 211921 - DNA, 573 bp, synthetic construct
  misc_feature 1..573: note = Description of Artificial Sequence: Synthetic coding sequence
  source 1..573: mol_type = other DNA
atgctgctggcccagatcaaccgggacagccagggcatgaccgagtttccgggtggcggcatggaagcccaacacgtcactctgtgcttaactgaggccgtgactgtggcagatggagataacctcgagaatatggagggagtctcactacaagccgttaccctggcggatggatccacagcttatatccaacacaattcgaaggatgccaagttgatcgacggacaggttatccagctggaggacggcagtgcggcgtatgttcaacacgttcccatccctaagtctactggggattcgctgagactagaagatggtcaggctgtgcagctggaagacgggaccacagcgtttatccaccacacctccaaagattcctacgaccagtccgctctccaagccgtgcagctcgaggatggcactacggcatacatccaccatgcggtccaggtacctcaatccgatacaatcttagctatccaggctgatggaaccgttgctggtctgcataccggagatgcgaccatcgatcctgacaccatttctgccctggaacagtatgccgctaagtag

SEQ ID NO: 211922 - DNA, 411 bp, synthetic construct
  misc_feature 1..411: note = Description of Artificial Sequence: Synthetic coding sequence
  source 1..411: mol_type = other DNA
atgctgctggcccagatcaaccgggacagccagggcatgaccgagttccctggcggtgggatggaagcacagcatgtcactctgtgtctgaccgaagccgtaacagtcgctgatggtgataatctggaaaatatggagggggtttcccttcaggccgttacactggccgacggttccacggcttatatccagcacaacagtaaggatgccaagctcatcgatgggcaggttatacagctagaagatggctcagccgcctatgtgcagcacgtgcctatccccaagtctacaggtgactccctgcgtcttgaagacggtcaggcagtgcagctggaggacggaaccacagcctttatacatcataccagcaaggactcctatgatcagagtgcactgcaggccgttcagtag

SEQ ID NO: 211923 - DNA, 528 bp, synthetic construct
  misc_feature 1..528: note = Description of Artificial Sequence: Synthetic coding sequence
  source 1..528: mol_type = other DNA
atgctgctggcccagatcaaccgggacagccagggcatgaccgagttccccggcggcggaatggaggcccaacacgttactctttgcttaaccgaagccgttactgtcgcagatggtgataatttagaaaatatggaaggagtgagtctgcaagctgtgaccttagccgacgggtctactgcatatattcaacataacagcaaggacgctaaactcatagacggccaggttatccaactggaggacggctccgccgcatacgtgcaacatgtcccgatccctaagagtacaggggattctctgagacttgaggatggtcaggcagtgcagctcgaagatggtactacagcctttatccaccacacctccaaggactcatatgatcaatccgccctgcaggctgtgcaactggaggacggaacaacagcttacatccatcacgccgtgcaggtgccacaatctgatacaatcctagcgatccaagccgacggcaccgtagccggattacacaccggagatgccacctag

SEQ ID NO: 211924 - DNA, 879 bp, synthetic construct
  misc_feature 1..879: note = Description of Artificial Sequence: Synthetic coding sequence
  source 1..879: mol_type = other DNA
atgagccacctgagccagcagcggatctacagcggcgagaacccctttgcttgcaaagtttgcgggaaggtgttcagtcacaaaagcaatctgacagaacatgagcactttcataccagagagaaacccttcgagtgcaatgaatgcggcaaggccttctctcagaagcagtacgtaatcaagcaccagaatacccacaccggggagaagctctttgaatgcaatgagtgtggtaagagtttctcgcagaaagagaacctgttaacccatcagaaaattcacacgggtgagaaaccttttgaatgtaaagactgcggcaaagctttcatccagaagtccaacctgatacgccaccaaagaactcacaccggggaaaagccatttgtgtgtaaagaatgtggcaaaacatttagtggcaagagcaacctgacagagcacgagaaaattcatattggtgagaagccatttaagtgcagcgagtgcggtacagcatttggccagaaaaagtacctgattaagcatcagaatatccacacaggagaaaaaccctatgaatgtaacgaatgtgggaaggcgttttcccagcgaaccagtctaattgtccacgtgcgaatccattcaggtgataagccctacgagtgtaatgtatgcggcaaggctttttcccaatcaagctcactgaccgtgcacgttcggagccatactggcgaaaagccctatggttgcaatgagtgtggcaaggctttcagccagtttagcacccttgccctgcatctgcggatccataccgggaagaagccttatcaatgcagcgagtgtggtaaagcctttagccagaaatcccatcatatccgtcatcagaagattcatacacactag

SEQ ID NO: 211925 - DNA, 879 bp, synthetic construct
  misc_feature 1..879: note = Description of Artificial Sequence: Synthetic coding sequence
  source 1..879: mol_type = other DNA
atgagccacctgagccagcagcggatctacagcggcgagaacccctttgcttgtaaagtgtgtggaaaagtgtttagccacaagtccaatctcacggagcacgaacattttcacacacgtgaaaaaccttttgaatgcaacgaatgcgggaaagccttctcacagaagcaatatgtcattaaacatcagaatactcacaccggggaaaagctgttcgagtgtaatgaatgtggcaaaagcttcagccagaaagaaaacctgcttacacaccagaagattcacactggcgagaaacccttcgaatgcaaagactgcggaaaggcgtttatccagaaatccaacctcattagacaccagcggacgcacaccggtgaaaagccattcgtatgtaaggagtgtggtaagacattcagcggcaaatccaatctaaccgaacacgagaaaatccacatcggggagaagccatttaaatgcagcgagtgtgggacggcatttgggcaaaaaaagtatttaataaagcaccagaatatacacacaggtgaaaaaccctacgagtgtaatgaatgcggtaaggccttctcccagagaacatccctcatcgtccacgtacgcatccatagtggggataagccatatgagtgcaatgtgtgcgggaaggcctttagccagtccagttcacttaccgtgcacgtgcggagccacaccggcgaaaaaccttacggatgtaatgagtgtgggaaggctttctcgcaattttccaccttggccctgcatcttcgaatacataccgggaaaaagccgtaccagtgttcagagtgcggcaaggcattctctcagaagtcccaccacatccgccaccagaaaatccatactcactag

SEQ ID NO: 211926 - DNA, 2385 bp, synthetic construct
  misc_feature 1..2385: note = Description of Artificial Sequence: Synthetic coding sequence
  source 1..2385: mol_type = other DNA
atgaacatcgacgacaagctggagggcctgttcctgaagtgcggcggtattgatgaaatgcaaagctcccgaactatggtcgtgatgggcggcgtgtccggacagtctacagtcagtggggagctgcaagactccgtcctgcaagatcgctctatgcctcatcaggagatactggccgccgacgaagtgctccaggagagtgaaatgaggcagcaagacatgatttcccatgacgagctcatggttcacgaagagaccgtgaagaatgatgaggagcagatggaaacacacgaacggcttccccaagggttgcaatacgctctgaatgtcccgattagcgtgaagcaggagatcacttttacagatgtgtcagaacagctgatgcgcgataagaaacagatccgagagccggtcgaccttcagaaaaaaaaaaagcgcaagcagagatccccggcgaagattctgactattaacgaggatggctcactgggcctcaagacccctaagagtcacgtttgcgaacattgtaatgcggctttcaggaccaactaccacctgcagcggcatgtgtttattcacactggtgaaaagcctttccagtgctcccaatgtgacatgagatttattcagaagtacctgcttcaaaggcacgagaaaattcataccggcgaaaaaccttttcgatgcgatgaatgcggaatgcggtttatacaaaaataccatatggaacgccacaagcgcacccattccggggaaaagccttatcaatgtgagtactgcctccagtacttttcaaggacagatagagtgctgaagcacaagcgcatgtgccacgagaatcacgacaagaaactaaaccgctgcgcaataaagggtggccttttaacatccgaggaagactctggcttctccactagccctaaggacaatagcttacctaagaaaaaaagacaaaaaaccgagaagaagagcagtggcatggacaaggagagtgcgttagacaagagcgatctgaagaaagacaaaaatgactacttacctctctattcttcaagcactaaagtaaaggacgaatatatggtggctgaatatgccgttgagatgccccactcatctgttggtggaagtcacttggaggatgcgtcaggagagatacaccctcctaagctcgttctcaagaagatcaatagcaaaagatctttgaagcaacctctggaacagaaccagacaatctcacccctgtctacttatgaagaaagcaaggtgtcaaagtatgcatttgagttagttgataagcaggcacttctggactctgaaggaaatgctgatatcgatcaggttgacaatttgcaggagggcccttccaagccagtgcactccagcacaaattacgacgacgctatgcagttcctgaagaagaagcgctaccttcaagccgcgagcaacaactcaagagagtatgctctgaacgtcgggaccattgctagtcaaccttctgtcacccaggctgcagtggcctccgtaatagacgagtctaccacagcatcaatacttgagtcccaggcacttaatgtcgagataaaaagcaatcacgacaaaaacgtgatcccagacgaggtcctccaaaccctgctggaccactattcgcacaaagccaacggacagcacgagatcagctttagcgtggcagataccgaagttacctccagcatttcgattaatagtagcgaagtaccagaagtaacgccctctgaaaatgtggggtcctccagccaggccagctccagtgataaggcgaatatgttgcaagaatactcaaaattcctacagcaggctttagatcggacatctcagaatgacgcctatctgaacagtccatcgttaaactttgtgacagacaatcagactctcccgaaccagcctgccttcagttctattgataaacaagtctatgcgaccatgcctatcaacagcttccgctctggcatgaacagcccgcttcgcaccactcccgacaaaagccacttcgggcttatagtgggggacagtcaacactcgttcccgttctccggggatgagacgaatcacgcatccgcaacgtcaactcaggactttctggaccaggtgaccagccagaaaaaggctgaggctcaaccagttcaccaggcctaccaaatgtcttcgtttgagcagccttttcgcgctccatatcacggttcccgcgccggcatcgcgacccagttcagcaccgctaatggacaggttaacctaaggggccccggcacttctgccgagttcagtgagtttcctctggttaatgtgaacgataatagggccgggatgacatcctcacctgacgccacgaccggccagacatttggctag

SEQ ID NO: 211927 - DNA, 252 bp, synthetic construct
  misc_feature 1..252: note = Description of Artificial Sequence: Synthetic coding sequence
  source 1..252: mol_type = other DNA
atgaacatcgacgacaagctggagggcctgttcctgaagtgcggcggcatagacgagatgcagtctagccggacgatggtggtgatgggcggggtgagtgggcagtccaccgtgtcaggagaactgcaagactcagtgcttcaagatagaagtatgccgcaccaggaaattctggcagcagacgaagtcctgcaggagtctgaaatgcgccaacaggacatgatttcccacgacgaactgatggtacactag

SEQ ID NO: 211928 - DNA, 435 bp, synthetic construct
  misc_feature 1..435: note = Description of Artificial Sequence: Synthetic coding sequence
  source 1..435: mol_type = other DNA
atgaagggcgagaagcccttccagtgcagccagtgcgacatgcggttcatccagaaatacctgctgcagagacatgaaaagatccacaccggcgagaagccctttaggtgcgacgagtgtggggatgaaaccaaccatgcatccgctacaagtacccaggattttctcgaccaggtgaccagccagaaaaaggctgaagctcagcccgtgcaccaagcctaccagatgtcaagcttcgagcagccatttagggccccttatcacggatcccgggcgggcatcgctacccagttcagtaccgcaaatggccaggtaaatctgcgaggcccaggcaccagtgcagagttcagcgaatttcctcttgtgaacgtgaatgacaaccgggcaggaatgacgagctcaccggacgcaacaacgggtcaaactttcgggtag

SEQ ID NO: 211929 - DNA, 78 bp, synthetic construct
  misc_feature 1..78: note = Description of Artificial Sequence: Synthetic coding sequence
  source 1..78: mol_type = other DNA
atgaacatcgacgacaagctggagggcctgttcctgaagtgcggcggtatcgatgagatgcagtcttctaggacgtag

SEQ ID NO: 211930 - DNA, 2385 bp, synthetic construct
  misc_feature 1..2385: note = Description of Artificial Sequence: Synthetic coding sequence
  source 1..2385: mol_type = other DNA
atgaacatcgacgacaagctggagggcctgttcctgaagtgcggcgggatcgatgagatgcagtccagcaggacaatggtagtaatgggcggggtgtccggccagagtaccgtgagcggcgagctccaagactccgtgttacaggataggagcatgccacaccaagagatccttgctgctgacgaggttctgcaggaaagtgagatgcgccagcaggacatgatatcccatgatgaacttatggtgcatgaagaaaccgttaagaacgatgaagaacagatggagacccacgaaaggctgcctcagggattacagtatgccttgaatgtaccgatctcagtgaaacaggaaattacattcacagacgtctccgaacagctcatgcgggataaaaagcaaattcgcgagcccgtcgatctgcagaagaaaaaaaaaagaaagcagaggtcacctgcaaagattctgaccatcaacgaggacggcagcctcgggcttaaaactcccaagtcccatgtatgcgagcactgcaacgccgcctttcgcacaaactaccacctccagaggcacgtctttattcacaccggagagaaaccctttcaatgttcgcagtgcgatatgagattcattcaaaaatatctgctgcagcgacacgagaaaattcataccggggagaaaccgttccggtgcgatgagtgcggaatgagatttatccaaaagtatcacatggagcgacataagaggacccattccggcgagaaaccctatcaatgcgagtactgtctacagtatttctcaaggacagatcgcgtgcttaagcacaaacggatgtgtcacgagaatcacgacaaaaaactaaaccggtgtgccatcaaaggaggactgttaactagtgaagaggactccggcttttcaacatcacccaaagataactccttacccaaaaaaaaaagacagaaaacagagaaaaagtctagtgggatggacaaggagtcagccctggacaagtccgaccttaaaaaagacaagaatgattacttgccactatacagttcctctaccaaggtgaaagacgagtacatggtggccgaatatgctgttgagatgccccactcctccgtcgggggatctcatctagaggacgcttctggggaaatacacccaccaaaactggtattaaaaaagatcaattctaagcgctcactcaagcaaccgctcgagcaaaaccagacgataagtcctctcagtacatatgaagagagcaaagtaagtaagtacgcattcgaattggtggataaacaggctctcttggatagtgagggaaacgctgacattgatcaggtggacaatctccaggaagggccttcaaagcccgttcattcgtccacaaattacgacgacgccatgcaatttctcaaaaagaagagatacctgcaagccgccagcaataactcccgggagtacgcactaaacgtcgggacaatagcatcacagcccagtgttacgcaagctgctgtggcaagcgtgatcgacgagagtacaacagctagtatcctggaaagccaggcactcaacgtggagatcaaatccaatcacgacaagaatgtgatccccgatgaggtgctgcaaacattgctggaccactactcccataaagcaaacggccagcatgagatctctttttcagtggccgatactgaggtaacatcttctatctcgatcaacagcagtgaggtgcctgaagtcacaccgtccgaaaatgtaggatcctcttcacaggcatccagttccgacaaagctaacatgcttcaagaatattcaaaatttctgcagcaggccctcgaccgcactagtcagaacgacgcctatctgaatagccctagcctgaactttgtgaccgacaaccagacactacccaaccagcctgcctttagttccatcgacaaacaggtttatgccacaatgccaattaactctttcagatcaggaatgaacagtcccctccgcacaacaccggacaaaagtcatttcgggctgattgttggggactcacagcactcctttcctttcagcggcgatgagactaaccacgcctctgctacatctacacaggatttcttggatcaagtgacctcccaaaaaaaggcagaggcacaacccgtccatcaggcataccaaatgtctagctttgagcagcctttccgggccccctatcacggctcccgtgccggcatcgccacccagttctcaacagctaatgggcaagtgaatctgagggggcctggcacttccgctgaattcagcgaattcccattggtcaatgttaatgataaccgtgctgggatgacgtcatctcccgatgctacaacaggtcagacatttggctag

SEQ ID NO: 211931 - DNA, 2385 bp, synthetic construct
  misc_feature 1..2385: note = Description of Artificial Sequence: Synthetic coding sequence
  source 1..2385: mol_type = other DNA
atgaacatcgacgacaagctggagggcctgttcctgaagtgcggcggcatcgacgagatgcagtcttcccggacaatggttgtgatggggggcgtatccgggcagtctacagtgtccggcgagctccaggactcggtgcttcaggaccggtcaatgccacaccaggagattttggccgccgacgaggtgttacaggagagcgagatgagacaacaggatatgatttcccacgacgaactgatggtgcatgaggaaaccgtaaagaatgacgaagaacaaatggagactcacgaacgcctcccccagggactgcagtatgctctgaatgtgcccatctccgttaagcaggagatcaccttcacagacgtgtccgaacagctcatgcgggataaaaagcagatacgggagcccgtggacttgcagaagaaaaaaaaaaggaaacagcggtctccagcaaaaatactgaccattaacgaggacggatcgctagggctgaaaacacccaagagccatgtgtgtgagcactgtaacgcggcttttagaactaactatcacttacaaagacacgtctttatccatactggcgagaagccattccaatgttcacagtgcgatatgcgtttcattcagaagtatctcctacagcggcacgagaagatccataccggtgagaagccctttcggtgcgatgagtgtggtatgcgcttcattcagaagtatcatatggaacggcacaaacgaacccacagcggagagaagccgtaccaatgcgagtattgtttacaatacttcagccgcactgatagagttcttaagcacaagcggatgtgccatgaaaaccacgacaagaaactcaatcgctgcgctatcaaaggggggctcctgaccagcgaagaggattccggtttctctacatcaccaaaagacaatagcctcccaaaaaaaaagcgccagaaaaccgagaaaaaatcaagcggaatggacaaggagagcgccctcgataagagcgatctcaaaaaagataagaacgattatcttcccttgtattcaagctcaacaaaggttaaggatgagtatatggtggccgaatatgcagtcgaaatgccccattcctcggtcggcggcagtcacctcgaggatgcctccggcgagatacaccctcctaaactcgtgctgaaaaaaatcaactctaagcgctccctcaagcagcctctggagcagaatcagacaatcagccctttatctacatacgaagaatctaaggttagtaagtacgcatttgaacttgttgacaaacaggcactactggactctgaagggaacgcagacatcgatcaagtagacaacttacaggagggcccctctaaacccgtccactcttctacaaattatgatgacgctatgcagtttttaaagaagaaacggtacctgcaggcagccagtaataattcgagggagtatgctctgaatgttggcacaattgcgagccagcccagtgtaactcaggcagcagtcgcctcagtcatcgacgaatcgaccaccgcctctattctggagtcacaggcccttaacgtggaaattaaaagtaaccatgataagaatgtcattcccgatgaagtattgcagaccctgctggaccactatagtcacaaagcaaacggtcaacatgagattagcttttccgtggcggacaccgaggtcacatctagcatcagtatcaattcttccgaggtgccggaggtcactcccagtgagaatgtaggctccagctcccaggcttcgtcctccgacaaagctaacatgcttcaggaatacagcaaattcttgcagcaagctttggataggaccagtcaaaatgacgcctacctcaacagtccgagcctgaattttgtcactgacaaccaaaccctgcctaaccagcctgccttttcgtctatagacaaacaggtgtacgctactatgcctataaattccttccgcagcggaatgaattctcctctgcgtaccacgccagataagagtcattttgggctgatcgttggtgactcacagcatagtttcccctttagcggcgacgaaacaaaccacgcatccgccacaagcacacaagatttcctggatcaggttaccagccagaagaaggcagaagctcagccggtgcaccaggcttaccaaatgtcgtccttcgaacaaccatttagggccccctatcacgggagccgggccggcatcgccacgcagttctccaccgccaacggccaggttaatctgcggggtcctggcacgagcgctgaattttcggagtttccattagttaatgtcaacgataatagggccggaatgacctctagcccagacgctactacaggacagaccttcgggtag

SEQ ID NO: 211932 - DNA, 2385 bp, synthetic construct
  misc_feature 1..2385: note = Description of Artificial Sequence: Synthetic coding sequence
  source 1..2385: mol_type = other DNA
atgaacatcgacgacaagctggagggcctgttcctgaagtgcggcggcatagatgaaatgcagagctcaaggacgatggtggtgatgggtggtgtgagtggccaaagtaccgtgtctggagagttacaggacagcgtcctccaggaccgtagcatgccccatcaagagattctggcagctgacgaagtcttgcaggagtccgagatgcgccagcaggacatgatatcacacgacgagctcatggtacacgaagagacagtgaagaacgatgaagaacaaatggaaacccatgagagactgcctcagggtcttcaatatgctctgaacgtaccgatctctgtgaaacaggaaattacattcacggatgtaagcgagcagcttatgcgcgataagaaacagattcgcgaacctgtcgatcttcagaaaaaaaagaagaggaagcagaggagccctgctaagatactcacaattaatgaagatgggagcctgggactgaaaacccctaagtcacatgtatgcgagcactgcaatgccgccttccggacgaactatcacctgcagcgccacgtatttatacacaccggagagaagccttttcaatgttcccagtgcgatatgaggttcattcaaaagtacctgttgcagcgccatgagaaaattcacactggcgaaaagccctttcgatgcgacgagtgcggaatgcgattcatccagaaatatcacatggagagacacaagagaacccactccggggaaaaaccctatcagtgcgaatactgcttgcagtatttctcaagaacagatcgagtgctgaagcacaaacggatgtgtcatgagaaccatgacaaaaaactaaatagatgcgcaatcaagggggggctgctcacaagcgaagaggacagcggcttcagtacctctccgaaagataactccttgccaaaaaaaaagagacaaaagactgagaaaaagagcagtggaatggacaaagagagtgctctggataaaagtgatttgaagaaggacaaaaatgactatcttcctttatacagttcaagtacgaaagttaaagacgaatacatggtggccgaatacgcagtggagatgccacactcctccgtcggagggtcacaccttgaggatgccagcggcgaaattcacccaccgaagttggtgttgaagaagattaatagtaaacgctcgctgaagcagcccctggaacagaatcaaacaattagccctctatccacctacgaggagagcaaggtttcaaaatacgctttcgagctggtagataagcaggctcttctggattccgagggaaatgccgacattgaccaggtcgacaacctgcaggaggggccgagcaagccagtgcatagctcaacaaattacgacgatgcaatgcagttcctgaagaagaagagatatctccaggcagcctcaaacaactcgcgtgaatacgctctgaacgtgggtactattgctagtcaacctagtgtgacccaagcagccgttgccagcgtaattgacgaatctacaacagccagcatcctcgagagccaggctttaaacgtggaaattaagtcaaatcacgacaagaacgttatcccggacgaagttctacaaaccctgcttgatcactattcccataaggcaaatggtcagcacgagatcagcttttcagtcgcggacacagaggttacaagctctatttccatcaacagtagtgaggtacccgaggtaactccctccgagaacgtcggctcatcatctcaggccagctcaagtgacaaggccaacatgctccaggagtactcaaaattcctccaacaggccctggatagaacaagccagaatgacgcgtacctgaacagcccgagcctaaactttgtgactgataatcagactttgccaaatcagcccgcattttccagcattgacaagcaagtttacgccacaatgcctattaactcttttcgatcaggaatgaatagtccgctgagaactacaccagataaaagtcatttcggactgatcgttggggactctcagcacagctttccattcagcggtgacgagaccaaccacgccagcgccacctcgacccaggacttccttgaccaggtcaccagccagaagaaagccgaagcccaacctgtgcaccaggcatatcaaatgtccagcttcgaacaaccttttagggcaccataccacgggtctagggctggcatcgcaacacaattttcaacagccaacggccaggtaaacctgcggggtcccggcacctctgcggagtttagtgagttccccctggttaacgttaacgataacagggccggaatgacctcctctcccgatgcaaccacagggcagacttttggatag

SEQ ID NO: 211933 - DNA, 228 bp, synthetic construct
  misc_feature 1..228: note = Description of Artificial Sequence: Synthetic coding sequence
  source 1..228: mol_type = other DNA
atgaacatcgacgacaagctggagggcctgttcctgaagtgcggcggaattgatgaaatgcagtcctccagaacgatggtggtgatgggtggggtctccgggcagtccacagtctcaggcgagctgcaggactcagtgcttcaggaccgcagtatgcctcaccaggaaatcctggcagccgatgaggtgctgcaagagtcggaaatgagacagcaggatatgatctag

SEQ ID NO: 211934 - DNA, 1365 bp, synthetic construct
  misc_feature 1..1365: note = Description of Artificial Sequence: Synthetic coding sequence
  source 1..1365: mol_type = other DNA
atgaacatcgacgacaagctggagggcctgttcctgaagtgcggcgggatagacgagatgcagtctagccggacaatggtggtaatgggaggcgtctccggccagagcactgtgtcaggcgagttacaggactcggtactgcaagacagaagcatgccccatcaggaaatccttgccgcagacgaggtcctgcaagaatcagagatgcggcagcaggacatgatctctcacgacgagctcatggtgcatgaggaaaccgtgaaaaacgatgaggaacagatggaaacccatgaaagacttccccagggtctccagtatgctctcaatgttccgatctctgtcaaacaggagatcacctttacagatgtctccgagcaactgatgagagacaaaaagcagatccgcgaaccagtcgatcttcagaagaaaaaaaagcgtaaacagcgcagccctgctaagatcttgaccatcaacgaggacggctccttaggtctgaaaacacccaagagccatgtgtgcgagcactgcaatgcagccttccggacgaactatcatttgcagcgacacgtgtttattcatacaggtgaaaagccattccagtgttcccaatgcgatatgcgtttcattcagaagtatttgttacagaggcacgaaaaaatccatacaggagagaaaccttttaggtgtgatgagtgtggaatgcgctttatccaaaaatatcacatggaacgccataaacgcacgcatagtggagagaaaccttatcagtgcgaatactgtctccagtacttctcaaggacagaccgcgtcctgaaacacaagcgtatgtgccatgaaaatcacgataagaagctgaaccgctgcgccatcaaaggggggcttctgacgtctgaggaggattctggattttcgacatctccaaaagataatagtttaccaaagaagaaaaggcaaaagacagagaagaagtcttccggaatggataaggaaagtgctctggacaagtcagacctgaaaaaagacaaaaacgactatttacccctgtattcttctagcacgaaggtcaaggatgaatatatggtggccgaatatgctgtcgagatgccgcattcgtccgttggcggcagtcacctggaggatgcctctggcgaaattcatcctcccaaactggtgctaaagaaaattaacagcaaacgctccctgaaacagccactggagcagaaccagaccattagcccgctgtctacatatgaggagtcaaagttccagtcaatgctgcttaacctgtggattaatagactgtattggactcaaaaggctatgcttacacttattagactaatcatttgtcgacgggctcagtag

SEQ ID NO: 211935 - DNA, 396 bp, synthetic construct
  misc_feature 1..396: note = Description of Artificial Sequence: Synthetic coding sequence
  source 1..396: mol_type = other DNA
atgcggttcatccagaagtacctgctgcagcggcacgagaagatccacactggggaaaaaccttttagatgtgatgagtgcggagatgaaaccaatcatgcaagcgctacgagcacacaagacttcctggaccaggtcacgagccagaaaaaagccgaggcacagcccgtgcaccaggcctatcagatgtcctccttcgaacagccctttcgtgccccataccatgggagtagagccgggatcgccacccagtttagcaccgcgaatgggcaggtcaacctgaggggacccggaacgagcgctgaattctctgaattccctctggtaaatgtaaacgataatcgggcaggaatgacctctagtccagacgccaccaccggacagacgtttggttag

SEQ ID NO: 211936 - DNA, 432 bp, synthetic construct
  misc_feature 1..432: note = Description of Artificial Sequence: Synthetic coding sequence
  source 1..432: mol_type = other DNA
aagacccactacaactgcggcgagcacaccaaggccttcagcggcaagcacaccctagtgcaacagcaaaggactttgacgacagagcgctgttacatatgtagcgaatgcggcaagagttttagtaataaatccaacctgatcaagcacaggcgagtgcataccggagagcgaccctacgagtgctcagaatgtggcaagtctttcagtcagaggtccgccttgctgcagcataggggagtgcatactggagagagaccatatgaatgtagtgagtgtgggaaattctttacatatcatagctcgcttatcaagcatcagaaggtgcacagcggttcccgtccatatgaatgttctgagtgtgggaagagcttctcacagaactcttcactcatcgagcaccatcgggtacataccggcgagcgaccctag

SEQ ID NO: 211937 - DNA, 1314 bp, synthetic construct
  misc_feature 1..1314: note = Description of Artificial Sequence: Synthetic coding sequence
  source 1..1314: mol_type = other DNA
atggccgccgccaccctgcggacccccacccagggcaccgtgacctttgaggacgtggccgtccatttctcatgggaagagtgggggttgctcgacgaagcccagagatgcctctatcgcgatgtgatgcttgagaatctggcgctactgaccagtttagacgtgcaccaccagaagcaacacctgggagaaaagcacttcaggagcaacgtgggtcgtgcactattcgttaaaacatgcacctttcatgtgtccggcgagcctagtacctgccgcgaggtgggtaaagattttctagcaaagctgggattcttgcatcaacaagcagcgcataccggcgagcaatcaaactcaaagagcgacggcggagccatttctcacagaggtaaaactcattataactgtggcgaacacaccaaggccttttccggaaagcacacactggtccagcagcagcgaaccttgacgacagaacgttgttacatctgttcagaatgtggcaagtctttcagtaagtcctattcactgaacgaccactggaggctgcataccggagaaaagccctacgaatgccgtgagtgcggaaaaagcttccgacagtcttctagtcttatacagcataggcgggttcataccgcggtacgccctcacgaatgtgacgagtgcggcaaactattcagtaataaatccaaccttatcaagcaccggcgggtgcataccggggaacggccatatgagtgctccgaatgtggaaaatccttttctcagagaagcgctctgctacagcatagaggagtgcacacaggcgaaaggccttatgagtgcagtgagtgtggcaaattcttcacgtatcacagctccctaatcaaacatcagaaggtgcattccgggagccgtccctacgagtgctcagagtgcggcaaatcgttttcccagaactcctccctgatagaacatcatcgggtccacaccggcgaaagaccttacaaatgttcggagtgcgggaaatcgttcagccagcgttccgcactgttacaacaccggggcgttcatacaggggaacggccttacgagtgtagtgaatgcgggaagttctttccttacagcagctcactccggaaacatcagcgcgtacatacaggaagccgtccgtatgagtgcagcgaatgcggtaagagttttactcagaatagtgggctgattaagcacagacgcgtccatacgggcgagaagccttatgaatgcacagaatgtggcaagagcttcagtcataactcctcacttatcaagcaccagaggatacactcacgttag

SEQ ID NO: 211938 - DNA, 1314 bp, synthetic construct
  misc_feature 1..1314: note = Description of Artificial Sequence: Synthetic coding sequence
  source 1..1314: mol_type = other DNA
atggccgccgccaccctgcggacccccacccagggcaccgtgaccttcgaagacgtagcagtgcatttctcctgggaggagtgggggctactggacgaggcccagagatgcctgtacagggatgtgatgttggaaaatctggcccttttgacctcactcgacgtgcaccatcaaaaacagcatctgggcgaaaaacactttaggtctaacgttgggagagcactgtttgtcaagacttgcacatttcacgttagtggcgaaccatccacctgtcgagaagtagggaaggacttcttagcaaaactcgggttcctgcatcaacaggccgcccacactggagaacagtccaactcaaagagcgatggcggcgcaatttcccatagaggcaaaacgcattataactgcggcgaacataccaaggccttttctggcaagcacaccctagtacagcagcagcggaccctgactaccgaaaggtgctacatctgttccgaatgcggcaagtccttttccaaaagctattctctcaacgatcattggcgattacacaccggagagaagccctacgaatgtagggaatgtggcaagagcttcaggcagagttcgtccctgattcagcaccgaagggtgcacacggccgtaaggccgcatgagtgcgacgagtgtggtaagctgttctccaacaagagcaatcttataaagcatcgccgggtgcatacaggcgaaagaccctacgaatgcagtgagtgtggcaagagtttcagccaacgctccgctttgctgcagcacaggggagtgcacaccggagagagaccttatgagtgcagcgagtgcggcaagttcttcacctaccacagtagcctgattaaacaccaaaaagtccatagcgggtccaggccttacgaatgcagcgagtgtggcaagtcattttctcaaaatagttctctgattgagcaccaccgcgtccatactggggaaaggccctacaagtgtagtgaatgtggtaagagcttctcccagcggtcagctctcttacagcatcgtggtgtgcataccggggaaaggccctatgagtgtagcgagtgcggtaagttttttccttatagcagttccctccgtaaacatcagcgcgtacataccggcagcagaccatatgagtgttccgaatgcggaaagtctttcacccagaacagcggcctcatcaagcatcgtagggtccacacaggagaaaaaccctatgagtgtacagaatgtgggaaatccttcagtcacaacagtagtctgataaaacatcagagaattcactcgagatag

SEQ ID NO: 211939 - DNA, 1617 bp, synthetic construct
  misc_feature 1..1617: note = Description of Artificial Sequence: Synthetic coding sequence
  source 1..1617: mol_type = other DNA
atgaccaccttcaaggaggccgtgaccttcaaggacgtggccgtggtcttcacagaggaggagctaggcctcctggacccagcccagcgtaaactgtaccgtgatgtgatgttagagaactttcggaacctgctgagcgtaggccaccagccctttcaccaggatacttgtcacttcttaagagaggagaagttttggatgatgggtaccgctacacagagggagggtaatagcggtggcaagattcagacggaactcgaaagcgtccctgaagcgggggctcacgaggaatggagttgtcaacaaatttgggagcaaattgccaaagacctcactaggtcgcaagattccatcatcaataattcccagttctttgagaacggagacgtgccctcgcaagtggaagctggactgccaacgatacatactgggcaaaagcctagccagggtggcaagtgcaagcagtccatctcagatgtgcccatattcgatctccctcagcagctctattctgaagaaaaatcttatacctgtgatgaatgtgggaaaagtatctgctatatatcggcgcttcacgttcaccagagggtgcacgtgggagagaaactgttcatgtgcgatgtgtgtggcaaggaattttcccaatcatcccacctgcagactcaccaacgcgtgcacaccggcgagaaaccatttaagtgtgagcagtgcgggaagggtttcagcagacggagtgccttgaacgtacaccggaaattacatacgggcgagaaaccatacatctgcgaagcttgtggaaaggcatttatacacgattcgcaactcaaagaacataagcgcatacatactggagagaaaccctttaagtgcgatatttgtggtaagactttttacttccggagccggctgaaaagccatagcatggtccacaccggcgagaagccctttagatgcgatacgtgcgacaagagctttcaccagcgttcagcgctgaacagacattgtatggttcacaccggcgaaaagccctacaggtgtgagcagtgcggtaaaggcttcatcgggagactcgacttttacaaacaccaggtggtgcacacaggggagaaaccatacaactgtaaagaatgcggcaagagcttcagatggtcgagttgcctcctcaaccaccagagggtccactccggggaaaagagctttaagtgcgaggaatgtggaaaggggttttatacaaatagtcaattgtcgtcacatcagcgatctcattcgggtgagaaaccgtacaagtgcgaagaatgtggcaaagggtacgtcacaaagttcaacctggatcttcaccaaagggtgcatactggtgagcgcccctacaactgtaaggagtgcggcaagaatttcagtagagcctcttccatccttaaccataaacgcttacattgtcagaaaaaaccgttcaagtgtgaggactgcggcaagcgcctggtgcaccgcacatatcgcaaggaccagccaagggactattccggcgaaaacccctccaagtgcgaagattgcgggcgtagatacaaacgccgactcaatctggatatattgctttctctgtttttgaacgatacctag

SEQ ID NO: 211940 - DNA, 1650 bp, synthetic construct
  misc_feature 1..1650: note = Description of Artificial Sequence: Synthetic coding sequence
  source 1..1650: mol_type = other DNA
atgatcaagcggagcaaggtgctggtgttctgcagcaagatcatggaagaagcagtgactttcaaggacgtggcagtcgtgtttaccgaggaggagctgggccttctagatccggcgcaaagaaagctgtacagggacgtgatgcttgagaatttcaggaacttactgtccgtggggcatcagccattccatcaggacacatgccactttctccgggaggagaaattctggatgatgggcactgctacacagcgagaagggaattctggcggtaagattcaaaccgagctggaatccgtgccagaggcgggagcccatgaagagtggagttgtcagcagatctgggagcagattgctaaagatctgacaaggagtcaggacagcattatcaataacagccaatttttcgagaacggagatgtgccatctcaggtcgaagccgggcttccaaccatacacaccgggcagaaaccttcccaggggggaaagtgcaaacagtctattagcgacgtgcctatcttcgacctcccacagcaactctactcagaagagaagtcatatacatgcgacgaatgtggcaagagtatttgctacatctctgccctgcacgtgcaccagcgcgtgcacgttggagagaaactttttatgtgcgatgtctgcggaaaagagttctcccagagtagccatctgcagacccatcaaagggtgcacacaggggaaaagccctttaagtgcgaacagtgtggaaagggcttcagcaggcgaagcgccctgaatgtgcatcggaaacttcataccggcgagaagccatacatttgcgaggcttgcggcaaggcttttatccatgatagccagctgaaggaacacaaacgaatacacacaggagaaaagcctttcaaatgcgacatctgtggcaaaacattctactttcgatcacggcttaagtctcacagtatggtgcatactggcgagaaaccattccgttgcgacacttgtgataaatcatttcatcagcgctcagctctgaatcgacattgtatggtgcatactggcgagaaaccttaccggtgtgaacagtgcggaaagggctttatcggacgtctagatttttataagcatcaggttgtgcatacaggggagaaaccctacaactgcaaagagtgtggcaagagttttcgctggagcagttgcttgctcaaccaccaacgagttcactccggcgagaagagttttaagtgtgaagagtgcgggaaaggcttctataccaactcccagctgtcgtctcaccagaggtcacattccggcgagaaaccctacaagtgcgaagagtgcggaaaggggtacgtcaccaagttcaacttggatctccaccagagagtgcacaccggtgaacggccctacaactgtaaagagtgcggaaaaaactttagtcgggccagctcaatcctgaaccataaacgtctccattgccagaaaaagccatttaagtgtgaggattgcgggaaaaggctggtgcatcgcacatatagaaaagaccagccacgggactactccggtgaaaacccatccaagtgcgaagattgcggccgacggtataagaggagactgaatctcgacatcttgttgtctctgtttctcaatgacacctag

SEQ ID NO: 211941 - DNA, 693 bp, synthetic construct
  misc_feature 1..693: note = Description of Artificial Sequence: Synthetic coding sequence
  source 1..693: mol_type = other DNA
atggtgatgagccccccccggctgaagcaggactacccccagttcatccaagatcgtaatttgccacgggtgggatctgtgaattcacccagcgtcatgttcccatcactcatattccttagctcgtacacccagaagcgtagccttatccatgtcatgtccgtggaaaaggcctcggtaactagtcaactttttatgtttattagagaatcaacctgggagcgaaactctctttgtgtgatgtgcgtagcccggaatttagtgaaagcgcacatatgcaaattaatccgcgagtcaaccctggaacgcaaccattctaatgtctccaacgtgggcaaagtgtcagtagttgaccagcacttgatgtttatcgtcaattatacccaggaaaggaatctgactttcgtacggcacgtggggcgaccgtcattcatgatcccctctctgagaaacattcgggaatccattctgggccgaaatcacagcaacgttatttatgtcgtgcgaccatcaatattgggccaggacctgcgcgcaataccttggttcacgcaggagaagaaccatctgggcgtcatccacgtgattagggcttttatccgggaccagcacctcattggtatagcctggagcacacaagaacgcaatcgcacagacgtctcctccgtagagaaggccctgctggttggctag

SEQ ID NO: 211942 - DNA, 1521 bp, synthetic construct
  misc_feature 1..1521: note = Description of Artificial Sequence: Synthetic coding sequence
  source 1..1521: mol_type = other DNA
atgcccgccaacggcaccagcccccagcggttccccgccctgatccccggagagccagggagatctttcgaaggtagcgtgagctttgaggacgtggccgtcgactttactagacaggagtggcatcggctcgatccagcgcagaggaccatgcacaaggacgtgatgcttgagacatactccaacctagcttctgtgggcctttgcgtggccaaacctgagatgatattcaaactagagcggggagaagagctgtggatcctggaggaagaatcgtctggtcatggatactctggctccctgagtctgttgtgcggtaacggatcggtgggcgacaacgctctgcggcacgacaacgatttgctgcatcatcagaagatccaaacactcgatcagaacgtggagtacaacggatgtcgcaaagctttccacgagaagactggattcgtccgtagaaagcgaacccctcgcggagataaaaactttgaatgccatgaatgtggcaaagcctactgccgaaaatctaatctcgtggagcacctcaggatccacacaggggagagaccttatgaatgcggagagtgcgccaaaacctttagtgcgagatcctacttgatagcccatcaaaagacacataccggtgagcgtccgttcgaatgtaatgagtgcggcaaaagcttcggcaggaagagccagctcatccttcacacacgtacccataccggagaaaggccatatgagtgtaccgaatgcgggaagacattttccgagaaggccacacttactattcaccagcgcacacacacaggagagaaaccttacgaatgtagtgagtgtggaaagacgtttcgagtgaagatttcactgacgcagcaccatcgcacacatactggggagaagccttacgaatgcggcgagtgcggcaaaaacttccgagctaagaaaagcctgaaccagcatcagagaattcatacaggcgagaagccttacgaatgcggcgagtgcggaaaatttttcaggatgaaaatgaccctcaacaatcatcagcgcactcacactggagaaaagccgtatcagtgtaacgagtgtgggaaatcctttagggttcattctagcttgggaatccaccagcgtatccacactggggaaaagccctacgaatgcaacgagtgtggaaacgctttctatgtgaaagctcggttgatagaacaccagcgcatgcacagtggcgaaaagccttacgaatgtagcgagtgtggcaagatcttcagtatgaaaaagtcactgtgtcagcaccgccgcacccacactggcgaaaaaccatatgaatgttcggagtgcgggaacgccttttacgtgaaagtacggttaattgaacaccagcggatccacaccggtgagagacctttcgagtgtcaggagtgcggcaaggccttctgccgcaaagctcacctgacagagcatcagagaacgcacattgggtggagctggcggtgcacaatgaaaaaggcctcacactag

SEQ ID NO: 211943 - DNA, 2049 bp, synthetic construct
  misc_feature 1..2049: note = Description of Artificial Sequence: Synthetic coding sequence
  source 1..2049: mol_type = other DNA
atgcccagcctgcggacccggcgggaggaggccgagatggagctgagtgttccagggccgagtccatggacacctgcagcccaggcaagagtgcgcgacgcaccagcggtcacgcacccagggtctgccgcctgcggcaccccttgttgctcagataccgagctcgaggcaatctgcccccactatcagcagccggattgcgacaccaggacagaggataaggaatttctccataaggaagatatccacgaggatctggaaagtcaggcagaaatcagcgaaaattatgctggggacgtcagtcaggtcccagaacttggcgacctttgcgatgacgtctcagagcgagattggggtgtaccggaaggacggcggctccctcagtcactgtcccaggaaggagattttacccccgcagccatgggcctactgcggggaccgcttggggagaaagatctggattgtaatgggtttgactcacgcttctccttatctccgaatctcatggcatgtcaggagatccccacggaggagagacctcacccctacgacatgggaggacaatcttttcagcactcagtagatttgaccgggcatgaaggtgtgcctacagctgagtccccactgatttgcaatgagtgtggaaagacctttcaggggaacccagacctaatccagcggcaaattgtgcacaccggggaggcttcctttatgtgtgatgactgcggaaagacatttagtcagaattcggtgctgaagaaccggcaccggtcccatatgagcgaaaaggcctatcagtgctccgaatgtgggaaggcattcagaggtcactcagatttttccaggcaccaatcacatcactcctccgagcggccatatatgtgtaacgagtgtggcaaggctttttctcaaaacagttcactgaaaaagcatcagaagagtcatatgagtgagaaaccttacgaatgtaatgaatgcgggaaggctttcagacggtcctccaacttaatccaacaccagcgaatccattcaggggagaaaccgtacgtgtgttctgaatgcggaaaggcttttcggagatcttcaaacctcatcaagcaccatcgcacccacaccggggagaagccttttgaatgtggggagtgtgggaaggcgttttcacagtcagctcacctacgcaagcaccaacgagtccataccggcgaaaagccatacgaatgtaatgattgtgggaagccgttcagtcgtgtttcaaatctaatcaaacaccacagggttcacacaggagagaagccttacaaatgctccgactgtggtaaggctttttctcagtcttcctctcttatccagcatcgccgaatccatacgggtgagaagcctcatgtctgcaatgtgtgtgggaaagcgttttcttatagcagtgtgctgcgaaaacaccaaattattcacaccggggaaaagccttaccgctgttccgtctgtgggaaggcgttctcacatagcagcgcgttaatccagcatcaaggcgttcatacaggtgataagccgtacgcctgccacgagtgcgggaagacctttggcaggagctctaaccttattcttcaccaacgagtacatacaggagaaaaaccttacgaatgtacagagtgcggtaagactttctcacagtcatccaccttaatacagcatcaaagaattcataatggccttaaacctcatgaatgtaaccagtgcgggaaagccttcaaccgctcctcgaatctgatccaccatcagaaggtacataccggcgagaagccctacacttgtgtcgaatgcggaaagggcttttcacagtcttctcatctaatccaacaccaaataatccacacaggagagagaccctacaagtgttccgagtgcggaaaggcattctctcagcgctcagtcctgatccagcatcagaggatccacaccggtgtcaaaccttatgactgcgccgcctgtggcaaggccttcagtcagagatctaagctcattaagcaccagctgattcacacccgggagtag

SEQ ID NO: 211944 - DNA, 2049 bp, synthetic construct
  misc_feature 1..2049: note = Description of Artificial Sequence: Synthetic coding sequence
  source 1..2049: mol_type = other DNA
atgcccagcctgcggacccggcgggaggaggccgagatggagctgtctgtgcctgggccatccccgtggaccccagctgcccaggccagggtcagagacgctcctgcagtcacccatccaggcagcgcagcctgcggtacaccttgttgtagtgataccgaattagaggccatttgtcctcattatcagcagccagattgcgacaccaggacagaggataaggagtttctgcataaggaagatattcacgaggacctggagagtcaggccgaaatctcagagaactatgccggagacgtgtcacaagttccagagctgggagacctctgtgatgacgtgtcagaacgtgactggggcgttcccgagggtcgccgactcccccagtccctgtctcaggaaggagactttacgcctgccgcaatggggcttctccgtggaccactcggggagaaagacctggattgcaacggattcgactcgagattctccctcagtcccaacctgatggcctgtcaggaaatcccaacagaagagaggccacacccttacgacatgggcgggcagtcctttcagcactcagtcgacttgacgggccacgagggggtgccgaccgctgaatctcccctgatttgtaatgagtgtgggaaaacctttcaggggaatcccgatctaatacagaggcaaatcgtccataccggagaggctagcttcatgtgcgatgactgtgggaagacgttcagtcagaattccgttctaaagaacagacatcggtcgcatatgagcgaaaaggcctatcagtgtagcgaatgtgggaaagcgtttcggggtcattctgactttagccgacaccagagccatcattcttccgagaggccatatatgtgcaatgagtgtggcaaagcattcagtcagaacagctccctgaagaaacatcagaaaagccacatgtcagagaagccctacgaatgtaatgagtgtggaaaggcctttcggcgctccagtaatctgatccagcaccaacggattcattctggggaaaagccttatgtatgctcggagtgcgggaaggcgttcagacgttcctccaacctcattaaacaccatcggacacatactggcgagaaaccctttgagtgcggcgagtgtgggaaagctttctcccaaagcgctcaccttcgaaaacatcaacgcgtccacaccggcgaaaaaccatatgaatgcaacgactgcggaaaaccctttagccgggttagtaacctgatcaagcaccaccgagtgcacaccggcgaaaagccttacaaatgttccgattgcgggaaggctttctcgcagagctcctcattgattcagcatcggagaatacacaccggagaaaaaccccatgtctgtaacgtgtgcgggaaagccttcagttatagctcagtgctgaggaagcaccagattatccacacaggtgagaagccctaccggtgcagtgtgtgcggaaaggccttctcacactcctctgcgctgatccaacaccagggagtgcataccggagataagccatatgcgtgccacgaatgtgggaaaaccttcgggcgctccagtaatctcattctgcaccagcgcgtgcatacaggagaaaagccatatgaatgtacggagtgcggtaaaacattttcccagagctccactctgattcagcatcagcggatacacaacggcttaaagccccacgagtgcaaccaatgtggaaaggcgtttaaccgctcttcaaacttgatccatcaccagaaggtccacaccggggaaaaaccatacacctgcgtggagtgcggcaagggttttagccagtccagccacttgatacagcaccagatcatccatacaggagagagaccgtacaaatgttcagagtgcgggaaggcattttctcagaggagtgtcctgatccaacaccagcgcatacacacaggagtgaagccttatgactgtgctgcgtgcggcaaagcctttagccagagatcaaagttgattaagcaccagcttatccatacaagagagtag

SEQ ID NO: 211945 - DNA, 444 bp, synthetic construct
  misc_feature 1..444: note = Description of Artificial Sequence: Synthetic coding sequence
  source 1..444: mol_type = other DNA
atggccctgacccaggtgcggctgaccttccgggacgtggccatcgagttctctcaggaggaatggaaatgcctggacccagcgcagagaatcctttacagggatgtaatgcttgaaaattattggaatctcgtgtcactgggtctgtgccacttcgacatgaatatcatttccatgttagaggagggcaaggaaccctggacagtcaagagttgcgtgaaaattgcccggaagccccgcactccagagtgtgtgaaaggcgtcgtcactgatttacttcgtcgatggaagcactggttgctcctcctagggatctgctgtccaaaaccacatggacgcgtcagctcacggctcagattatctcggagtttgggtcactttttccacagtgcctttgctacattcatgggggtgtgcgacaaacgtgtcgggtccattttctag

SEQ ID NO: 211946 - DNA, 2457 bp, synthetic construct
  misc_feature 1..2457: note = Description of Artificial Sequence: Synthetic coding sequence
  source 1..2457: mol_type = other DNA
atggccctgacccaggtgcggctgaccttccgggacgtggccatcgaattttctcaggaagaatggaaatgcctggatccggcacagagaatcctgtacagggacgtcatgctagagaattactggaatttagtatcattaggactgtgccacttcgatatgaatattatctcaatgctggaagagggtaaggagccctggacagttaagtcgtgcgtgaagatcgcacgcaaaccacgcactccagaatgcgtgaagggcgtcgtgacagacattcctcctaagtgcacaattaaggatctgttacctaaggagaaaagtagcacagaggcggtgtttcacaccgtcgtcttggaacgccacgaaagccctgatatcgaggatttctcatttaaagagccccaaaaaaacgtgcatgatttcgaatgccaatggagggacgacaccggcaattataaaggagtactgatggctcaaaaggagggaaagcgcgaccagcgtgataggagggatatagaaaataaacttatgaacaaccagctcggagtgtccttccactctcatctgcccgagctccagctgttccagggggagggtaaaatgtacgagtgcaaccaggtcgaaaagtcaacgaataacggtagcagcgtgtctccgttgcagcagattccctcaagcgtgcaaacacacagatcaaaaaagtatcacgaactgaatcatttctctctgctcactcaacggcgaaaggccaactcctgcggcaagccctataagtgtaacgaatgtggcaaggctttcacgcaaaatagcaatctgactagtcatcggagaatccactccggcgaaaaaccatataagtgctctgagtgcggcaagaccttcaccgtgcggtcaaatctgacaatccaccaggtgatccatacaggtgaaaagccttacaaatgccacgaatgcggaaaagtttttaggcataattcttatttagccactcatcggcgtatacataccggggagaagccctacaagtgcaacgagtgtggcaaggcctttagaggtcatagcaacctcaccactcaccagctgatccacacaggcgagaagccattcaaatgtaacgagtgtgggaaacttttcacacagaattctcatctgataagccattggcggattcacacgggagagaagccatacaagtgtaacgaatgcgggaaggctttcagtgtgagatctagtctggcgatccaccagactatccacaccggcgagaaaccctataaatgtaatgaatgcggtaaggtgttccgttacaactcgtatctggggcgacaccgacgggtgcatacaggtgagaaaccgtacaaatgcaatgagtgtggtaaagccttcagcatgcactcaaacctcgccacccatcaggtcattcataccgggactaagccctttaaatgcaacgaatgttccaaggtttttactcagaatagtcagttagctaatcaccgaaggattcatacgggcgagaagccctacaagtgcaacgaatgtgggaaagcattcagcgttcgttctagcttgactacccaccaggcaatccattccggcgaaaagccatacaagtgtatcgagtgcggtaagtcctttacccagaaatcccacctacggagccatagggggattcatagcggcgagaagccttataagtgcaacgagtgtggcaaggtctttgcacagactagccaacttgccaggcactggcgggttcacacaggagaaaaaccttataaatgtaacgactgcgggagagcattcagcgataggtcaagtctaacattccatcaggccatccataccggtgagaaaccatataagtgccacgaatgtggaaaagtgttccggcacaatagctaccttgctacccatcgccgcattcacaccggcgaaaaaccatataaatgtaacgaatgtggtaaggcgttttctatgcactcaaacctgacaacccacaaagtaatccatacaggtgaaaaaccatacaaatgcaaccaatgcggaaaagtcttcactcagaattcccatctcgcaaatcaccaacggacccatactggagaaaagccctatcggtgtaacgagtgcggcaaagccttcagtgtgagaagttcattgactacacatcaggctattcacaccggcaaaaaaccttacaagtgcaacgagtgcggcaaagtcttcacacagaacgcacatctcgcaaatcaccggagaatccatacaggagaaaagccatacagatgcactgagtgcgggaaagcttttcgagtcaggagcagcttgactacccacatggccatccacacaggcgagaaacgatacaaatgcaatgagtgcggcaaagttttccggcagtcttcaaacctggccagtcatcaccgcatgcatacaggcgaaaagccttataagtag

SEQ ID NO: 211947 - DNA, 2457 bp, synthetic construct
  misc_feature 1..2457: note = Description of Artificial Sequence: Synthetic coding sequence
  source 1..2457: mol_type = other DNA
atggccctgacccaggtgcggctgaccttccgggacgtggccatcgagtttagtcaagaagagtggaagtgcctcgacccggcccaaagaattctgtatcgggacgtcatgttagagaattactggaacttggtgtctctggggctttgccacttcgacatgaacattataagtatgctcgaagagggtaaggagccctggaccgtgaagtcttgcgttaagatcgcaaggaagcccagaacacccgagtgcgttaagggggtggtgacagatatccccccgaagtgtactataaaggatctgctgccgaaggaaaaatctagcaccgaagcagtgttccacaccgttgtcctggagaggcatgaaagccccgacatcgaggacttctctttcaaagaaccccagaagaacgtgcacgattttgaatgtcagtggagagacgacacagggaattataagggggttctgatggcccaaaaagagggaaagcgggaccaacgagatcgtagggatattgagaacaagctgatgaacaaccagctcggtgtgtcatttcactctcacctgccagagctccagttatttcagggcgaggggaaaatgtacgagtgtaatcaagtggaaaagtcaaccaataatggaagttccgtctcacctctccagcagattcccagttctgttcagacccacagaagtaagaagtatcacgagcttaatcacttcagcctcctgacacagcggaggaaggcaaactcttgtgggaagccatacaaatgcaatgaatgtggtaaggcctttacacaaaatagtaatctgacgtcccatcgccggatccattctggggagaaaccgtataagtgcagcgagtgtgggaagactttcaccgtccgctcaaatttgacaattcatcaggtcatccatactggcgaaaagccttataagtgtcatgagtgcgggaaagtgtttcggcataattcgtaccttgccacccatcgccgcatccatactggagagaagccctataaatgtaacgaatgcggcaaggcttttaggggccactctaacctgaccacacatcagctaatccataccggcgagaagccctttaaatgcaatgagtgtggaaagctgtttacacagaacagtcatctgatcagccactggaggatccacacgggtgaaaaaccatacaagtgcaacgagtgcggaaaagcattcagcgtgcgctccagtttggccattcatcagaccatacatacaggagagaagccctataaatgtaacgagtgcgggaaagtctttcgctataactcttacttgggaagacatcgtcgagtgcatacaggcgagaaaccctacaagtgtaacgagtgcggaaaggctttctccatgcactctaatctggctacacaccaggtaattcacacaggaactaagccatttaagtgcaacgagtgcagcaaggttttcacacagaattcccagcttgccaatcacagacggattcacaccggcgagaagccttacaagtgtaatgaatgcgggaaagctttttctgtgcgatcgtccctaactactcatcaggcaatccatagcggcgagaaaccgtataaatgtatagaatgcgggaaaagctttactcagaaatcgcatttacgctcacatcgagggattcactcaggcgaaaaaccttacaagtgtaacgaatgtggcaaggtgtttgcccagacgtcgcagcttgctagacactggcgggtgcacactggcgagaaaccctacaaatgtaacgattgtggacgcgcattctcagatcgctcttccttgacctttcaccaggccattcacaccggcgagaagccgtataaatgccacgaatgtgggaaggtctttaggcacaattcctatctggccacccacagaaggatacataccggcgaaaagccctataaatgtaacgagtgcggaaaggctttttcaatgcactctaacctgactacccacaaggttatccacactggcgaaaagccttacaagtgtaatcagtgcggtaaagtgtttacccaaaatagtcacttagctaaccatcagcggacccataccggcgagaagccctaccgctgtaatgaatgtggtaaggccttctccgttagaagttctcttacaactcaccaagccattcatacaggcaaaaagccttataagtgcaacgagtgcggcaaagtgtttactcagaatgctcatctggctaatcaccggcgcatccacactggggagaagccataccgctgtacggaatgcggcaaagcctttcgggtccgctccagcctgacgacacatatggcaatccataccggggaaaaacgctataagtgtaacgagtgcggaaaggtttttcggcagagctctaatctcgcaagtcatcaccgcatgcatacaggggaaaagccatacaaatag

SEQ ID NO: 211948 - DNA, 2457 bp, synthetic construct
  misc_feature 1..2457: note = Description of Artificial Sequence: Synthetic coding sequence
  source 1..2457: mol_type = other DNA
atggccctgacccaggtgcggctgaccttccgggacgtggccatcgagttcagccaggaggagtggaagtgtctcgatccagcccaacgaattttatatcgggatgtgatgcttgagaattactggaatctcgtgtcattaggcttgtgccattttgacatgaacatcatcagcatgctcgaagaggggaaagagccttggaccgtgaagtcttgcgtaaagatcgcgagaaagccccggacccccgagtgtgtgaaaggagtagttaccgatattccaccaaaatgtaccatcaaggatctgctgcccaaagagaagtcatctacagaagccgtgtttcatacagttgttttagaaaggcacgaatcccctgatatcgaggacttttcttttaaggaaccacagaagaacgttcatgatttcgagtgtcagtggcgagatgataccgggaactataaaggggtcctcatggcccagaaggaaggcaagagggatcagcgagatcgcagggacatagaaaataaattgatgaataaccaacttggagtgagcttccatagccatcttccagagcttcagcttttccagggggagggtaaaatgtatgagtgtaatcaggtcgagaagagcaccaataatggtagcagcgtgtcccccctgcaacaaataccctcctcggtgcaaacacaccgctctaaaaagtaccacgaattgaatcatttctctctactgactcaacggaggaaagctaacagctgcggcaagccctacaagtgtaacgaatgcggcaaagcctttacccagaattcaaaccttacatcacaccggcggattcacagtggcgagaaaccttataaatgcagcgaatgtggcaaaacgttcacagtgcgaagtaaccttactatccaccaagtaattcatacaggcgaaaagccttacaagtgccatgaatgcggaaaggtgttcagacacaactcctacctggctacccacaggcggatccacacgggcgagaaaccttataagtgcaatgaatgcggaaaggccttccgcgggcatagcaacctgaccacacatcagcttattcacactggtgaaaagccgttcaagtgtaatgaatgcggaaagcttttcacccagaacagtcacctgatcagccactggaggatacataccggggaaaaaccatacaaatgcaacgagtgtggtaaggctttctcagtccgatcttctttagccattcatcaaacaatccatactggagagaagccctataaatgtaacgaatgtggcaaggtgttcagatataacagttaccttggaaggcacaggagagtccacacgggagagaagccgtataaatgcaatgagtgtggaaaagcattttctatgcactcaaacttggcaacccaccaagtgatccatactggaactaaaccattcaagtgtaatgagtgtagcaaagtcttcacacaaaatagccagttagccaaccataggcggatacacacaggagagaagccttacaagtgcaatgaatgtgggaaggcattcagcgtgaggagctctctgacaacacatcaagccatacactctggcgagaagccttacaaatgtattgagtgtggcaagagtttcacccagaagagtcacctgagaagtcatagaggtatccactctggcgagaagccctacaagtgcaatgagtgcggcaaagtattcgcccaaacatctcagcttgctagacactggcgtgtacatactggcgaaaagccatataaatgcaacgactgcgggcgagcatttagtgatcgctcatcattgacattccaccaagccatccatacaggagagaagccttataagtgtcacgaatgtggcaaagtcttcagacataacagctatctggctactcaccgccggatccacactggagagaagccatataagtgtaatgagtgtggaaaggcattttccatgcatagcaacctgactactcacaaagtgatacacactggcgagaaaccttacaagtgtaaccaatgcggcaaagtttttacccagaattcgcatctagcaaatcaccaaaggactcacacgggtgaaaagccctatcggtgcaatgaatgcgggaaagcattctcagttcggagctcgctgactactcatcaggcgattcatacagggaaaaaaccttataaatgcaacgagtgcggcaaggtattcactcagaacgcgcacctagcaaatcaccgtagaatccacacaggtgagaaaccttatagatgcacggagtgtggaaaggcctttcgtgtgcgaagcagcctgacgacccatatggctatccacacgggcgaaaagcgctataagtgcaatgagtgcggaaaggtgttccgacaaagttccaacctggctagccatcataggatgcataccggagagaaaccttataaatag

SEQ ID NO: 211949 - DNA, 1350 bp, synthetic construct
  misc_feature 1..1350: note = Description of Artificial Sequence: Synthetic coding sequence
  source 1..1350: mol_type = other DNA
atggagttcttcatcagcatgagcgagaccatcaagtacaacgacgacgatcataagacactgttcctcaagacactgaatgagcagcgtttggagggagagttctgtgatatcgccatcgtggtggaggatgtcaagttccgtgcacaccgctgtgtcctggccgcctgctctacttacttcaagaaacttttcaaaaagcttgaggtagactctagcagtgtcatcgaaattgatttcctccgttccgacattttcgaagaggtcctgaactacatgtatacagccaagatttctgttaagaaggaggatgtgaatttgatgatgagcagcggtcagatcctggggataagatttctagacaaactctgctctcagaagcgggacgttagttctcccgacgaaaacaatggacagtctaagagcaagtattgcctgaaaataaacagacccattggagatgccgctgacacgcaggacgatgacgtggaggagataggcgatcaggatgattccccttctgacgataccgtggagggaactccccctagtcaggaggacggtaagtccccaaccacgacattgcgggtgcaggaagctatcctcaaagaactgggatccgaggaggtgaggaaggtcaactgctacggacaggaagttgagagcatggaaaccccagaaagcaaggacctgggtagccagacccctcaggcactgaccttcaacgatgggatgtcagaagtgaaagacgagcagacaccgggctggacaactgctgcttccgatatgaagttcgagtatctgctgtacgggcaccatcgggagcaaatcgcatgccaagcgtgcgggaaaacgttctctgatgaaggcaggctgcgcaagcacgagaaactgcatacagcagataggccctttgtgtgcgagatgtgtactaaagggttcaccactcaggcacacctgaaggaacacctgaagatccataccggatacaagccttactcatgcgaagtatgtgggaagtcgttcatcagggcgccagatctcaagaagcacgaacgagtacattcaaatgaacgccctttcgcctgccatatgtgcgacaaggcctttaagcacaaatctcatttgaaagatcatgagcggcggcaccgcggcgagaaaccatttgtgtgcgggagctgcaccaaggcctttgcaaaagcctccgacttaaaacgccatgagaataatatgcactccgaacgcaagcaagttacccctagcgctatacagtcagaaactgaacagctgcaggctgccgctatggccgctgaagccgagcagcaactggagaccatcgcatgcagttag

SEQ ID NO: 211950 - DNA, 1350 bp, synthetic construct
  misc_feature 1..1350: note = Description of Artificial Sequence: Synthetic coding sequence
  source 1..1350: mol_type = other DNA
atggagttcttcatcagcatgagcgagaccatcaagtacaacgacgacgatcacaaaactctgtttctcaagacactgaacgagcaacgcctggaaggcgaattctgcgatatcgcgattgttgtcgaggatgtaaaattcagggcccatcggtgcgtgctggccgcatgctccacttacttcaagaaactgtttaaaaagttggaagtggacagtagctctgtgattgagatcgatttccttcgctcggacatcttcgaggaggtgctgaattacatgtacacggcgaaaatatctgtgaaaaaggaggatgtgaacctgatgatgagctctggtcaaatcctgggtatcaggtttctggataagctgtgtagtcagaaaagagacgtgtccagccccgacgaaaacaatggccagtccaagtccaaatattgtctcaagatcaatcgaccaatcggggatgctgccgatactcaggatgatgacgtcgaagagataggggaccaggatgactcaccatctgatgacaccgttgaaggcacacctccctctcaggaggacggaaaatcacccaccacaactctacgcgtgcaggaggctatacttaaggagttaggctccgaagaggtccggaaggtgaattgttacggccaggaggtggaatcaatggagactccggaatcaaaagatctgggctctcagactccccaggccctgacattcaatgacggcatgtccgaagtgaaagacgagcagactcctggctggacaaccgctgccagcgatatgaaatttgaatacctgctgtacggccatcatcgcgagcagattgcgtgtcaggcttgcggtaaaacattttctgacgagggacgactgagaaaacacgaaaaactgcatacggccgataggccctttgtctgcgagatgtgtaccaaaggtttcactactcaagcccatcttaaggagcacttaaaaatccatacaggctacaagccctattcatgtgaagtttgcggcaaaagttttatacgggcccccgacctgaagaaacacgagagggttcactctaatgagaggccatttgcttgtcatatgtgcgacaaagcattcaagcataagagccacctgaaagaccatgaaagaaggcatcgaggcgaaaagccgtttgtgtgtggttcatgcactaaggccttcgcgaaggcttccgatctgaaaaggcatgagaataacatgcacagtgaacgcaagcaggtaactcccagtgcaatccaatcagagacagaacagctgcaagccgccgcgatggccgccgaagcagagcaacagcttgagactattgcttgcagctag

SEQ ID NO: 211951 - DNA, 1458 bp, synthetic construct
  misc_feature 1..1458: note = Description of Artificial Sequence: Synthetic coding sequence
  source 1..1458: mol_type = other DNA
atggccaccgagcccaagaaggccgccgcccagaacagccccgaggacgaaggtcttctaatcgtcaaaattgaggaggaagaatttattcacggccaggacacgtgcctgcagagaagcgagctgttgaaacaggagctgtgcaggcaacttttccgacaattttgctatcaggacagccccgggcctcgtgaggccctgagcagacttcgggagctctgctgccagtggctgaaacccgaaatccataccaaggagcaaattttggagctgctcgtcctagagcagttcctgaccattcttcctggcgaccttcaggcttgggtgcatgagcattaccctgagtctggcgaagaggccgtgacaattctcgaggacctggaacgaggaaccgacgaagcagtccttcaggtccaggctcacgagcacggccaagaaatctttcaaaaaaaggtgtcaccccccggccctgccctgaatgtgaagctgcaacctgtcgaaacgaaagcacactttgactctagcgagccccaattgctgtgggattgcgataatgagtcagaaaacagtcgatctatgccgaaactggaaatcttcgagaaaatcgagagccagcggatcatttcaggcagaatttcaggatacatctctgaggcctccggcgaatctcaggacatctgcaagtccgcaggccgagtgaagcgccagtgggaaaaggagagtggagagtcacaaagactctctagcgcccaggacgagggtttcggcaaaatcctgactcataaaaatacagtgagaggcgaaataatttcccacgatggctgcgagcggcggctgaatttgaactccaacgaattcactcatcaaaagagctgcaagcatggcacttgtgaccagtcatttaaatggaacagcgatttcattaaccaccagatcatctatgctggagaaaagaaccatcagtacggcaagtccttcaagagccctaagctcgctaaacacgcggccgtgttttctggagacaagactcaccagtgcaatgaatgcggcaaagcattcaggcacagctcgaagttagcccgccaccagagaatccacaccggggagcgttgttacgagtgtaacgagtgcggcaaatcctttgctgagagctccgatctgacgagacaccgccgcatacataccggtgaacgcccttttggttgcaaagaatgtgggagggcgttcaacctgaatagccatctgatccgccaccagagaatccacactagagaaaagccctacgagtgctcggaatgtggtaagaccttcagggtgagctcccacctaattaggcacttccgcattcatacgggggagaagccatatgagtgtagcgagtgcggaagggcgttttctcagagcagtaacctgagtcaacatcaacgcattcacatgcgcgaaaatctgcttatgtag

SEQ ID NO: 211952 - DNA, 1239 bp, synthetic construct
  misc_feature 1..1239: note = Description of Artificial Sequence: Synthetic coding sequence
  source 1..1239: mol_type = other DNA
atgagcctgggcggcagcgacaccatgctgaagggcgccgacacctccgagtccggggctgtgatcaggggcaactatcgcctgggcctttccaaaaagtcaagcctattcagccaccagaagcatcacgtgtgcccagaatgcggcaggggcttctgtcagcggagtgacttgattaaacaccagcgcacacacacaggcgagaaaccttatttatgccccgagtgtggacgaagattttcccaaaaagcctctctgtcgattcatcagcggaaacacagtggagagaagccatatgtttgccgcgagtgtggcagacatttccgatacacttcatccctgacaaatcacaaacgtatccatagtggggagaggcccttcgtttgccaagagtgcgggagaggcttccgccaaaagattgcgctcctgcttcaccagcggacccacctggaggagaagccctttgtgtgccctgagtgtggacgggggttctgccagaaggcaagcctcctccagcatcaatcatctcacactggcgagcgcccctttctctgccttgagtgcggaagaagcttccgtcagcagtctttgcttcttagtcatcaagtgactcactccggggagaagccctatgtgtgtgctgaatgcggtcactccttccgccagaaagtcacgctgattcgacaccagcgcacgcacaccggagagaagccatacctatgtcctcagtgcggtagaggatttagccaaaaggtgacacttattgggcaccagaggacccatacaggtgagaaaccctatctgtgccctgattgtggcagaggatttgggcagaaggtaactcttatccggcaccaacgaacccacaccggcgagaagccatacctatgtcccaagtgcggacgggcattcggctttaaatcccttctcacgcggcaccaaaggactcactcggaggaggaactgtacgtagaccgggtgtgtggccaaggcctcgggcagaaaagccacctcatatcagatcagcgtacacattctggagagaagccctgtatctgcgatgaatgtggacgaggatttggtttcaaaagtgcgctgatccgccaccaacgcactcactccggcgaaaaaccgtatgtgtgtagggagtgtggcaggggcttttcacagaagtctcaccttcacagacaccgcaggacaaagtccgggcaccaactgctcccccaggaagttttctag

SEQ ID NO: 211953 - DNA, 291 bp, synthetic construct
  misc_feature 1..291: note = Description of Artificial Sequence: Synthetic coding sequence
  source 1..291: mol_type = other DNA
atgagccccggcctgctgaccacccggaaggaggccctgatggccttccgggacgtcgcagtggcatttacccagaaggagtggaagctgctgagctccgcccagcgcactctttatcgggaggtgatgttagagaattattcacacctggtgagcctgggcattgcttttagcaagcccaagctgatcgagcaactggaacagggggacgaaccctggagggaggaaaacgagcacttgctagacctgtgcccaggccgtcggattacgcggtctggagtcagagattag

SEQ ID NO: 211954 - DNA, 1812 bp, synthetic construct
  misc_feature 1..1812: note = Description of Artificial Sequence: Synthetic coding sequence
  source 1..1812: mol_type = other DNA
atgagccccggcctgctgaccacccggaaggaggccctgatggccttccgggatgtggcggttgccttcacccaaaaagaatggaagttgctgtcatccgcccagagaacactgtacagagaggttatgcttgagaattacagccacctagtgagtctcgggattgctttcagtaaaccaaagctgatcgaacagcttgagcagggggacgaaccttggcgcgaggaaaacgaacacctgctcgatctgtgtcctgagccccgaaccgaatttcagccctcattcccgcatcttgtggctttcagtagcagtcagttactaaggcaatatgccctcagtggccaccctacccaaattttccctagcagtagcgccggaggtgactttcaactggaagcgcctcgctgctcctctgagaagggcgagtccggggagacagaaggtcccgactcttctctgcggaaaagaccaagtcgcatttcacggacattctttagcccacaccagggcgaccccgtagagtgggtcgagggaaatcgggaaggggggaccgacttgagactggcccagagaatgtctctcggcggcagtgacacaatgctcaaaggggccgataccagcgaaagcggtgctgtcatcagaggcaactatagacttggactttcaaagaaaagtagtctcttttcccaccagaaacaccacgtgtgtccagagtgcggccgtggattttgtcagaggagcgacctgataaaacaccagagaactcacactggcgagaagccctatctgtgccccgagtgcggccggagatttagccagaaggccagccttagcatacaccagagaaaacactctggcgagaaaccatacgtctgccgcgagtgcggccgtcacttccggtacacctcatcccttaccaatcataaaagaattcacagtggggagcgcccctttgtatgccaggagtgtggtcggggcttccggcagaaaattgcactgcttcttcaccagcgcacgcatctagaagaaaaaccttttgtttgccctgagtgtggccgtgggttttgccagaaagcctctcttcttcagcatcagtcgtcccacacaggggagcgaccctttctttgcttggaatgcggcagatctttcagacagcagtcccttctgctgagtcaccaggtgacacattccggagaaaagccttacgtgtgtgcggaatgcggccactccttcagacaaaaagtgacccttattaggcaccagcgcactcataccggagagaagccatacctgtgcccacagtgcggaagaggcttctcacagaaagtgacactgattggccatcaacgcacccacactggcgagaaaccctacttatgcccggattgtggaagaggctttggtcagaaagtgacgctgatacgacaccaaaggacgcataccggggaaaagccgtacctatgtcccaagtgcggtagagcctttggcttcaagtcgctgcttactaggcaccaacgcacccacagtgaagaggagctgtatgtggaccgggtgtgcgggcaggggctcggacagaaatcacaccttattagcgatcagagaactcacagcggagaaaagccctgtatttgcgacgaatgtggacgcggcttcggctttaagtccgctttgattaggcatcagcggacccatagtggtgagaaaccgtacgtctgcagggagtgcggtcgggggttttctcagaagtcccacttgcacagacaccgcagaaccaagtctgggcaccagctgctccctcaggaggtattttag

SEQ ID NO: 211955 - DNA, 1224 bp, synthetic construct
  misc_feature 1..1224: note = Description of Artificial Sequence: Synthetic coding sequence
  source 1..1224: mol_type = other DNA
atggccgccaagatggagatcaccctgagcagcaacaccgaggcctcttctaagcaggaacggcatattatcgccaaactcgaagaaaaacggggccctcccctgcagaagaactgcccggaccctgaactgtgccgccagtccttcagaaggttttgttatcaggaggtcagcggtcctcaggaggctctgtcccagttgaggcagctgtgtaggcagtggttacaacccgaactgcataccaaggagcagatactcgaacttctggtcatggagcagtttctcaccatactacctcctgaaatccaggcccgggtgaggcaccgctgcccgatgtccagcaaggaaatcgtaacgctggtggaagacttccacagagctagcaagaaaccaaagcaatgggttgctgtttgtatgcaggggcaaaaagttctgttggaaaagaccggatctcaactgggtgaacaggaactccctgacttccaacctcagacgccaaggcgggatctgcgggaatcatctccagccgaaccatcccaggcgggagcgtacgatagactttctcctcaccattgggagaagtcacccctgcttcaggagccgaccccaaagctggccggcaccgaagcccccagaatgagaagcgacaataaggaaaaccctcagcaggagggtgccaagggcgcgaagccatgcgctgtttctgccggccggagtaaagggaacggactgcaaaacccggaaccaagaggcgccaatatgagcgaaccacgcctatccagacgccaagtgtcctcaccaaacgcgcagaagccctttgcccactatcagagacactgcagggttgaatatatctcttcccccttaaagtcccatccgctgagagagcttaagaagagcaagggcggcaagcgttcactgtccaatcgattgcagcatctgggacaccagccaaccagatccgctaagaagccatacaaatgtgacgattgtgggaagtcttttacatggaattcggagctcaagcgacacaaacgcgtgcatactggcgagagaccctacacatgtggcgagtgcggcaactgcttcggaagacagagcacactgaagctccatcaacgtattcataccggagaaaaaccataccagtgcgggcagtgcggcaagtccttcagacagagcagtaacctgcaccagcatcatcggctgcaccatggggattag

SEQ ID NO: 211956 - DNA, 705 bp, synthetic construct
  misc_feature 1..705: note = Description of Artificial Sequence: Synthetic coding sequence
  source 1..705: mol_type = other DNA
atggccgccaagatggagatcaccctgagcagcaacaccgaggcctcgagcaaacaggaaaggcacataatcgctaagctggaggaaaaacggggtccaccgctccagaaaaattgcccagaccccgagctttgcagacagtccttccgccgcttttgttaccaggaagtttctggcccacaggaggccctgagtcaactgagacagctgtgtcggcagtggcttcaacctgaactgcacaccaaagagcaaatattagaactcctcgtcatggaacagtttctcaccatcttaccccctgagatccaggctagggtacggcaccgttgcccgatgtcctccaaggaaatcgtcacactcgtggaggatttccacagagctagtaagaaaccgaaacagtgggttgcagtatgcatgcaagggcagaaagtcctcctggagaaaacgggcagccagttaggcgaacaggagttgcctgatttccaaccacagaccccgaggagagacctccgagagtcatcccccgctgaaccttctcaggcgggcgcgtatgaccgtctcagtccacaccattgggaaaagtcccccttactccaggaacctactcctaagctcgccggtacagagctgctcattgagaagacagatccaaacatggcaaccgacgagctgccgtgtaagctatggctcagcttcattgcctag

SEQ ID NO: 211957 - DNA, 2136 bp, synthetic construct
  misc_feature 1..2136: note = Description of Artificial Sequence: Synthetic coding sequence
  source 1..2136: mol_type = other DNA
atgcccgccgacgtgaacctgagccagaagccccaggtgctgggccctgaaaagcaggacggaagttgcgaggcttcagtgtcttttgaggatgtgacggtagactttagccgcgaagagtggcagcagctggaccctgcccagaggtgtttataccgagatgtgatgttggagctctattcccatcttttcgccgtaggataccatatcccgaatcctgaggtgatttttaggatgttgaaagagaaggagccaagagtggaggaagccgaggtctcccaccaacggtgccaagagcgagagttcggtttagagattccgcagaaggagattagcaaaaaggccagttttcagaaggacatggttggtgaatttacgagagatggcagttggtgttccatcttagaagagttgcggctggatgccgaccgtaccaaaaaggacgagcagaaccagattcagccaatgagtcactctgctttcttcaataaaaaaacattgaacactgagtccaactgcgagtataaagacccaggtaaaatgatccggacccgcccacaccttgcctcctcccaaaagcagccccagaaatgctgcctgttcactgagagcctcaagctaaacctcgaggtcaacgggcagaacgagtctaacgacacagagcagctggacgacgtcgttggcagcggccaactgttcagccactcatcgtccgatgcctgcagcaagaacattcataccggcgagactttttgcaagggcaaccagtgtaggaaagtgtgtggccacaaacaatccctgaagcagcaccagatccatacccagaagaaacctgatggctgttccgagtgcggcggaagtttcactcagaaatctcatctgttcgcccagcagcggattcatagcgtggggaaccttcacgaatgtggaaaatgcggtaaagcatttatgcctcagctgaaactgagcgtttaccttacggaccacacgggcgatattccgtgcatctgtaaggaatgcggcaaggtgtttatacagagatctgaactactgacccatcagaaaactcacacaaggaagaagccatacaagtgtcacgattgtggtaaagcatttttccagatgctctcattattccgtcatcaacggacccattcacgagagaagctatatgagtgcagcgaatgcggcaaaggtttttcacagaacagcactttgattattcaccaaaaaattcataccggcgagagacaatatgcttgcagcgagtgtggaaaagcattcactcagaaatctacactgagcttacatcagcgaatacacagcggccaaaagtcttacgtgtgtattgaatgcggtcaggcatttatccagaaggcgcatcttattgttcaccagcgaagtcacaccggggaaaaaccctaccagtgccacaactgtggcaagagcttcatctcgaaaagccagttagacattcatcatcggatccataccggcgagaaaccgtatgaatgcagcgattgcgggaagacctttacacagaaatcccacctgaatatccatcagaagattcacacgggagaacgccatcatgtctgcagcgagtgtggcaaggctttcaatcaaaaatccatcctgtcaatgcaccagcggatccataccggcgagaagccatataagtgcagtgagtgcggtaaggcctttacatcaaagagccagtttaaagagcatcaaagaattcacaccggggagaagccttacgtttgcactgagtgtggcaaagccttcaacggccgctcaaacttccataaacaccagatcacccatactagggagaggcccttcgtgtgctataagtgtggaaaagcgttcgtgcagaagtctgagctgattacccaccagcgcacccacatgggggagaaaccctatgaatgcctggactgcgggaagtcattctccaaaaaaccacagctcaaagtccaccaacggattcataccggcgaacgcccgtatgtttgtagcgagtgcggaaaggccttcaataatagaagcaacttcaataagcatcagactacgcatactcgagataaaagttataagtgtagctatagcgtaaagggattcaccaaacagtag

SEQ ID NO: 211958 - DNA, 966 bp, synthetic construct
  misc_feature 1..966: note = Description of Artificial Sequence: Synthetic coding sequence
  source 1..966: mol_type = other DNA
atggccgccggctggctgaccacctggagccagaacagcgtgacctttcaggaagtggccgtggactttagccaggaagaatgggcactgctcgatccagcccagaagaatctctataaggatgtgatgctcgaaaacttccgtaacctcgcgagcgtgggttaccagttatgcaggcacagccttatcagcaaggtggaccaagagcagctgaagactgacgagaggggaattctccagggagactgcgctgattgggagacacaactcaaacccaaagatacaatcgccatgcagaatatacctggcgggaagacttctaacgggatcaacactaattgcgttcggacgcacagtggcgagatgccttacgaatgctctgactgtgggaaagcctttatctttcagtcatcccttaagaagcatatgagaagccacaccggggaaaagccttatgagtgcgatcactgtggcaaaagcttctcccaatcctcccatctaaacgtccacaagaggacgcataccggcgaaaaaccatatgattgtaaagagtgcggaaaagctttcaccgtcccctctagcctgcaaaaacacgtgcgtacccacaccggcgaaaagccttacgagtgctcggattgtgggaaggcatttattgaccagagctccctgaagaagcatacacgatcccacactggggagaaaccctatgaatgcaaccagtgcggcaagtccttctctacaggcagctacctgattgttcacaagcgtacacataccggagaaaagacatatgagtgcaaagagtgcggaaaagcgttcagaaacagttcctgccttcgggtccatgtgcggacacatacaggtgaaaagccgtacaagtgcatccagtgcgaaaaagccttcagcacatcaactaatctgattatgcacaagcgaatccacaatggacagaagctccacgaatag

SEQ ID NO: 211959 - DNA, 1446 bp, synthetic construct
  misc_feature 1..1446: note = Description of Artificial Sequence: Synthetic coding sequence
  source 1..1446: mol_type = other DNA
atggccgccggctggctgaccacctggagccagaacagcgtgacctttcaagaagtggctgtcgacttcagccaggaggagtgggcactactggacccagcccagaagaatttatataaagacgtgatgctagagaatttccgcaacctggcctctgtaggctaccagctgtgtcgacattcactcatttcgaaggtcgaccaggagcagctgaaaaccgacgagagagggattctccagggcgactgcgccgattgggaaacacagctcaagcccaaggatacaatcgcaatgcaaaacataccgggaggaaaaacatcaaatggcattaacaccgcagaaaaccagccaggagaacacagtctggagtgtaatcactgtgggaaatttagaaagaatactcgcttcatttgcactcggtattgcaagggggaaaagtgttacaagtatattaaatattcgaaagtgttcaatcatccatccaccttaagatctcacgtgtccatacacattggcgaaaaaacccttgaattcaccgactgtcgtaaagcattcaatcaagaatcatccctgcgtaaacatctgcggaccccaactggccagaagtttcaggagtacgagcaatgcgacatgtctttctcgctgcattcttcttgttcagtacgcgaacagatcccaaccggagagaagggtgacgaatgctcagattacggcaagatttctcccttgtcagtgcatacgaaaacgggtagtgtggaagagggtcttgagtgtaacgagcatgagaaaacctttactgatccactcagtttgcaaaattgcgtgcgcactcactcaggggagatgccttacgagtgctccgattgcggtaaggcattcattttccagtccagcttaaaaaagcacatgcgctcccacacaggtgagaagccctatgaatgtgaccattgtggtaagtcattctcacaatcatcacacttgaatgtacataagcgtacgcacacgggcgaaaagccctacgactgcaaggagtgtggaaaagctttcaccgttcctagttcattgcagaaacatgtgcggactcacaccggggaaaagccctacgagtgtagtgattgtggaaaagctttcatcgatcaaagctctcttaaaaaacacactcggtcccacaccggagagaagccgtatgaatgtaaccagtgcggaaagtccttctctacaggcagttacctgatcgtacacaaacggacacatacaggggagaaaacatacgagtgcaaggagtgtggcaaggcctttcggaattcctcttgtctgcgggtccatgtccgaacgcacactggtgaaaaaccttacaaatgcatccagtgcgagaaggctttctcaacgtctactaatctgatcatgcacaaaaggatccataatggccagaaactgcatgagtag

SEQ ID NO: 211960 - DNA, 363 bp, synthetic construct
  misc_feature 1..363: note = Description of Artificial Sequence: Synthetic coding sequence
  source 1..363: mol_type = other DNA
atggccgccggctggctgaccacctggagccagaacagcgtgaccttccaggaggtcgcagtggattttagtcaggaagagtgggccttactcgatccagcccagaagaacctgtacaaagacgtgatgttggagaacttcaggaatcttgccagcgtgggctatcaactctgcagacactctttgataagcaaagtggaccaggaacagctcaaaaccgacgaaagaggcattctccaaggtgattgtgccgattgggagacccaacttaagcccaaggacaccatcgctatgcagaacatacctggtggtaagacatctaatgggatcaacaccaatcctcacggtagagagttcctgtag

SEQ ID NO: 211961 - DNA, 966 bp, synthetic construct
  misc_feature 1..966: note = Description of Artificial Sequence: Synthetic coding sequence
  source 1..966: mol_type = other DNA
atggccgccggctggctgaccacctggagccagaacagcgtgacctttcaggaggtggccgtcgatttcagtcaggaggagtgggccctgctcgacccagctcagaagaatctctataaagacgtcatgctcgagaacttcaggaacctggcttccgttgggtaccagttatgccgccatagtttgatttccaaggtagatcaagagcaactaaagaccgatgaacgaggtattctccagggggattgcgccgattgggagacacagctgaaacctaaggatacgatagcgatgcagaatatccctggcggaaagaccagcaatgggatcaacacaaattgcgtgagaacccactcaggcgaaatgccttacgagtgctccgactgcgggaaggccttcattttccaaagcagcctaaagaaacacatgcggtctcatacaggcgagaagccatacgagtgtgatcactgtggcaagtccttctctcagtccagccatctcaatgtccataagcgcacacacacaggtgagaaaccatatgattgcaaggagtgtggcaaggccttcaccgtcccatccagtcttcagaagcacgtgcgcactcataccggtgagaagccatacgagtgcagtgactgcggtaaggcatttattgatcagtcttctctgaagaaacacactcgcagtcatacgggggaaaagccttacgagtgtaaccagtgcgggaagtctttctccaccggtagttatctgatcgtacacaagcggactcacacgggagagaaaacctacgagtgtaaggaatgtgggaaggctttcagaaattcctcctgtctccgcgttcatgtaagaacgcacacaggagagaaaccatacaagtgtatccagtgcgagaaggcctttagtacatcaacaaacctgatcatgcataagcggattcacaacgggcagaagttacatgaatag

SEQ ID NO: 211962 - DNA, 1650 bp, synthetic construct
  misc_feature 1..1650: note = Description of Artificial Sequence: Synthetic coding sequence
  source 1..1650: mol_type = other DNA
atgcccgtggacctgggccaggccctgggcctgctgcccagcctggctaaggctgaggactcacaattctccgagtccgacgcagcattacaggaggagctctctagtcccgaaactgcgagacaactgtttcggcagtttaggtatcaggtaatgtctggcccccacgagacactgaaacagctcagaaagctgtgtttccaatggctccagccagaagttcacacaaaagaacagatattggaaattctcatgctagaacagtttctgactatcctgccaggcgagatacagatgtgggtgcgcaaacagtgccctgggtccggagaggaggcggtgacccttgttgaatccttgaagggtgacccccagcggctgtggcagtggattagtattcaagttctcgggcaggatatcctgagcgaaaagatggaatccccttcctgtcaagtgggcgaagtcgaacctcatctggaggttgttccacaggaactaggcttagaaaactcctcaagcgggccaggtgagctgctatcacacatcgttaaggaagagtccgacaccgaggctgagctggctttggcagcatcccagcccgctcggctcgaggaacggctgattagagaccaggacttaggggcatcacttctacccgccgcgccgcaagagcaatggaggcaactggacagtacacaaaaagagcagtattgggatctgatgctggagacctacggtaaaatggtgagcggcgcggggatttctcatccaaaatccgatctgacgaacagtatcgagtttggcgaagagctagccggaatttatttgcatgtgaacgagaaaatcccacggcccacatgcatcggagatcggcaggaaaatgacaaggagaacctgaatctggagaatcatcgggaccaggagctgctccacgcttcctgtcaggcctcaggcgaagtaccatcccaagcatccctgcgcggcttcttcaccgaggatgagccgggatgtttcggggagggggagaatttgccggaggctctgcagaacatccaggacgaagggacaggcgagcagctttctcctcaggagagaatttccgagaaacagctgggccaacacctgccgaacccgcattccggagaaatgtccacgatgtggctcgaggaaaaaagagaaaccagccagaagggccaacctagagctccaatggctcagaaattgcctacttgccgggagtgcggtaagacattctacagaaacagtcagttgatctttcaccagcgcacacataccggagagacttacttccaatgtactatatgcaaaaaggcttttcttcggtccagcgactttgtgaagcaccagcgcactcacacaggagagaagccctgcaagtgcgattactgcgggaaggggtttagtgacttctccggactcaggcatcacgagaaaattcacactggggaaaagccctataaatgtcctatatgcgagaagagctttatccagaggagcaacttcaacaggcaccaacgcgtccatacgggtgagaaaccatacaagtgtagtcattgtggaaaaagcttcagttggtcttcctcccttgacaagcatcagaggtctcacttaggcaagaagccatttcagtag

SEQ ID NO: 211963 - DNA, 1650 bp, synthetic construct
  misc_feature 1..1650: note = Description of Artificial Sequence: Synthetic coding sequence
  source 1..1650: mol_type = other DNA
atgcccgtggacctgggccaggccctgggcctgctgcccagcctggccaaagcagaagacagtcagtttagcgaaagcgacgcggccctgcaggaggaactatcatcgcccgaaactgcccgacagctgttccggcaatttaggtatcaggtgatgtccgggccacacgaaacgttgaagcagttgagaaagctctgcttccagtggctgcagccagaagttcacacaaaagaacaaatcctggagatcctgatgctggaacagttcttgacaatcttgcccggagagatacaaatgtgggtgcggaagcaatgccccgggtccggtgaagaagcagtcactctcgtggagagtctaaagggcgacccccagcgactgtggcaatggattagtattcaggtgttggggcaggacatcctgagcgagaaaatggagtccccttcctgtcaggtgggcgaagtggagcctcacctagaagtggttccacaagaactgggattagaaaattcttctagtggccctggagagctgctgtcccacatcgttaaggaagaatctgataccgaagccgaactagccctggctgccagccagccagccaggcttgaggagcggcttatcagagatcaggatttaggcgcctccctactgcctgctgcccctcaggagcagtggagacaacttgactcaacgcagaaggaacagtattgggacctgatgctggagacttacggaaaaatggtttctggggctggcatatctcaccctaagtcagacctgactaattctattgagtttggcgaggagctcgctgggatctacttgcacgtcaatgagaaaattccaaggcccacctgcatcggggacagacaggagaacgacaaggagaacctcaacctggaaaatcatcgggaccaggagctgttgcacgcatcctgtcaagcttccggcgaggtcccatcacaggcctctctccggggtttcttcaccgaggatgagcccggttgcttcggagaaggcgagaacctcccagaggcacttcagaacattcaggacgaagggaccggcgaacagctctcaccccaggagcggatttcagaaaagcagttaggacagcatcttccaaacccacactcaggggagatgagcacgatgtggcttgaagaaaagagggagacatctcaaaaagggcagccgcgagcgcctatggcgcagaaactgccaacttgccgtgaatgcggcaagaccttctataggaattcccagctgatctttcaccagaggacacacaccggtgagacctatttccaatgcactatttgtaaaaaagctttccttaggtccagcgacttcgtaaaacatcagagaacccacactggagagaaaccctgtaaatgcgattactgcgggaaggggttctccgacttcagcggcctgcgccaccacgagaagatccacaccggggagaagccatataagtgccccatttgcgagaagagtttcatccaaagatctaattttaatcgccatcaacgagtgcacacaggcgagaagccatataagtgtagtcattgcggaaaaagtttcagctggagctcctccctggataaacatcagagatcacatctggggaaaaagccttttcagtag

SEQ ID NO: 211964 - DNA, 1959 bp, synthetic construct
  misc_feature 1..1959: note = Description of Artificial Sequence: Synthetic coding sequence
  source 1..1959: mol_type = other DNA
atgatcaacgcccaggagctgctgaccctggaggacgtgaccgtggaatttacctgggaagagtggcagttattgggcccattccagaaggacttgtacagggacgtgatgcttgagatctattccaatctgctctccatgggttatcaagtttctaagcccgacgccttgtccaaattggagcgcggagaggaaccctggacaatggaggacgagcggcactcccgaatttgccccgaaaacaacgaagtggacgatcacctgcaggatcacttagagaaccagaggatgctgaaaagtgtggagcagtaccacgagcacaacgcctttggcaacacagcttcacagaccaaaagtctgtgtctgtttagggagaatcacgacaccttcgaactctatatcaaaacactgaaatccaacctgagtctcgtaaatcagaataagagctgcgagattaataactcaacaaaatttagcggagatgggaaatcttttctgcatggaaattatgaagaactctacagcgcggctaagttttcggtgtctacaaaagccaattccaccaagagtcaggtgtctaaacaccagagaacacatgagatcgagaaaaaccatgtgtgcagcgaatgtgggaaagcgtttgttaagaaatcccagctcactgatcacgagcgtgtccatacgggagagaagccttatggatgtactctctgcgcgaaggtgttttcccgaaagagccgcctgaacgaacaccaacgaatccacaaaagagagaaatctttcatctgttcagaatgcggcaaggttttcacgatgaagagtcgactcatcgaacaccagaggacacacaccggtgagaaaccctatatctgcaacgagtgcgggaaaggctttccgggaaaacggaacctgatcgtgcaccagcgcaatcatacaggagagaaatcctacatctgctctgaatgtgggaaggggttcactggcaagtcaatgctgattattcatcagagaacacacactggtgaaaagccttatatttgcagcgaatgcgggaaaggattcactactaagcactacgttatcattcaccaaaggaatcatactggcgaaaagccctatatttgcaacgagtgcggcaaaggcttcaccatgaaaagtagaatgattgaacatcagcggacgcacaccggcgagaagccgtatatctgctctgaatgtggaaaaggattcccccgtaagtccaatctgattgtgcaccaacgcaaccataccgttgagaaatcttacctctgttctgagtgtggcaaaggatttactgtgaaatcaatgttgatcatccaccaaagaacccatactggagagaaaccttacacctgctccgagtgtgggaaaggcttcccactgaagagccgcttaattgtgcaccagaggacccatacaggagaaaagccttaccggtgctctgagtgcggaaagggattcattgtgaactccgggctcatgttgcaccaacggactcatacaggcgaaaagccttacatatgcaacgagtgtggaaaggggtttgcctttaagtctaatctggttgtccaccagagaacacataccggcgaaaagccctttatgtgctctgaatgcggtaaaggcttcaccatgaaacggtacctgattgtccatcaacaaatccacaccgaagaaaaatcttgtatttgttctgagtgcggacgcggtttcgctaaggaaactgaactcgctctgcacaagcaagttcacactggcgagaagccctacgggtgcaatgaatgcggcaaaggttttactatgaagtctcggctgattgtccatcaacggacacacacaggcgagaaaccgttcgtatgtagtgaatgcagaaaggccttcagcagcaaacgtaacctcattgtccaccagaggacacacaacggaaataagccttag

SEQ ID NO: 211965 - DNA, 2004 bp, synthetic construct
  misc_feature 1..2004: note = Description of Artificial Sequence: Synthetic coding sequence
  source 1..2004: mol_type = other DNA
atgcgggcctgcgccggcagcacccgggaggccggcagcggcgcccaggacttgagcacccttctatgtttagaggaatcgatggaagagcaggacgagaaaccccccgagcccccgaaggcgtgtgcccaggagggagtgaactttaaaattgtgactgtggatttcactcgagaagaacagggcacatggaaccccgcacagaggaccttggacagggacgttattcttgaaaaccatcgcgacttggtttcttgggatctggcaactgccgtgggtaagaaggattctaccagtaagcaacgcattttcgacgaggagccagctaatggagtaaaaattgaacgtttcacaagggacgacccttggctatcctcctgcgaggaggtagacgattgtaaggaccaactggagaagcaacaagagaaacaggagatcctgttgcaggaagtagccttcactcagagaaaggcagtcatccatgaaagggtatgtaagagcgacgagacaggggagaagagtggactcaatagcagcttattcagctcaccggtgattccgatcagaaaccactttcacaaacacgtcagccatgctaagaagtggcacctcaatgccgccgtaaactcccatcagaaaatcaacgagaatgaaaccctttacgaaaataacgaatgcggcaagcccccacagtcaattcaccttatccaatttacaaggactcagaccaaggataagtgctacggctttagcgatcggatccagtctttctgccacggaactcccttgcacattcacgaaaagatccatggaggcgggaaaacattcgatttcaaagaatgcggccaagtcttaaatcctaaaatctcccacaatgaacagcagagaatcccttttgaagagagccagtacaagtgttccgagacttctcactcttcaagcttgactcaaaatatgcgcaacaacagcgaggagaagccttttgagtgtaaccagtgcggaaaatcattttcttggagtagtcatctcgttgcccaccagcgaacccacaccggcgagaaaccctacgaatgcagcgaatgcggcaaaagcttttctagaagtagccacctcgtgtcacatcaaaggacgcataccggtgagaaaccttaccgctgcaatcagtgtgggaaaagtttcagccagtcctacgtgttggtagtgcaccagcgtacccatactggggaaaaaccgtacgagtgtaatcagtgtggcaaaagttttcgccagagttacaaactaattgcccaccaaagaacacacactggagaaaaaccctatgaatgcaatcagtgcggaaagtccttcatccaaagctacaaactcattgcacaccagaggatccacacaggagagaagccttacgagtgtaaccaatgtggaaagtcattttcccaatcctataaactcgtcgcgcaccaaaggacacatacaggagaaaaacccttcgagtgtaatcaatgtgggaaatctttctcctggtcgtcccagcttgtcgcccaccagaggactcacactggggagaagccgtatgagtgcagcgaatgcggcaaatcattcaaccgcagcagtcatctggttatgcaccaacgaatccacactggagaaaaaccatacgagtgtaaccaatgcgggaagtccttttcacagtcatacgtactggtcgtacaccagcgcacacacacaggtgagaaaccctatgaatgcagccagtgcggtaaatcttttcggcaatctagctgtctaacacagcaccaacgaacccacacaggcgaaaagccttttgagtgcaaccagtgcgggaagacctttagtctgagcgctcgtttaattgtccatcaaaggactcacactggcgaaaagccatttacctgcattcagtgtgggaaggcttttatcaattcttacaagcttattcggcaccaagctacccacacagaggagaaactgtacgagtgtaactag

SEQ ID NO: 211966 - DNA, 1848 bp, synthetic construct
  misc_feature 1..1848: note = Description of Artificial Sequence: Synthetic coding sequence
  source 1..1848: mol_type = other DNA
atgccccagctgcagtaccccgagggctacctggcccccaaccggtgtcttgtgagcaactgtggtgtcaataaaatgtccaacgacgaacttgttggacagaatcacggcatggaaggcgaggcatgtatcgggggagatgtcacatttaacgatgtcgccatcgacttcacccatgaggagtggggttggctatcaagcgcccagcgcgacctgtataaagatgtgatggtgcagaattatgagaatctcgtgtccgtcgctgggctcagcgttactaaaccatatgtgatcacactgctcgaagatgggaaggaaccctggatgatggagaagaagttgagcaagggcatgattccggactgggagtcgagatgggagaataaggagctgtctactaagaaggacaactacgacgaggattcccctcagactgtcattatagagaaagtcgttaaacaaagctatgaattctccaactcaaagaagaatcttgagtacatcgaaaaactcgaaggtaagcacgggtctcaggtggaccattttcgtcccgccatactgacctcacgggaatcacccaccgccgactcggtgtacaagtataatatatttcgctctaccttccactctaaatctaccctctctgagccacagaaaatctctgcagaaggcaatagccacaagtacgatattttaaagaaaaacttacccaaaaagtctgtgattaaaaatgaaaaagtgaatggaggaaagaagctgctgaatagtaataaatccggcgctgcttttagccagggaaaaagtctgactctcccgcagacctgtaaccgggagaagatttacacctgcagtgaatgtggaaaagcttttgggaagcagtccattctgaacagacactggagaattcacaccggggagaaaccgtacgaatgccgggagtgtgggaagaccttcagtcacggctcaagccttacccgccacctgatttcccacagcggtgaaaaaccgtataagtgtattgagtgcggaaaggcattctcccacgtaagctccctcaccaatcatcagagcacccataccggtgagaagccctatgagtgtatgaactgcggaaagagcttctctcgagtgtctcacttgatcgagcatctgaggattcatacacaggaaaagctttacgaatgcaggatttgtggcaaggcattcattcacaggagctcattgatccatcatcaaaaaattcataccggggaaaagccatacgagtgtagagagtgcgggaaggctttctgttgttccagccatctaacccgacaccagaggattcataccatggagaaacagtatgagtgtaacaagtgcttaaaggtgttctcatcattgagtttcctcgttcagcatcagtccatccataccgaggagaaaccattcgagtgccaaaagtgcagaaagagttttaaccagctagaatctctgaatatgcacttaaggaatcacatccggctgaaaccgtatgaatgctctatttgcggtaaagctttcagtcataggagttctctgttacagcatcaccggatccacactggagagaaaccatacgaatgtataaagtgcggcaagacattctcctgctcgtctaatttaaccgtccatcagaggatccacacgggtgagaagccttacaaatgtaatgagtgcgggaaggctttcagcaaaggatctaaccttaccgcgcaccagcgggtgcacaacggcgagaagcccaatagtgttgtaagtgttgagaagccactggactatatgaaccattacacctgtgaaaaatcttatagacgcgagactgtatag

SEQ ID NO: 211967 - DNA, 1404 bp, synthetic construct
  misc_feature 1..1404: note = Description of Artificial Sequence: Synthetic coding sequence
  source 1..1404: mol_type = other DNA
atgccccaggtgaccttcaacgacgtggccatcgacttcacccacgaggagtggggctggctgtcttccgcacaacgggacttatacaaagacgtgatggtccagaactacgaaaacctggtctcagtcggactctctgttaccaaaccctacgtcattacgcttctcgaggatggaaaggaaccatggatgatggaaaaaaaattgagcaaggggatgatccccgactgggagtcccgctgggagaacaaggaactgtcaacaaaaaaggataattatgacgaggattccccccagaccgtgatcatagaaaaggtggttaagcagtcgtacgaattttccaacagcaagaaaaatttagagtacatcgagaaattggagggcaaacacggcagccaggtggaccatttccgccccgccattctgactagccgcgagtcccccaccgctgatagtgtctataagtataacatcttcagatcaaccttccacagtaaatcgacactttctgagccccagaaaatcagtgctgaaggcaactcccacaagtatgacatcctcaagaaaaacttgccaaagaaatctgtgatcaaaaacgagaaggttaacggggggaagaagctgctcaacagcaataagagtggggctgccttttctcagggcaaatccctgaccttaccccagacttgtaaccgggagaaaatttatacttgctccgagtgcggcaaggcatttgggaaacaatcaattttgaacagacactggaggattcataccggtgagaaaccctatgaatgtagggaatgtggcaagacatttagtcatggatcttccctgacccgtcatcttatctcacatagcggcgagaagccttacaagtgtattgagtgtgggaaagcatttagtcacgtctcctctttaacaaaccaccagagcactcacaccggagaaaagccatacgagtgtatgaactgcggcaaaagctttagccgcgtgtcccatttgatcgagcaccttcggatacacacacaggagaagttgtacgaatgcagaatctgtgggaaagctttcattcaccgatcaagcctgatccaccaccagaaaatccatactggcgagaaaccctacgagtgccgggaatgcgggaaggccttttgttgtagcagccatctgactagacaccagcggatccacacaatggaaaaacagtacgagtgtaataaatgccttaaagtcttcagtagcctcagctttttggtccaacaccagtctatccacaccgaagagaaaccgttcgagtgccaaaaatgcaggaaatcatttaaccagttggagtctttgaacatgcacctgaggaaccatatcgagacgctgcgaatgcagtatatgtgggagtccctctag

SEQ ID NO: 211968 - DNA, 1713 bp, synthetic construct
  misc_feature 1..1713: note = Description of Artificial Sequence: Synthetic coding sequence
  source 1..1713: mol_type = other DNA
atgccccaggtgaccttcaacgacgtggccatcgacttcacccacgaggagtggggttggctctcttcggcacaacgcgacctgtataaagacgtgatggttcagaactatgaaaaccttgtttctgtggggctgtctgtgacgaagccttacgtgataacactgctggaggacggaaaggagccttggatgatggaaaagaagctctctaagggcatgataccagactgggaaagccgctgggagaacaaagaacttagtacaaaaaaggataattatgatgaggatagtccccaaacggtcatcattgagaaggtggtcaagcagtcatacgagttctcaaattctaagaagaatcttgagtacatcgaaaaattagagggaaagcacgggtctcaagtggaccacttcaggcccgcgatcctgacatcgagggaaagcccaactgccgactcagtgtacaaatacaacatcttcaggtctacttttcacagcaagtcaaccttatccgaacctcagaaaatcagcgccgagggcaactctcacaaatatgatattttaaagaaaaacttgccaaaaaaatccgtcatcaaaaacgaaaaggtgaatggcggaaagaagttgctgaattctaacaagagcggcgcggcttttagccagggcaaatccctgactctgccgcagacctgcaatagggagaagatatatacctgctcggagtgcggaaaagcatttgggaaacagagcatactaaatagacattggcggattcacaccggtgaaaagccttacgagtgtagggagtgcggcaaaacattcagccacggctctagcttgacccgccatctgatctcacacagcggggagaagccgtacaagtgcatcgagtgtggcaaagcattttcacacgtcagttccttgaccaaccaccagtcaacccacactggtgaaaagccatatgagtgcatgaattgcgggaaatctttctcccgcgtttcccacttgatagagcaccttcgcatccacacccaggagaaactctatgagtgtagaatttgtggaaaagcattcatccaccgatcctctttgatccaccaccagaagatccacactggcgagaaaccatatgagtgcagggagtgcggcaaggcgttttgttgtagcagccaccttacacggcatcaaaggatccacacgatggagaagcagtacgaatgtaacaagtgtctgaaggtttttagctccttgagctttttagtgcagcaccagagtattcataccgaagaaaagcccttcgagtgccagaagtgtcgaaagagtttcaaccagctggagagcctgaacatgcatttgagaaaccatattagactaaagccctacgaatgttcaatctgcgggaaggctttttctcaccgatcctcactgcttcagcatcaccggatccacacaggtgagaaaccgtatgagtgtattaaatgcgggaaaacgttcagctgttcatcaaacctaaccgttcaccagagaatacacacgggcgaaaagccctacaagtgtaacgagtgtggcaaggcgttttccaagggatctaacctaacggctcaccaacgggtgcacaacggcgaaaagccaaatagcgtcgtctcggtcgagaaacccttggactatatgaatcactatacctgtgaaaagtcataccggcgtgagaccgtgtag

SEQ ID NO: 211969 - DNA, 1716 bp, synthetic construct
  misc_feature 1..1716: note = Description of Artificial Sequence: Synthetic coding sequence
  source 1..1716: mol_type = other DNA
atgccccaggtgaccttcaacgacgtggccatcgacttcacccacgaggaatgggggtggctgagcagcgcgcagcgcgacctgtacaaagatgtgatggtgcagaattatgagaaccttgtgagtgtggccggtctgtccgtgactaagccgtatgttatcaccctgcttgaagacggaaaggagccatggatgatggaaaaaaaactcagtaagggaatgatacccgactgggagtcacgctgggaaaataaggagctgtctaccaaaaaagacaattatgatgaagattcccctcagacagttataattgaaaaagtggtgaaacagtcctatgaatttagtaacagcaaaaagaatctggagtacatagagaagctggaaggcaaacacggtagccaggtcgatcattttcggccagcaatacttacatcccgcgagagcccgacagctgactcggtctataagtacaacatctttcgcagtactttccactctaaaagcaccctaagcgagccccagaagatttccgcagaaggcaatagccataagtatgacatccttaaaaagaacctgcctaaaaaatctgtgattaaaaatgaaaaggtgaatgggggtaagaagctactgaattctaacaaatctggggcagcttttagccagggaaagagcctcactcttccccagacttgtaatagggagaagatctacacatgctctgagtgcggcaaggcgttcggcaagcaatctatactcaacaggcactggcgcatccatacgggcgagaagccgtatgaatgccgggagtgtgggaaaaccttctcccatgggtcaagtctgactaggcacctcatctcacattccggcgaaaaaccctacaagtgtatagagtgcggaaaagcattctcacatgtgtcatcactgaccaatcaccaatcaacccacaccggcgaaaaaccctatgagtgtatgaactgcggtaagtcattttcacgcgtcagccacctgatcgaacaccttcgcattcatacccaggaaaaactgtacgaatgccggatttgcgggaaggcgttcatacatcggtcttccctgatacaccaccagaagattcacaccggtgaaaaaccatacgaatgtcgcgagtgtggcaaggccttctgttgcagttcccacctcactaggcaccaacgcatccacacaatggagaagcagtacgagtgcaataaatgcctcaaagtgttctccagcctcagctttcttgtgcaacatcagtcaattcatacggaggagaaaccttttgagtgccagaagtgtaggaagtcattcaaccaactggagagtctcaatatgcatcttcgcaatcatattcggcttaagccttatgaatgctccatctgtgggaaggccttctctcaccgtagttccttacttcagcatcatcggattcatactggcgagaaaccttacgagtgcatcaagtgcggtaaaacctttagttgctcatctaacttgacagtgcaccagcgaattcacactggtgagaagccttacaagtgcaatgagtgcggcaaggccttttctaagggtagtaatctgacagctcaccagcgagtccacaatggtgagaagcctaatagcgtggtctctgtcgagaaacccctggactacatgaatcactacacctgcgagaaatcctatagacgggagaccgtttag

SEQ ID NO: 211970 - DNA, 1920 bp, synthetic construct
  misc_feature 1..1920: note = Description of Artificial Sequence: Synthetic coding sequence
  source 1..1920: mol_type = other DNA
atgacccccgccagcgccagcggcgaggacagcggcagcttctacagctggcagaaagctaagagggagcagggtctggttacatttgaggacgtcgccgttgacttcacacaggaggagtggcaatacttgaatcccccccaacggacattgtatagagacgtcatgttggagacctactccaacttggtcttcgttggccaacaggtgacaaaacctaacctgattcttaagctggaggtggaggaatgtccagctgagggtaagatccccttctggaactttccagaggtctgtcaggtggacgagcagatcgagagacagcatcaagacgatcaggataagtgcctgctgatgcaggtgggcttctcagacaaaaagacaatcattactaagtctgcccgagactgtcacgagttcgggaatatactgcacttatctacaaatttggtcgcctccatccaacgcccagacaagcacgagtctttcggcaataatatggttgataatctcgacctctttagcaggtcaagtgctgagaacaagtacgataatgggtgtgcgaaactgttttttcacacagaatacgagaaaacaaacccaggtatgaagccttacgggtataaagagtgcgggaaggggctccggcgcaaaaaaggactctcacttcaccagagaatcaagaacggggaaaagccattcgagtgcactgcttgccgaaagaccttctcgaaaaagagtcacctgatcgtccactggagaacccacaccggcgaaaaacctttcggttgcaccgaatgtggaaaggcgttttctcagaaatcccagctgatcatccacctgaggacacacactggggagagaccattcgagtgtcccgaatgcggcaaagcctttagggaaaagtcaaccgtaattatccattatcggactcacactggagaaaagccatatgagtgcaatgaatgtggaaaggccttcacacaaaaaagcaacctgattgtgcaccagaaaacccatactggggagaagacttacgagtgcactaagtgcggggagtcctttatacagaagctggatctgatcatccaccattcgactcatacggggaagaagcctcatgagtgcaacgagtgtaagaaaaccttctccgataagtctacactcatcatccaccagagaacacacacaggcgagaaaccccacaaatgcactgagtgcgggaaatctttcaatgagaaatcaaccttgatcgtgcatcaaagaacccacacgggggagaagccctacgaatgcgacgtgtgcggcaagacattcacacaaaaaagtaacctaggagtgcatcagcggacccattccggggaaaaaccctttgagtgtaatgagtgtgagaaagctttctctcagaagtcttacttaatgctgcatcagcggggacatactggcgagaagccatacgaatgcaacgagtgtgagaaagctttctctcagaagtcatacctgattattcatcagcgcactcatacagaggaaaagccctacaaatgtaatgaatgcggcaaggcatttcgagagaaatcaaaactgatcatccatcagcgcattcacacaggtgaaaaaccttacgagtgcccagtgtgctggaaggccttctctcagaagtcacaactgattatccaccagcgcacccacacaggtgaaaagccatacgcttgcacagagtgtggcaaggctttccgtgaaaagagcacctttacagtccatcaacgtacgcacaccggcgagaagccttacaaatgcacagagtgcgggaaagcctttactcagaaatctaaccttattgtacaccagcgaacccacgcaggtaaaaaggctcacggccgcgggcatacacgtaagagtaagtttatggcccactag

SEQ ID NO: 211971 - DNA, 1863 bp, synthetic construct
  misc_feature 1..1863: note = Description of Artificial Sequence: Synthetic coding sequence
  source 1..1863: mol_type = other DNA
atggccaagccccagggcctggtgaccttcgaggacgtggccgtggatttcacacaggaagaatggcaatatctgaaccccccccaacgcacactgtacagagatgtgatgctggaaacatatagcaacttagtgtttgtgggccaacaggtaaccaaacctaatctcattctgaaactggaggtggaggagtgccctgcagagggtaaaattcccttttggaactttcctgaagtgtgccaggtcgatgaacaaatcgaacgccagcaccaggacgaccaggataagtgcctcctcatgcaggtgggtttctccgacaaaaaaacaatcatcaccaaatcagcccgggactgtcacgagttcgggaatattttgcacttatccacaaatctcgtcgcctctatccaaaggccagataagcacgaaagttttgggaacaatatggttgataacctcgatctgtttagcaggagctcagctgagaacaagtatgataacggatgtgccaaactgtttttccacacagaatacgagaaaacgaaccccggcatgaaaccttacggttacaaagaatgtggtaaagggcttaggcggaagaagggtctaagtctgcaccagagaatcaagaatggagagaagcctttcgaatgcacggcctgcaggaaaactttttcaaaaaagtcacaccttatcgtccactggcggacgcacacaggagagaaaccattcggatgcactgagtgtgggaaggcctttagccagaagtcccaactaattattcatttgcggacacataccggggagcgaccatttgagtgccctgaatgcgggaaggcctttagagaaaaatcaactgtgatcattcactatcgcacccataccggagagaagccgtacgagtgcaatgaatgcgggaaagccttcacacaaaagagtaacctaattgtacaccagaagacccatactggcgaaaagacgtacgagtgtactaagtgcggggagtcgttcattcagaaactggacctaattatccaccactccacacacacgggtaaaaaacctcatgaatgtaatgagtgcaagaaaactttttccgacaagtctactctaattatccatcaaaggacacatacaggggaaaagccacataagtgcacagagtgcggcaagagcttcaatgagaagagcactcttatcgtccatcagaggacccataccggggagaagccttacgagtgtgacgtgtgtgggaaaacctttacacagaaaagcaatctgggagtgcaccagcggacgcatagcggggaaaaacctttcgaatgcaatgaatgcgaaaaggctttttcacagaaatcttacctgatgctgcaccagcgaggtcacaccggcgaaaaaccttatgaatgtaacgagtgcgagaaagccttcagccagaagagctatttgatcatacaccagcggactcacacagaagaaaagccctacaagtgcaatgagtgtgggaaggcctttcgcgaaaaaagtaagctgatcatccaccaacgaatacacaccggcgaaaagccatatgagtgtccagtgtgttggaaagccttttcccagaaatctcagttgatcattcaccagcgcacccacactggtgagaaaccctacgcatgcaccgaatgcggaaaagccttccgagagaagagcacttttactgttcaccagcgcacgcacaccggggagaagccctacaagtgcacagaatgtggaaaggcctttacccagaaaagtaatctcatagtgcaccagaggactcacgccggtaagaaggctcacgggaggggccacaccaggaagtcaaagttcatggcgcattag

SEQ ID NO: 211972 - DNA, 1920 bp, synthetic construct
  misc_feature 1..1920: note = Description of Artificial Sequence: Synthetic coding sequence
  source 1..1920: mol_type = other DNA
atgacccccgccagcgccagcggcgaggacagcggcagcttctacagttggcaaaaagcaaaacgcgagcaagggttagtaacgtttgaggatgtggctgtcgactttacccaggaagaatggcagtatctgaatcctccgcagcgaacactgtaccgagatgtgatgctcgaaacatactccaatctggtgttcgtcggccagcaggtcacaaagccaaaccttatcctcaagctggaggtagaagagtgtcccgcagaagggaagatcccgttctggaactttcctgaagtctgtcaggttgacgagcagatcgagagacagcatcaagatgaccaggacaagtgtctcctgatgcaggtgggcttttcagataaaaagactatcataaccaagtccgcaagggactgccatgagtttggcaatatactccatctgtcaaccaatctggtagcttcaatacaaaggcctgacaaacacgaaagcttcggcaataacatggttgacaatcttgacttgttttctcggagcagcgccgagaataaatacgataacggctgcgccaaactgttctttcacactgagtatgaaaagactaatcctgggatgaaaccttatggatataaagagtgtgggaaagggctgcgcagaaagaagggcctcagtttgcaccagcgtattaaaaatggcgaaaaaccattcgaatgtacagcatgtagaaaaactttctccaagaaatcgcatttaatagtccactggagaacacatacaggggagaagcccttcggatgtactgagtgcggtaaggcattttcacagaagtcccagctgatcatccacctgcgtacacacacaggagagaggccctttgagtgccccgagtgtggaaaagccttcagagagaaaagcaccgtcatcatccactaccgcacacacaccggggagaaaccatatgaatgcaacgagtgcggcaaggctttcactcagaaaagtaatctaatcgtccaccagaaaactcacaccggtgagaaaacatacgaatgtactaagtgcggtgagtcatttatccagaagctggacctgataatccaccactctacccataccggtaagaagcctcacgagtgcaatgaatgcaaaaaaacgtttagtgataagtctactctgattatccaccagagaacccacacgggtgagaagccccataagtgtaccgaatgcgggaaatcgttcaacgagaagagcacgctaatcgtgcaccagcgaactcataccggagaaaagccctatgagtgcgacgtctgtggtaagacctttacccagaaaagcaacttgggggtacatcagcgcacccacagcggggaaaaaccctttgagtgtaacgaatgcgagaaagcgttctcacaaaaatcttaccttatgttacaccagagggggcatacgggggagaagccatacgagtgcaacgagtgcgagaaggcctttagccagaaatcttatcttattatccaccagagaactcacaccgaggagaagccatataagtgcaatgagtgcggtaaggcctttcgcgaaaaaagcaaactgattatccaccaacggattcacactggtgagaaaccttacgagtgtccagtttgttggaaagctttctcccaaaagtcacaactgatcatccatcagcgaacccacacaggagagaaaccgtacgcttgtacagaatgtgggaaagccttccgcgaaaagtctacttttaccgtgcatcagagaacacacaccggtgaaaaaccctacaagtgtacagagtgtggcaaggcgttcacccagaagtcaaacctgattgtccatcagcggacccatgccgggaaaaaagcgcatgggcggggccacacacgcaaatctaaattcatggctcattag

SEQ ID NO: 211973 - DNA, 921 bp, synthetic construct
  misc_feature 1..921: note = Description of Artificial Sequence: Synthetic coding sequence
  source 1..921: mol_type = other DNA
atgagcagcgagaagagcggcctgcccgacagcgtgccccacaccagcccccctccgtacaacgctccccagcctcccgctgagccgccagcacctcccccccaagcagcaccctcatcccaccaccatcaccaccatcattatcaccagagcggcaccgctactttgcccagactcggggctggaggcctggcctcgtcagcagcaacagcccaacgagggccttcgtccagtgccaccctcccccggccccctcaccacgcaccacccggcccagccgccggcgccccccccccgggctgcgccaccttgccaaggatgcctcccgatccctacctgcaggaaacacggtttgaaggaccgttaccaccgccccctcctgcggcagccgcacctccacctcctgcacccgcccagacagcccaggcgcctggctttgtggtgccgactcacgcgggcactgtggggactctccctctgggtggctacgtcgcacctgggtaccccctccaattgcaaccatgcaccgcttatgtgcccgtctatcctgtaggaaccccctatgctggcggaacgcctggaggcactggcgtaacctccacactgccccctcccccgcagggtcctgggcttgcgctgctcgaaccgagaaggcccccccatgactacatgcctatcgccgtgcttaccacgatctgctgcttctggcccaccggaatcatcgctatattcaaggccgtccaagtgaggactgcgcttgccagaggcgacatggtgtccgccgagatagcgtctagggaggcaagaaatttttctttcatcagcctggcagttgggattgcagctatggttttatgtaccattctgactgtagttattattatcgcggcccagcaccacgaaaactattgggacccctag

SEQ ID NO: 211974 - DNA, 2004 bp, synthetic construct
  misc_feature 1..2004: note = Description of Artificial Sequence: Synthetic coding sequence
  source 1..2004: mol_type = other DNA
atggaggacctgagcagccccgacagcaccctgctgcagggcggccataacctacttagcagtgctagcttccaagaagccgtaacctttaaagatgtgatcgttgatttcacacaggaagagtggaagcagctggaccccggccagcgggatctgtttcgcgacgtgaccctggagaactacacccatctggtgtccatcggcctccaggtgtctaagccagacgttatttcgcagctcgaacaggggacagagccttggatcatggaaccctcgatccccgtaggaacctgcgcggattgggagacaagactggagaacagtgtctccgcaccagagccagatatttccgaggaagaacttagccccgaagtgatagttgagaagcacaagagggacgattcttggtccagtaacctccttgagtcatgggagtacgaaggatctcttgagagacagcaggccaatcaacagactctccccaaggaaattaaggtaaccgagaagacaatccccagttgggagaaagggccagtaaataatgagttcggaaagagtgttaatgtgtcttccaacttagtgactcaggaacccagccccgaggaaacctcgaccaaacgtagcatcaaacagaactccaatcccgtgaaaaaagaaaaatcctgcaaatgtaatgagtgcggtaaggccttcagctattgttcagcactgattaggcatcagaggacacacactggagagaaaccgtataaatgcaatgaatgtgaaaaggcctttagtcggagcgaaaacctgatcaatcatcagcgtatccacactggcgacaagccatacaagtgcgaccagtgtggaaagggattcattgagggtcctagcctcacccagcatcagagaattcacaccggggaaaagccttataaatgtgacgagtgcggcaaggcgttcagccaacgcactcacctggttcagcatcagcgaattcatacaggggagaagccctacacctgtaatgaatgcggaaaagcattcagtcagcggggacatttcatggaacatcaaaagatacataccggggaaaagccctttaaatgtgacgagtgcgacaagacgttcacccgtagcacccaccttacacagcatcaaaaaatccataccggagagaaaacatacaaatgtaatgaatgtggcaaggcgtttaacgggccctcaacattcatacggcaccatatgatccacactggagagaaaccctatgaatgcaacgagtgcggtaaagcattcagtcaacacagtaatctgacccagcatcaaaaaacccacactcaggagaaagcttatgaatgtaaagaatgcggtaaggccttcatacgttctagttcccttgcaaaacatgaaaggatccatacaggggagaagccttaccagtgccatgagtgcgggaaaactttctcttacgggtcctcactcatacagcatagaaaaattcacactggagagcggccctacaaatgtaacgagtgcggacgggccttcaaccagaatatccatctgacacagcataagcggatccatacgggcgcaaagccttacgaatgcgccgaatgcgggaaagcctttcgccactgcagcagtttggctcagcaccagaaaacacacactgaggagaagccctaccagtgcaataaatgcgagaagactttttcccagtcatcccacctcactcagcatcaaagaattcacaccggcgaaaagccctataaatgtaatgagtgtgataaagccttttcccggagtactcacttaacagaacaccagaatacacacacgggtgaaaagccctacaactgtaatgaatgtcggaagacattctcccagtctacctatctgatccaacatcagcggattcattccggagagaagccttttgggtgtaacgactgtggaaagtcattccgctaccgcagcgccttgaacaaacaccaacggcttcatcctggaatttag

SEQ ID NO: 211975 - DNA, 2256 bp, synthetic construct
  misc_feature 1..2256: note = Description of Artificial Sequence: Synthetic coding sequence
  source 1..2256: mol_type = other DNA
atggaggacctgagcagccccgacagcaccctgctgcagggcggccataacctcctcagtagtgccagcttccaggaagcggtaacgtttaaggacgtgatcgtagactttacccaagaagaatggaaacaacttgaccctggtcagcgggacctcttcagggacgtgactcttgagaattatacacatctagtgtctatcggccttcaagtctccaagcctgacgtgatcagccaattagaacagggcacggagccctggattatggagccaagcattcctgtcgggacctgcgcggactgggagaccagactggagaacagcgtgtctgctcccgagccagatatcagcgaggaggaactatcccctgaagtcatagtggaaaagcacaaacgggatgattcctggtctagcaatctcctcgaatcctgggaatacgaagggtccctcgagaggcagcaggcaaaccagcaaacgcttcccaaggagataaaggtgactgagaagactatcccctcgtgggaaaaggggcctgttaataatgagttcggaaagtcagtgaatgtgagttctaatcttgtcacccaggaacctagtcccgaagaaacctccacaaagcgctctataaagcagaacagcaacccggtgaaaaaagaaaaaagctgtaagtgcaacgaatgcggcaaggccttctcctactgctccgcccttatccgacatcagaggacacataccggcgaaaagccctacaagtgcaatgagtgtgaaaaggccttcagcaggagcgagaatctgattaatcatcagcgtatccatactggggataaaccctacaaatgtgatcagtgtggaaaaggcttcatcgagggcccctccctcacccagcatcagcggatccacacaggcgagaagccctataagtgcgatgaatgcggcaaagcattcagccaaagaactcacttggtgcaacaccagagaatccatactggcgaaaagccgtatacctgtaacgaatgtggtaaggctttttcccagcgaggacacttcatggagcaccaaaagattcacacaggggaaaagcctttcaagtgtgacgagtgcgacaagaccttcacgcgttctactcacttaactcagcatcaaaaaatacacacgggcgagaagacatataaatgtaacgagtgcggtaaagctttcaacgggccctctacgttcatccggcaccatatgatacacactggagaaaagccttacgagtgtaacgaatgcgggaaagcctttagtcagcattctaacttaacacaacaccagaaaacacacaccggagaaaaaccctatgattgcgcggagtgtggaaagtcgttctcctattggtcctcccttgcccaacatctcaagattcatactggcgaaaagccttataagtgcaacgaatgcggcaaagccttctcatattgttcctctttaactcagcatagacggattcatacaagagaaaaaccctttgagtgctccgagtgtggaaaggcattcagttacttgtccaatctcaatcagcatcaaaagacgcacacacaggagaaggcttacgaatgcaaagagtgcggcaaagccttcatccgttccagctctctggccaagcacgaacggatacataccggcgagaaaccataccagtgccatgagtgcggcaaaactttctcctatggcagttccctgatacagcacaggaagattcacacaggcgaacgaccctacaaatgcaatgaatgcggcagagccttcaaccaaaatattcacctaacgcaacataagcgtatccataccggagccaagccatacgagtgtgccgagtgcggcaaggcatttcgacactgttctagcctggcccaacaccagaagacacatacagaagagaagccctaccaatgcaataagtgcgaaaaaacatttagccagtccagtcacctgactcagcaccagcggatacacactggcgagaagccttacaagtgcaacgagtgtgacaaagccttcagtagaagcacccatttaacagagcatcaaaatacgcacacaggagagaaaccatacaattgcaatgagtgtcggaaaacattcagtcagtctacctacctgattcaacaccagcgcatacactccggagagaagccattcggttgcaatgactgtggcaagagtttcagataccggagcgccctcaacaagcatcagcggctccaccctgggatctag

SEQ ID NO: 211976 - DNA, 234 bp, synthetic construct
  misc_feature 1..234: note = Description of Artificial Sequence: Synthetic coding sequence
  source 1..234: mol_type = other DNA
aaggccttcagccagcggacccacctggtgcagcaccagcggatccatacaggagaaaagccttatacttgcaacgagtgtggcaaggctttttctcagagagggcattttatggaacaccagaaaattcataccggcgaaaagccattcaaatgcgatgaatgcgacaagacattcacaaggagtacacatctcacaacttctaaaaactcatactggaggaaaaacctgtag

SEQ ID NO: 211977 - DNA, 1755 bp, synthetic construct
  misc_feature 1..1755: note = Description of Artificial Sequence: Synthetic coding sequence
  source 1..1755: mol_type = other DNA
atgatggagaactacggcaacctggtgagcctggacgtgctgaacagggataaggacgaggagcccaccgtcaagcaggaaatcgaggagatcgaagaggaggtggagcctcagggagtcatcgtgactcgaattaaaagcgagattgatcaggaccccatggggcgcgaaacttttgagctggtgggccggttagataagcagagaggcattttcctctgggagatccctagagaatccctaacacaagagcagaggatgtttcgtgagaacactaacatcattcgtaagagacccaactccgaggagaagtgtcacaagtgcgaggagtgtggaaagggatttgtgaggaaggcccacttcatccagcaccagcgagtgcacacaggggagaagccctttcagtgcaatgaatgtggaaagagcttctccaggtcaagctttgtgatcgaacaccagcggattcacactggcgagcggccgtacgaatgcaactattgcgggaagacgttctctgtctcttcaactttgattcggcatcagcggatccacacaggcgagaggccctaccagtgcaatcagtgcaagcaatcatttagccagcgtagatcccttgttaagcaccaacgaatccacaccggcgaaaaacctcacaagtgctcagactgcggcaaagccttctcctggaagagccacctcattgaacaccagagaactcacactggagagaagccctaccattgcacaaagtgtaagaagtcctttagccggaacagcctactggtggaacatcagaggatccacacaggggaacgtccacacaagtgtggagagtgcgggaaggcattccgcttgtcgacctatttaatacagcatcagaaaattcatactggggaaaagcccttcctatgtattgagtgcggcaaaagttttagccggagttcctttctgatcgagcaccagcggattcataccggtgagaggccctaccagtgcaaagagtgtggtaaaagcttcagccagctttgtaacttgaccagacaccagcgtattcataccggagacaagcctcacaaatgcgaggagtgcggaaaagcattttccagatcttccggcctcatccagcatcaacgaatccacacccgagagaagacttacccctacaacgaaaccaaagaatcttttgacccgaattgttcccttgttatccagcaagaggtgtacccaaaagagaaatcatataaatgcgatgaatgcggtaagaccttctcagtaagcgcacatctcgtgcagcaccagcggatccacacaggggaaaagccctacctgtgtaccgtttgtggaaaaagtttctcccgtagttcattcctgatcgagcaccagagaatacacacaggtgaacggccctatctgtgcagacagtgtggtaaatccttcagccagttgtgcaatctgattcgacatcagggcgttcacactgggaataagccccacaagtgcgatgaatgtgggaaggcattctcaaggaattccgggctgatccagcaccagcgcatccacactggggagaagccctacaagtgtgagaagtgcgacaagagcttctcacagcaacggtctctggtcaaccatcagaagatccatgccgaggttaagacgcaggaaactcacgagtgtgatgcctgtggcgaggcgtttaattgccgaatttcacttatccagcaccagaagctgcacactgcttggatgcaatag

SEQ ID NO: 211978 - DNA, 1881 bp, synthetic construct
  misc_feature 1..1881: note = Description of Artificial Sequence: Synthetic coding sequence
  source 1..1881: mol_type = other DNA
atggccagccccagccccccccccgagagcaagggcctgctgaccttcgaggacgtcgccgtgtttttcacccaagaagaatgggactacctggaccctgctcagcgcagtttgtataaggatgttatgatggaaaactatggaaacctcgtgtcccttgacgtcttgaacagggataaggatgaagaacctacagtgaagcaagagatcgaggaaatcgaggaggaggtggaaccccagggagtgatcgtcactaggatcaaatctgaaatcgaccaggacccaatgggccgcgaaacgtttgagttagtggggcgcttagacaagcagaggggaatttttctgtgggagatccccagagagagtcttacacaggaacaaagaatgttcagggagaataccaatatcataagaaaacggccaaatagcgaggaaaagtgccacaagtgtgaggagtgcggtaagggattcgttcgcaaagcacacttcatccagcaccaacgcgtgcacaccggagaaaagccgtttcaatgtaatgagtgtgggaaatcctttagtcgctctagctttgtaatcgagcatcagcgcatacacaccggtgagcggccgtatgaatgcaactattgtggcaagacgttcagcgtgagcagtacactaatacggcatcagcggatccatacgggtgaaaggccctaccaatgtaatcagtgcaaacagtctttctctcagaggaggtctcttgtcaaacaccagagaatccacaccggcgaaaaacctcataagtgctccgattgtggtaaagcattctcatggaaaagccaccttatcgagcaccagcggacgcacaccggagaaaagccttaccactgtaccaaatgcaaaaagtccttttctcggaacagccttctcgtcgaacatcagcgcatacacaccggggagcgaccccataaatgtggagagtgcggtaaggcattccgcctgagtacatacctgatccaacatcagaaaatccacacaggggaaaagccttttttgtgtatcgagtgtggcaaaagcttcagccgctcgagttttctaatagagcaccagcgaattcataccggcgaacggccctatcagtgtaaggagtgtggcaagtcattctcgcaactgtgcaacctcacaagacatcaaaggatccacactggagacaagccccacaaatgtgaagagtgcggcaaggcatttagccgtagctccggtctgatacagcaccaacgtatccatacacgcgaaaagacttatccttacaacgaaaccaaagagtcattcgatccgaactgctcactcgttattcagcaggaggtgtaccccaaggagaagtcttacaaatgcgacgagtgtggtaagacattcagtgtttccgctcacctcgtgcagcaccagcgaatccatacaggagagaaaccctatttgtgtacagtatgtgggaagtccttttcaaggtcgtcgttcttgatagagcaccagagaatccatactggggaacgcccatacttatgtaggcaatgtggaaagtcattttctcagctgtgtaatctgattaggcaccagggggttcatacaggaaacaaaccacataaatgtgacgaatgtgggaaggctttcagtcgaaatagcgggctaatccagcatcaaagaatccacacaggcgaaaagccctataaatgtgaaaaatgcgacaagtcttttagccagcagagaagtctggtgaatcaccagaaaatacatgcagaagtgaagactcaagaaacccacgagtgcgatgcctgcggggaagcatttaactgccggatctctttaatccagcaccaaaagcttcatacagcttggatgcaatag

SEQ ID NO: 211979 - DNA, 1839 bp, synthetic construct
  misc_feature 1..1839: note = Description of Artificial Sequence: Synthetic coding sequence
  source 1..1839: mol_type = other DNA
atggccagccccagccccccccccgagagcaaggaggagtgggactacttggatccggcccagcgctctctttacaaagacgtcatgatggagaactacgggaacctggtgtcactcgacgtgctgaacagggacaaggacgaagagcctaccgttaaacaggagatcgaggaaatcgaagaggaggttgaaccgcagggagttatcgtgactcgcataaaaagcgagatcgatcaggaccctatgggtcgtgaaacattcgaactcgttgggagacttgataagcagcggggcattttcctgtgggaaattcctagagaatccctcactcaggaacaaagaatgtttagggaaaatactaatatcattcgtaaacgacccaattcagaggagaagtgtcataaatgcgaggagtgtggcaagggcttcgtgagaaaggcccatttcattcagcatcagagagtgcacacaggcgagaagccttttcagtgcaacgagtgcggcaagagcttcagcaggagctccttcgtcattgagcaccagcggatccacaccggcgagcggccgtatgagtgcaattattgcggaaaaacattttcagttagctctacgctgatccggcaccaaaggattcacacaggagagaggccctaccaatgcaatcagtgtaagcagagcttcagccagagacgttccctggtgaaacaccagcgaatccataccggggagaagcctcataagtgcagcgattgtggcaaggccttcagctggaagtcgcacttaatagaacatcagcggactcacactggcgagaagccttaccactgtaccaaatgtaagaaaagctttagcaggaattcactgcttgtggagcaccaacggatacacactggcgaaagacctcacaagtgcggggagtgcggcaaagctttcaggctgtcaacgtatctgattcagcatcagaaaatacacacaggagaaaaacccttcctatgcatcgagtgtggcaaaagcttctcccgctcctcattccttatcgagcaccaaaggatccacactggagaacggccgtatcagtgtaaagaatgcggtaaaagtttctcccagctgtgtaacctgacccgacatcagcggatccacacaggggacaaaccacacaagtgcgaagaatgcggaaaggcatttagccggagtagtggactgatacagcatcagagaatccatacaagggagaagacatatccgtacaacgagactaaagagagtttcgaccctaattgttctttggtcattcagcaggaggtgtatccgaaagagaagagctacaaatgcgacgagtgtggaaaaaccttctctgtgtcggcacatctagtgcaacatcagagaatccatacaggtgaaaagccttacctttgtacagtctgtggcaagagctttagtagatctagcttcctgatcgaacaccaacgcatccacacaggcgagcgcccttacctctgcagacagtgtggcaaatccttcagtcagctgtgcaacttgatcaggcaccagggcgtacatactggcaacaaaccacataagtgcgacgaatgcggtaaagctttctcacgaaattcaggtcttattcagcatcagcgcatccacactggcgagaagccttataagtgcgaaaagtgcgataaatcattttctcagcagcgatcactcgtgaaccaccagaaaatccatgccgaagtgaaaacccaggagactcatgaatgtgacgcctgcggtgaggctttcaactgtcggatcagtcttattcaacatcagaaactgcacactgcttggatgcaatag

SEQ ID NO: 211980 - DNA, 1377 bp, synthetic construct
  misc_feature 1..1377: note = Description of Artificial Sequence: Synthetic coding sequence
  source 1..1377: mol_type = other DNA
atggccgccatgcccctgaaggcccagtaccaggagatggtgacctttgaagatgtggctgttcacttcactaagacagaatggacaggcctgtcaccagctcagcgcgccctctacagaagcgtcatgctcgaaaattttggcaatctcaccgcattgggctaccctgtaccaaaacccgcgttaatcagccttcttgagcgtggtgacatggcgtggggccttgaggcccaagacgatcctccggccgaaagaaccaaaaacgtatgcaaggacgtggagaccaatatcgatagcgagtccacactgatacagggcatttcggaagagcgggatggcatgatgagtcatggccaattaaagtcagtgccccagcggacagactttcccgagactcggaatgtcgaaaaacaccaagacatcccgactgttaaaaacatccaaggcaaagtacccagaatcccttgtgctcgaaaacctttcatatgcgaagagtgtgggaaaagtttttcctatttctcatattatgcacggcaccagagaatccacacaggagaaaagccatttgaatgttctgaatgcggtaaagctttcaacgggaacagtagcctgattcgacatcagagaatccacactggcgagcgcccataccagtgcgaagaatgtggacgggctttcaatgataatgctaacctcattagacaccagagaatccattccggcgataggccctactactgtacagaatgcgggaattcgttcacctcatcgagcgaattcgttattcaccagaggattcacacgggcgagaaaccctatgagtgcaatgagtgtggtaaggcatttgtagggaactcccccctcctccggcatcagaagatccatactggagaaaagccttacgagtgcaatgagtgtggtaagtcatttggacggaccagccacctgtctcagcaccagcgaattcacacaggtgagaaaccttactcctgcaaggtgtgtggacaggcttttaacttccataccaaactaactagacaccaacgaatacatagcgaagagaagccatttgattgcgtggactgcggcaaagcctttagcgctcaggagcagctgaaaagacacttgagaattcacactcaggaaagctcttatgtctgtgacgagtgtgggaaggctctcacatccaagcgcaatttgcaccagcatcagaggatacatactggagagaaaccctacgagtgctctaaatacgagaaggcttttggtaccagttcccagctaggacacctcgaacacgtctacagtggcgagaaacctgtcctggacatttgtagattcgggcttccagaatttttcaccccgttctattggtag

SEQ ID NO: 211981 - DNA, 1737 bp, synthetic construct
  misc_feature 1..1737: note = Description of Artificial Sequence: Synthetic coding sequence
  source 1..1737: mol_type = other DNA
atggccgaggagagccggaagcccagcgcccccagcccccccgaccagactcctgaagaggatttggtcatcgtcaaggttgaggaggaccacggctgggatcaggaatccagtctgcacgaatcaaatccattgggacaggaggtcttcaggctgcgctttaggcagctacgatatcaggaaactttagggcccagagaagctctgattcagctgcgtgcactctgccaccagtggctgcgaccagatctcaataccaaggagcagattctggagctgcttgtattggaacaattcctgaccatcctgcctgaggagcttcaaactctggtgaaggagcaccaactggagaatggcgaggaagtggttacccttctggaagacctcgaaagacagatcgatatcctgggccggccagtcagcgctagagtgcatggccaccgtgtattatgggaggaagtcgttcactctgcttccgcacctgagccacccaatactcaattgcaaagcgaggcaactcagcataaatcaccagtgccccaggaatcccaggagagagccatgtccacttctcaatctcccactcgtagtcaaaagggctcctccggggaccaagagatgaccgcaaccttgctgaccgccggattccagactctggagaagatcgaagacatggcagtgagtttgatcagggaggagtggctacttgacccatcccagaaagatctgtgccgcgacaatagacccgagaattttcgaaatatgttctccttggggggagaaaccagatctgaaaaccgggagctggcctcgaaacaggtgatttctaccggcatccaaccacacggagagaccgctgcaaagtgcaatggcgatgtaatccggggcctagaacacgaagaggccagagacttgcttggcaggctggaacgtcagagaggaaacccaacccaggagcgcagacacaaatgtgatgagtgcggcaagagttttgctcaaagcagcgggctcgttcgtcattggaggatacacaccggggagaaaccctaccagtgcaacgtgtgtgggaaggccttctcataccgaagtgccctgttgtctcaccaggacattcacaataaggtgaagagataccattgtaaagagtgcggaaaagcatttagtcagaatacggggctgattctgcatcaaagaattcacacaggggaaaaaccctatcagtgcaaccagtgcgggaaagccttcagccagtctgcggggcttattctgcaccagcggatacactccggagagcggccctatgagtgcaacgagtgcggaaaagcctttagccacagcagtcacctgattggccaccagcgcattcatactggcgaaaagccgtatgagtgcgacgaatgtggtaaaacctttcggcgctcttcccatttaattggtcaccagagaagccataccggcgagaagccttacaaatgcaacgagtgcgggagggctttctctcagaaaagcggcctgatagaacatcagaggattcatacgggcgaaagaccttacaagtgcaaggaatgcggcaaggcttttaacgggaacactggactgatccagcatttgcgcatacatacaggagagaaaccttaccaatgcaatgaatgcggaaaggcctttatccagcgatcctccctgattcgtcatcagcgcattcatagcggcgagaaatcagaaagcatctccgtttag

SEQ ID NO: 211982 - DNA, 1737 bp, synthetic construct
  misc_feature 1..1737: note = Description of Artificial Sequence: Synthetic coding sequence
  source 1..1737: mol_type = other DNA
atggccgaggagagccggaagcccagcgcccccagcccccccgaccagactccagaggaggacctcgtcattgtgaaagtggaagaagaccacgggtgggatcaggagagctcgttacatgagtccaacccactcggtcaggaagtgttcaggctccggtttaggcaactccggtaccaggaaaccctgggacctcgcgaggccctgattcagctccgtgcactgtgccaccagtggctcaggccagatcttaacacaaaagagcagattcttgaactgttggtactcgaacagtttttgactatcctgcctgaggaattgcagacactagtaaaagagcaccaattggagaacggtgaagaggtggttaccctgctggaagacctggaacgccagattgatatcttggggaggccagtgagcgcccgggtgcacggccacagggtgttgtgggaggaggttgtgcattccgcatctgctcccgagccacctaatacacaacttcagtccgaggcaacccagcataaaagccccgtcccgcaagagtcacaggaaagggcgatgtctacatcacaaagcccaacccgaagccagaaaggatcgtcaggggaccaggaaatgactgcaactttgctaaccgcaggctttcagaccttggagaagattgaggacatggctgtcagcctcatccgggaagagtggctactggatcctagccagaaagatttgtgcagggacaacagaccagaaaatttcagaaatatgtttagcttggggggggagactaggagtgaaaaccgagaattggcttcaaaacaagtcatcagcaccggcatccagcctcatggcgaaacagccgcaaaatgtaatggggacgtgatccgtggtctggagcacgaggaagcaagggatctcctgggacgacttgagcgccaacgtggtaatccaacccaggaacggaggcacaaatgcgacgagtgtgggaaatctttcgcgcagagctcaggcctggtgcgccattggaggatccatactggggagaagccctatcagtgtaacgtgtgtggcaaggctttcagttaccgaagcgcattgctgagccatcaggatatccacaataaggtcaaacggtatcactgcaaggaatgcggaaaggcatttagtcagaatacaggtctgattctccatcagagaattcacaccggtgaaaaaccgtatcaatgtaaccagtgtggtaaggcattcagccagtcagccggtttgatcttgcatcagcggattcattcaggtgaacggccctacgaatgcaacgagtgcggaaaggccttctcccactcgtcacacttaatcggccaccagagaattcacacaggcgaaaagccatatgagtgcgacgagtgtggcaagacatttaggcggtcaagccatctgatcggtcatcagcgcagccacactggcgagaagccttacaagtgcaacgagtgcggtcgagccttttcccagaagagcggtctgatagagcaccaacgtattcatactggcgagcgcccatacaagtgcaaggaatgcgggaaggcatttaatggcaacactggcctcattcagcacctgcggatccacaccggggagaagccctatcaatgtaatgagtgcgggaaggccttcatacagaggtccagcctcatccgtcaccagagaatccacagtggtgagaagtcggagtcaataagtgtgtag

SEQ ID NO: 211983 - DNA, 477 bp, synthetic construct
  misc_feature 1..477: note = Description of Artificial Sequence: Synthetic coding sequence
  source 1..477: mol_type = other DNA
atggccgaggagagccggaagcccagcgcccccagcccccccgaccaaacacctgaggaggatctcgtcatcgtgaaagtcgaagaggaccatggctgggatcaggaaagcagcttgcacgaaagcaacccacttgggcaggaggtatttagattaaggttcagacagctgaggtaccaagagacactggggcctagagaagccctcatacaattaagggcactgtgtcatcaatggctgcggcccgacctgaacacaaaagagcaaattctggagctgctagtcttggagcagtttctaaccatcctgcccgaggaacttcagacccttgtcaaagagcatcaactggagaatggcgaggaggttgtgacactgttggaggatctagaaagacaaatcgatatcctcggccgcccagtgtccaggcgccggtctcagctcgcatacatggacattggttattcagggcgcaggtag

SEQ ID NO: 211984 - DNA, 1185 bp, synthetic construct
  misc_feature 1..1185: note = Description of Artificial Sequence: Synthetic coding sequence
  source 1..1185: mol_type = other DNA
atgaacaccaacagcaaggaggtgctgagcctgggcgtgcaggtgcctgaagcatgggaagagctactgaccatgaaggttgaggccaaaagtcacttacagtggcaggagtctaggctcaagagatcaaaccccttggctcgtgaaatttttcgtaggcattttcgacaactatgttatcaggagacaccagggccacgcgaggcactgactagattacaggaactgtgctaccagtggctcaggccacacgtgtcaaccaaggaacagatcctggacctgctggtgttagagcaattcttgtccatcctaccaaaggagctgcagggctgggtgagagaacactgtccggaaagcggcgaagaagctgttatactcctggaggatctggagcgggagttagatgaaccccagcatgagatggtcgcccacagacaccggcaagaagttctgtgtaaggagatggtgccccttgctgagcaaacccctctcacccttcagagccaaccgaaggaaccccagctgacatgcgatagcgctcaaaagtgccatagcatcggggagaccgacgaggtgacgaaaaccgaagatagggagctcgtgctgcgaaaggattgccccaagatcgtggagccccacggcaagatgttcaacgagcagacttgggaggtatctcagcaggacccttctcacggcgaagtaggagagcataaagatcgaatagaacgccaatggggcaacctcctgggcgagggccagcacaaatgcgacgagtgcggtaagtcctttacacagagctctgggcttataagacatcagaggattcataccggggagaggccctatgaatgcaacgaatgtgggaaagcattctcccgtagctcggggctttttaatcatcgcggtatacataatatccagaagcggtatcactgcaaggagtgcggtaaagtgttttcacagagtgccggcctcattcaacaccagaggatacacaagggtgaaaagccctatcagtgcagtcaatgtagtaaaagctactcccggagatccttcttgatagaacaccagagaagtcataccggcgagcggccccaccagtgtatcgaatgtggaaaaagcttcaacagacactgtaatttgatccggcaccaaaaaatacacaccgtcgcagaactcgtttag

SEQ ID NO: 211985 - DNA, 126 bp, synthetic construct
  misc_feature 1..126: note = Description of Artificial Sequence: Synthetic coding sequence
  source 1..126: mol_type = other DNA
atgaacaccaacagcaaggaggtgctgagcctgggcgtgcaggtgcctgaggcatgggaagaactcctgacaatgaaggtggaagccaaatcacacctccagtggcaggagtcaagactcaaatag

SEQ ID NO: 211986 - DNA, 1185 bp, synthetic construct
  misc_feature 1..1185: note = Description of Artificial Sequence: Synthetic coding sequence
  source 1..1185: mol_type = other DNA
atgaacaccaacagcaaggaggtgctgagcctgggcgtgcaggtgcccgaagcctgggaggagcttctgactatgaaggtggaagcaaagagccatttgcagtggcaagagtctcgtttgaagagaagcaatccactggccagagaaatattccggcgacatttccgccagctgtgttaccaggagacccctgggcccagagaggcgctcacaaggttgcaggagttatgctaccagtggctgcggccccatgtctcgacaaaggaacagattctagacttgctggtgctggaacaattcttatccatcctgcccaaagagttgcagggatgggtacgggagcattgtcccgagtccggtgaagaggccgtaatactgctcgaggatctcgaaagagaactggatgagccacagcacgagatggtggcccatcgccatcgccaggaggtgctgtgtaaggaaatggttccactcgctgaacagacgccccttaccctccagagtcagcccaaagagccacagctcacctgcgacagcgctcagaagtgtcactcgatcggggagaccgatgaagtgaccaaaacagaggatcgcgaactcgtgctgagaaaagattgcccgaagatcgtggagccccacggcaagatgtttaacgagcaaacatgggaagtaagccaacaggacccttcgcacggagaggtcggcgagcataaggaccgtatagagaggcagtggggtaacctgctcggagaggggcaacacaaatgtgatgaatgcggcaagtcctttacccagtccagcggtttgatcagacaccagcgcatccacactggcgagcgtccatacgagtgcaatgagtgtggtaaggccttctctcgctcaagcggtctgtttaaccaccgtggcatacacaacatccagaagcggtaccattgcaaagagtgtggtaaggtgttttcccagagcgccggcctcattcaacatcagaggatccataaaggggagaaaccctatcagtgttcccagtgttcgaagtcttactctcgacgtagctttctaattgagcatcagcgcagtcacacaggcgagcgtcctcaccagtgcattgaatgcggaaagagcttcaaccgacattgcaaccttatccgccaccagaagattcataccgtggcagagttggtctag

SEQ ID NO: 211987 - DNA, 1338 bp, synthetic construct
  misc_feature 1..1338: note = Description of Artificial Sequence: Synthetic coding sequence
  source 1..1338: mol_type = other DNA
atgaacaccaacagcaaggaggtgctgagcctgggcgtgcaggtgccagaggcatgggaagaactcctgacaatgaaagtggaggctaaatcccacctgcaatggcaggagtcacggcttaaacggtcaaatccgctagcaagagaaatctttaggcggcacttccgacagctgtgttaccaagagaccccaggcccccgggaggccttgacccggttgcaggagttgtgctatcagtggctgagaccacatgtaagcacaaaagagcagattttggatctcttagtcctagaacagttccttagcatactcccgaaggaattgcagggatgggtaagagagcattgccccgaaagcggggaggaggcggtaattctattagaggatctcgagagggaactggacgagcctcagcacgaaatggtcgcacataggcatagacaggaagtcctgtgcaaggaaatggtgcccctggcagagcaaaccccactgacgttgcaatctcagcctaaggaaccgcagctcacttgcgactctgctcagaaatgccacagcatcggagaaacggatctgatcagatccttgcggcggagggctgtgctcatccctctgggtgctcatctgttctccaccgacacgttcctctttagtaagcctgtggtgatcccgcagcttaagggtggcggtgagacttggcccaacaacagaggggtgctcagagacgaagtgaccaagactgaagatagggagctcgttctacgaaaagactgcccgaagattgtcgagccacacggaaaaatgtttaatgagcagacctgggaagtttcacagcaggacccttctcatggagaagtaggcgagcataaggatcgcattgaacgacagtggggtaacctgctcggggagggccagcacaaatgtgatgagtgcggcaagtcatttacacagagcagcggactgatccgccatcagcgtatccacactggtgaaagaccttacgaatgtaatgagtgtggaaaagcattctctagatcctccggcctctttaaccatagggggatccacaacattcagaagcggtaccactgtaaggaatgcgggaaggtttttagccaatccgctgggctgattcagcatcagcgcattcacaagggcgaaaagccctaccagtgctcacagtgctctaagtcttactcaagacgatccttcctgatagaacaccagcgttcccacactggggaaaggccacaccagtgcatagaatgcggaaaatctttcaaccgacactgtaatcttattagacaccaaaagatccataccgtcgcagaacttgtatag

SEQ ID NO: 211988 - DNA, 1821 bp, synthetic construct
  misc_feature 1..1821: note = Description of Artificial Sequence: Synthetic coding sequence
  source 1..1821: mol_type = other DNA
atgaccctgctgaccttccgggacgtggccatcgagttcagcctggaggagtggaagtgcctcgatctggcccaacagaacctctatcgtgatgtgatgctggagaattataggaatctttttagtgtaggcctgacagtttgcaaaccgggactgatcacatgtttggagcagcgtaaagagccatggaacgtgaagagacaagaggccgcagacggccatccagagatggggttccatcatgccactcaggcttgtctggaactgctcggttcctcagatcttcctgcatccgcaagccagagcgccggaatcactggggttaatcatcgcgcccagcctggactgaacgtgagcgtagacaaattcacagctatgtcttcccatttcacccaggacctgctgcccgagcagggaattcaggatgcgttcccaaagcggattttgaggggctacgggaattgcggattagataacctgtacctgcgaaaggactgggagtcattggatgagtgtaaactccagaaggattacaacggtctgaatcagtgttccagtactacgcactctaagattttccagtacaacaaatacgttaagattttcgataatttctctaatcttcaccgtcgtaacataagtaatacgggagaaaaaccgttcaagtgccaggaatgtgggaagtccttccagatgttgtcatttttgactgagcaccagaagatccataccggcaagaaatttcagaagtgtggagagtgcgggaagacatttatccagtgctcacactttactgagcccgagaatattgataccggggagaaaccatataaatgccaagaatgtaacaatgtcatcaagacctgctctgttcttactaagaaccggatctacgcgggtggagagcactatcgttgtgaggagtttggaaaagtttttaaccaatgcagccatctgactgaacacgagcacggtaccgaagagaagccttgtaaatacgaagaatgtagttccgtattcattagctgtagttccctcagcaaccagcaaatgatactggctggtgagaagttgagtaagtgtgagacgtggtacaaaggattcaaccatagccccaatccctctaaacaccaaaggaatgagattggtggaaagcccttcaaatgcgaagagtgtgacagtatctttaagtggttctcagatctaactaaacacaaacggattcacaccggcgagaagccatacaagtgtgacgagtgcggtaaagcttatacgcagtctagccatctctcagaacatcggagaatccacactggtgaaaagccctatcaatgcgaggagtgcggtaaggtgttcagaacctgctcttctctaagcaaccacaagcggacccattctgaggagaaaccatatacatgtgaagagtgtggaaatatttttaaacagttgagtgatttgacaaaacacaagaaaactcataccggggagaaaccgtacaaatgcgatgagtgtggaaagaattttacgcagagttcaaatctgattgtgcataagaggatccacaccggcgaaaagccttacaagtgcgaggagtgtggaagagtcttcatgtggtttagcgacatcaccaaacacaagaagactcacacaggcgagaagccctataagtgcgacgagtgcggaaagaatttcacacagagctctaacttgatagtgcacaaaagaattcacacgggcgaaaaaccctataagtgcgagaagtgtggtaaggccttcactcaattttcacacctcaccgtacacgaatctatccatacttag

SEQ ID NO: 211989 - DNA, 1686 bp, synthetic construct
  misc_feature 1..1686: note = Description of Artificial Sequence: Synthetic coding sequence
  source 1..1686: mol_type = other DNA
atggccggcgcccagaccctgctgaccttccgggacgtggccatcgaattttccctggaagagtggaaatgccttgatcttgcccaacaaaacctctatcgggatgtgatgctggagaattatcgcaatcttttttccgttgggttaacagtgtgcaaacccggcctgatcacatgcctggaacagagaaaggagccttggaatgtcaagcggcaggaggccgccgatggacatccggctatgtcaagccacttcacacaggaccttctgcccgaacagggaattcaggacgcctttcccaaacgaatattgcgagggtatgggaactgtgggttagataatctctacctgcgcaaggattgggaatcattggatgaatgcaagttgcaaaaggactataacggcctcaatcaatgctcatccacaacgcactccaagattttccagtacaacaaatatgtcaagatcttcgacaatttttcaaacctgcaccgccggaatataagcaacacgggggaaaaaccatttaaatgtcaggagtgtggtaaaagctttcagatgctctcctttctcacagaacaccagaaaatccacaccggcaagaagttccagaagtgtggggagtgtggcaagaccttcatccagtgttctcacttcaccgaacccgaaaatatagataccggcgaaaaaccatataagtgtcaggagtgtaacaacgtgattaagacatgctccgtgctaaccaaaaacagaatctatgcggggggcgagcactatcggtgtgaagagtttgggaaggtctttaaccaatgctctcatttaaccgagcacgaacacgggacagaggaaaaaccatgcaaatacgaagaatgttctagcgtgtttatcagctgttccagtctatccaatcagcagatgatcctggctggcgagaagttatcgaagtgcgagacttggtataaaggtttcaaccacagtccaaatccgtcaaaacaccagcggaacgagattggaggcaagcccttcaaatgcgaagagtgcgactcgatcttcaaatggttcagcgacctgacaaaacacaagagaattcacacgggagaaaaaccctacaagtgtgacgaatgtggcaaagcctatacacagtctagccaccttagcgagcaccggcgcatccataccggcgagaaaccttatcagtgcgaagagtgcgggaaggtctttagaacgtgttccagcctgtccaaccataaacggacacattctgaagaaaaaccgtacacctgcgaagaatgcgggaacattttcaagcagctgagtgaccttaccaaacacaagaagacccatactggggagaagccctacaagtgcgacgagtgtggaaagaatttcacacagtcaagtaacctgatagtgcacaaaagaattcacactggtgagaaaccttataagtgtgaagaatgtggccgggtcttcatgtggtttagtgacatcaccaagcacaagaagacacataccggagagaagccctataagtgcgacgagtgcggcaagaatttcacccagagttctaatttaatcgtccacaaacggattcatactggggaaaaaccctacaagtgcgaaaaatgcggcaaggccttcactcagttcagccatctcacagttcacgagtcgatccacacatag

SEQ ID NO: 211990 - DNA, 1674 bp, synthetic construct
  misc_feature 1..1674: note = Description of Artificial Sequence: Synthetic coding sequence
  source 1..1674: mol_type = other DNA
atgaccctgctgaccttccgggacgtggccatcgagttcagcctggaggaatggaagtgcctggatctggctcagcagaacttatatcgtgatgtgatgctagaaaactatcgtaaccttttcagcgtcgggctcactgtttgcaagcctggtctgattacatgtctggagcagcgaaaggaaccttggaatgtgaagcgccaggaggcagcggatggtcacccagctatgtctagtcacttcacacaggacttgctgccagagcagggcattcaggatgccttccctaagagaattctgagagggtatggcaactgcggcttggacaacctctatctacgcaaagactgggaaagcctcgacgaatgtaaattgcaaaaggattataatgggttaaaccagtgttcttctactacccactcgaaaattttccagtataacaagtacgtgaaaatcttcgacaacttcagcaatcttcatcgacgaaacatctccaacaccggagaaaagcctttcaagtgccaggagtgtggaaagtcctttcagatgctgagctttctgacggaacatcagaagattcacacaggaaaaaagttccagaagtgtggtgaatgcgggaagacctttatccagtgctcgcattttacagagccagagaacatcgataccggggaaaaaccctataaatgtcaggagtgtaacaacgtgatcaagacctgttctgtgctgacaaagaaccgtatatatgccggtggtgagcactacaggtgcgaagagttcggcaaagtttttaaccagtgtagccatctgacagaacacgaacacggtacggaagagaagccttgtaaatacgaggagtgtagctccgtgtttatcagctgctcttctctctccaaccagcagatgatactggctggggaaaagcttagcaaatgtgaaacctggtacaaagggttcaatcactccccaaatccatctaagcaccagcgaaacgagattggcgggaagccctttaagtgtgaagagtgtgactcaatcttcaaatggttttccgatctgaccaagcacaaaagaatccacacaggcgagaagccctataagtgtgatgagtgcggcaaagcctacactcagtctagccacctgtcagagcaccgccgcatacatacaggcgaaaagccttaccaatgcgaggagtgcggcaaagtctttaggacctgctcctcactgagcaatcataaaaggactcactccgaggagaagccgtacacctgcgaagaatgtggcaacatcttcaaacagcttagcgatctcactaagcataaaaaaacccatactggtgaaaaaccatataaatgtgacgaatgtgggaagaattttacccaatcaagcaatttgattgtgcacaagagaatccatacgggtgaaaaaccatataaatgtgaggagtgcggtcgggtgtttatgtggttttccgacattacaaagcataagaagacccatactggcgagaagccatataagtgtgacgaatgcggcaagaacttcactcagagcagcaatctgattgtgcacaaaaggatccataccggagagaaaccttacaagtgtgagaagtgcgggaaggcctttacccagtttagccatctgaccgttcacgagtcaatacatacatag

SEQ ID NO: 211991 - DNA, 1890 bp, synthetic construct
  misc_feature 1..1890: note = Description of Artificial Sequence: Synthetic coding sequence
  source 1..1890: mol_type = other DNA
atgaccctgctgaccttccgggacgtggccatcgagttcagcctggaggaatggaaatgtttggatctcgcccagcagaatttgtatcgagacgtgatgctggagaactatcgcaacctgttttcagtcggcctgacagtctgcaaacccggcctgataacatgcctggaacaacggaaagagccatggaacgttaaaagacaggaggcagccgacgggcatccagagatgggtttccatcatgccactcaagcgtgcctggagctactgggctctagtgatcttccggcaagcgcgagccagtccgcaggcatcacaggcgtcaaccatcgcgctcaaccagggctaaacgtctccgttgataagttcaccgcactctgctctcccggggtcctacaaactgtgaagtggttcctagagtttagatgcatctttagcctggccatgagcagtcactttactcaggacctcctaccggaacagggcattcaggatgccttcccaaagcggatcctgcgcgggtacggaaattgtgggctggacaacctgtaccttagaaaagattgggaatcactggacgaatgcaagctgcagaaagactataacgggttgaatcagtgctcctccacaactcactccaaaatctttcagtacaacaagtatgtgaaaatctttgacaacttcagcaatctccacaggcggaacatttccaatactggcgagaaaccattcaaatgccaggaatgtggaaagtctttccaaatgttgtcctttctaacagagcaccaaaagattcacacaggaaaaaagtttcagaagtgtggcgagtgtgggaagactttcatccagtgctctcactttacagagcccgaaaatattgatacgggcgagaagccctataagtgtcaagagtgtaacaacgttattaaaacttgtagcgtgctgaccaagaacagaatctacgccggcggtgagcattaccgctgcgaggaatttggcaaagtgtttaatcaatgtagccacctcaccgaacatgagcacggcaccgaggagaaaccttgcaagtacgaagaatgctcctcagtttttatttcctgttcatctctatcaaaccaacagatgatcttggccggagagaagctgtccaagtgcgaaacttggtacaaaggctttaaccattctcctaacccttcaaagcaccagcgaaatgagatcggaggaaaacccttcaagtgtgaagagtgtgatagcatcttcaagtggttttcggacctgactaagcacaagcggatccacactggggaaaagccctacaagtgcgatgaatgcggtaaggcctatacacagtcttcccatctgtctgagcataggcggatccacacaggtgagaaaccataccagtgcgaggagtgcggtaaagtttttcgcacatgtagttcactgtctaaccataaacggacccactctgaggaaaaaccgtatacatgcgaggagtgcggaaatatcttcaaacaactttcagatttgacgaagcacaagaagacacacactggcgagaagccttataagtgcgatgaatgtggcaaaaattttacccaatctagcaatctgatcgtgcataaaaggattcataccggggaaaagccatacaagtgcgaggaatgtggacgcgtcttcatgtggtttagcgatatcaccaagcataagaaaactcacactggtgaaaagccctacaaatgcgacgaatgcggaaaaaacttcactcagagctctaacctgattgtccataaacgcatccacacaggcgaaaaaccttataaatgcgagaagtgtggaaaagcattcactcagttcagtcacctcacagtccacgagagtattcatacttag

SEQ ID NO: 211992 - DNA, 1686 bp, synthetic construct
  misc_feature 1..1686: note = Description of Artificial Sequence: Synthetic coding sequence
  source 1..1686: mol_type = other DNA
atggccggcgcccagaccctgctgaccttccgggacgtggccatcgaattttcccttgaagaatggaagtgtctggacttggctcagcaaaacctgtaccgagacgtcatgctggaaaactatcggaacctcttcagcgtgggattgaccgtgtgtaagcccgggctgatcacttgcctcgagcagcggaaagaaccctggaacgtgaaacgccaggaggctgctgatgggcatcccgctatgtcaagccacttcactcaggacctgctgcctgaacagggaatccaggatgccttccccaagcggatacttagggggtatggcaactgtggcttggacaatttatatctgcgcaaggattgggaaagcctggacgaatgcaaactgcagaaggactacaatggactaaatcagtgttcctcaacgacacactcaaagatctttcaatataataagtacgtgaagatttttgacaatttcagtaacctccacagaaggaacatttccaatactggcgaaaaaccgtttaaatgccaggagtgtggaaaaagcttccagatgttgtctttcttaaccgaacaccaaaaaatacatacaggaaagaaattccagaaatgtggggagtgtggaaaaacctttatacagtgctcccatttcaccgagcctgaaaacatcgatactggagaaaagccctacaagtgtcaggagtgcaacaacgtaatcaaaacctgctcagtcttgaccaagaacaggatttatgcagggggggaacattaccgctgcgaagagtttggaaaagtattcaaccagtgttcacatttgacagagcacgagcacggcaccgaggagaagccgtgtaagtatgaggaatgttccagcgtcttcattagttgcagctctctgtccaatcaacagatgatactggcaggagagaaattgtctaaatgtgagacatggtataagggattcaaccatagccctaatccctccaagcaccaacgcaatgagattggaggtaagccgtttaaatgcgaggaatgcgactccatcttcaaatggttctctgacttaactaaacataagagaattcataccggggagaaaccgtacaagtgcgacgagtgcggaaaagcgtacacgcagtcatctcatctgtcagaacaccgccgaatccacacgggggagaagccataccagtgcgaagaatgcgggaaagtttttagaacttgctcgtcactgagcaatcacaagcggacccactccgaggaaaaaccctatacctgcgaggagtgtggtaatatcttcaaacagttgagcgatctgacaaagcacaagaagacgcatactggtgagaaaccctataagtgtgatgaatgtggcaagaattttacccagagtagcaacctaattgtccacaagcggattcacaccggagaaaagccatataagtgtgaagagtgtgggagagtgtttatgtggttttccgacatcaccaaacacaagaagacccacaccggggaaaagccttataagtgcgacgaatgcggaaagaacttcacacagtcttctaatcttatcgtccataaacggatacatactggtgagaaaccatataaatgtgaaaagtgcgggaaagcttttacccagttttcacacctgaccgtgcatgagtcaattcatacctag

SEQ ID NO: 211993 - DNA, 1833 bp, synthetic construct
  misc_feature 1..1833: note = Description of Artificial Sequence: Synthetic coding sequence
  source 1..1833: mol_type = other DNA
atggccggcgcccagaccctgctgaccttccgggacgtggccatcgagttctccctggaagagtggaaatgcttagacctggcccagcagaacttgtatagagacgtgatgttagaaaattataggaacctgttttctgtcggcctgactgtctgcaagccaggtctgataacctgcttagagcaacggaaggaaccctggaacgtaaaaagacaagaagccgccgatggccacccagagatgggcttccaccacgccacccaggcatgtctcgaactcttggggtcatccgatctgccggcttcagctagtcagtccgccggtattaccggtgtcaatcaccgtgcccaacctgggttgaatgtgtccgtggataaattcaccgcaatgtcatcacatttcacccaggaccttctcccagagcaaggaatacaggatgcgttcccgaagagaattctgagagggtacggtaattgcggactggacaacctttaccttaggaaggactgggaatctctcgacgaatgcaaactgcagaaagactacaacggccttaaccagtgctcctcaacaacgcactcaaagatcttccaatacaacaagtacgtcaagatatttgataatttttcaaatctgcaccgacgcaacatctctaatacgggcgaaaagccatttaaatgccaagaatgcggaaaatctttccaaatgctgtccttcctcacagaacatcaaaaaatacataccggcaagaaattccagaaatgtggcgaatgtgggaaaacatttattcagtgctctcattttaccgaaccggagaatatcgatactggcgaaaagccctacaaatgtcaggagtgtaataacgtgattaaaacttgctccgtattaacaaaaaatcggatctatgccggtggtgaacactacagatgtgaggaattcggaaaggtgtttaaccaatgtagccatctcacagagcacgagcatggaaccgaagagaagccctgtaagtatgaggagtgctcctctgttttcatcagttgttcaagcctatctaaccaacagatgatcctcgctggcgaaaagctgagcaagtgtgaaacatggtataagggttttaaccacagcccaaacccctctaaacaccaacggaacgaaatcggcggcaaaccatttaaatgcgaggagtgcgactctatcttcaagtggttttcggacttgacaaaacataagcggattcacaccggcgaaaagccttacaagtgcgatgagtgtggtaaagcttacactcaatccagtcacctgtctgagcacaggaggatccataccggtgagaagccttatcagtgcgaggagtgcggcaaggttttccggacctgttcatcactctctaatcacaaacggacgcactctgaagaaaaaccctatacctgcgaagaatgcggaaacatcttcaaacagttgagcgacctcacaaagcataaaaagactcataccggggagaagccctacaaatgtgatgagtgtggcaagaatttcacacagtcatccaacctgatcgtgcacaagaggatccatacgggagaaaaaccctataaatgcgaggaatgcggacgcgtcttcatgtggttcagcgatattactaagcacaagaagactcataccggggagaagccgtacaaatgcgacgagtgcggcaagaacttcacgcagtcatccaacctcatagttcataagagaatacatacaggggaaaagccttataaatgcgagaagtgcggcaaagcctttacacagttctcacacctaactgttcacgagagcatacacacatag

SEQ ID NO: 211994 - DNA, 396 bp, synthetic construct
  misc_feature 1..396: note = Description of Artificial Sequence: Synthetic coding sequence
  source 1..396: mol_type = other DNA
atggccggcgcccagaccctgctgaccttccgggacgtggccatcgagttctccttagaagaatggaagtgcctcgacctcgcccagcagaatttgtaccgcgacgtgatgctggaaaattaccgcaatctgttttccgtggggctgaccgtgtgtaaaccgggactgatcacctgtctggagcagcggaaggagccttggaacgtgaaacgccaggaagccgcagatgggcacccggccatgtcatcacactttacacaggaccttttgcccgaacagggcatccaggacgctttcccaaagcggattctgcgcgggtacgggaactgtggcctggacaatttgtacctgcggaaggattgggagagcttagatgaatgcaagctgcagaagtag

SEQ ID NO: 211995 - DNA, 348 bp, synthetic construct
  misc_feature 1..348: note = Description of Artificial Sequence: Synthetic coding sequence
  source 1..348: mol_type = other DNA
atggccggcgcccagaccctgctgaccttccgggacgtggccatcgaattctcgcttgaggaatggaaatgcctggatctggcacaacagaacctgtatagggacgttatgctggagaactaccgaaacttgttctccgtcggcttaaccgtctgtaaaccagggctgatcacttgtcttgaacaacggaaggagccatggaatgtcaagagacaggaagctgctgacggccatcctgagatgggattccaccacgcgacccaggcttgtctggaactgctcggatcttcagatctaccagcctctgcatcgcaaagcgccggtattactggcgtgaaccaccgttag

SEQ ID NO: 211996 - DNA, 1281 bp, synthetic construct
  misc_feature 1..1281: note = Description of Artificial Sequence: Synthetic coding sequence
  source 1..1281: mol_type = other DNA
atggccgccgtgagccccaccacccggtgccaggagagcgtgacctttgaggacgtggccgttgtgttcactgacgaggagtggagcagactagttccaattcaaagagacctgtacaaagaagtcatgctggaaaactacaactctatagtgtcattgggcctgccagtgcctcagcccgacgtgatattccagctcaaacggggtgataaaccatggatggtagacctccacggcagcgaggagcgtgagtggcccgagagtgtctcactcgactgggaaacaaagcccgagatacacgatgcctcggacaaaaagagtgagggcagtctgagggaatgtctcggtcgtcagtcccccctgtgcccaaagtttgaagtgcacacccccaacggccggatggggactgaaaaacagtcaccaagtggcgagacgcgtaaaaagtctctcagcagggataaagggttacggagaagaagaagcgccctgagccgcgagatcctgaccaaggaacggcatcaggaatgctccgattgtggtaagacttttttcgatcacagctctctgaccaggcaccaacgcacacatacaggagaaaagccatatgattgtagagagtgcggtaaggcattttcccataggagttccctgtcacgacatcttatgtcacacaccggtgaatctccctatgagtgctccgtctgctccaaggccttcttcgatcgaagtagtctgacggttcatcagcggatccatactggggaaaaacccttccagtgtaatgagtgtggtaaggctttcttcgaccgcagcagtctgacaagacatcagcgcattcatactggggaaagtccatacgaatgtcaccagtgtggcaaagccttctcacagaagagtattctcactcggcatcagcttatccatacgggcaggaagccctatgaatgtaatgagtgtggcaaggccttctatggcgtcagcagcttaaaccgccaccagaaggcccatgcaggcgatccccggtatcagtgcaacgaatgtggaaaagcattcttcgacagaagcagcctgacacagcatcaaaaaatccacacaggagacaagccatatgagtgctctgaatgcggaaaggcgtttagccagcgctgccgactgactcgacatcagagggtgcacactggtgagaaaccattcgaatgtactgtgtgtggtaaggtgttttcctctaagagctccgtcattcagcatcagcgccgctacgctaaacaagggattgactag

SEQ ID NO: 211997 - DNA, 1155 bp, synthetic construct
  misc_feature 1..1155: note = Description of Artificial Sequence: Synthetic coding sequence
  source 1..1155: mol_type = other DNA
atgctggagaactacaacagcatcgtgagcctgggcctgcccgtgccccagcccgacgtcattttccaactgaaacggggggataagccatggatggtggacctgcacggaagtgaggaaagggagtggcctgagtctgtgtctctcgactgggaaaccaaacccgagatccatgatgcttctgacaaaaagtcagaaggcagcctaagagagtgtctgggcagacagagcccactgtgcccaaagttcgaggttcatacccctaacggtcgtatggggaccgaaaaacagagtcctagtggagaaacacgaaagaaaagcctgtctagggataaaggcttgcgtagaagacgttctgcactcagcagagagattcttactaaagaaagacaccaagagtgttccgattgtggaaagaccttcttcgaccattcctcacttacccggcaccagcggacacacacaggagaaaagccttacgactgcagagagtgcggtaaagcgttctctcaccggtcttccttgtcacgtcacctgatgtctcacaccggcgaatctccatatgagtgttccgtttgctcgaaggcgtttttcgaccggtcttccctgactgtacaccagcgcatccatactggcgaaaagccctttcagtgtaacgaatgtggtaaggctttttttgatcgatcttcactgacaagacatcagaggattcatactggagagtccccctatgagtgtcatcaatgcggcaaagccttcagtcagaaatctattctgacacgccaccagctcattcacacagggcgcaagccttacgagtgcaatgagtgtggaaaagctttttacggcgtctctagtctgaaccgccaccagaaagcccatgccggagacccacgctatcagtgcaacgaatgtggcaaggcattctttgacagaagttccctaactcagcaccagaagatccataccggcgacaagccctacgaatgctccgagtgtggaaaggccttctcccaacggtgtagattgacacgccatcagagggtgcacactggagagaaaccatttgagtgtaccgtttgcggtaaggtgttcagctccaagtctagcgtaatccagcaccagagacgttatgctaagcagggtatcgactag

SEQ ID NO: 211998 - DNA, 1041 bp, synthetic construct
  misc_feature 1..1041: note = Description of Artificial Sequence: Synthetic coding sequence
  source 1..1041: mol_type = other DNA
atgctggagaactacaacagcatcgtgagcctggactgggagaccaagcccgagattcacgatgcatcagacaaaaaaagtgaggggagtctgagagagtgtctgggccgtcaatcaccactgtgtcctaagtttgaggtgcacactccaaatgggagaatgggaacggaaaaacagtcgccttcgggcgagacgcgtaaaaagagcctatccagagataaaggactgcggagaagacgaagcgccctctccagggaaatcctgactaaggaaaggcaccaggaatgtagcgactgtgggaagaccttttttgatcatagttcactgactcggcaccagcgaactcatacaggtgagaagccatatgactgtagggagtgcggcaaggccttctctcacagatcatcactgtcaagacatctcatgagtcatacaggtgaaagcccatacgagtgctcagtctgctcgaaagctttcttcgatcggagctccctgactgtgcatcagagaattcacacaggcgaaaagccctttcaatgtaacgaatgcggtaaagcctttttcgatcggagttccctgacaaggcaccaacgcatccacacgggcgagtccccttacgagtgccaccagtgtggcaaagctttcagccagaagtccattttgacccgccatcaattaatacacacaggacgcaagccttacgagtgtaatgaatgtggtaaggccttttacggggtcagctcgcttaataggcaccagaaagcacatgcaggcgacccacgataccagtgcaacgagtgtggaaaagcattctttgatcgctctagcttaactcaacatcagaagatacatacaggcgacaaaccctatgaatgtagcgagtgcgggaaggccttcagtcaacggtgtagactgacccgtcatcaacgcgttcacacgggcgagaagcccttcgagtgtacagtctgcggaaaggtgtttagctcaaaatcaagtgtaatccagcatcagagaaggtacgctaagcagggtattgactag

SEQ ID NO: 211999 - DNA, 1320 bp, synthetic construct
  misc_feature 1..1320: note = Description of Artificial Sequence: Synthetic coding sequence
  source 1..1320: mol_type = other DNA
atggccgccgtgagccccaccacccggtgccaggagagcgtgacctttgaggacgtggccgttgttttcacggatgaagaatggagccgtctggtcccgatccagagagacctgtacaaggaggtcatgctagaaaattacaattccatcgtttccctgggcttgccggtgcctcagcccgatgtcatctttcagctaaagcggggcgacaagccttggatggtggacctacacggaagcgaagaacgagaatggccagagagtgtgtccttagctcaggaaaagaattgtatttgtttcttattcgtacctgattgggagacaaaaccagaaatccatgatgcctcagacaagaaaagtgagggcagtctgagagaatgcctcgggcgacaatctcctttgtgtcctaaatttgaagtgcacacacctaatggtcgcatgggcacagaaaagcagtccccttcaggtgagacacggaagaagtccttgagtcgggataaaggactgcgaaggcgtcgtagcgcactcagcagagaaatactgactaaagaaaggcaccaggagtgttcagactgcggaaagactttcttcgaccactcctccctcacgcgtcatcagaggacccataccggggagaaaccctatgactgccgagaatgcggcaaggctttcagccaccgttcctctctctcgagacacctgatgagccatacaggagagtccccttacgagtgttccgtgtgttcaaaggcatttttcgataggtctagcttgacagtacatcaaagaatccacacaggagagaagcctttccagtgtaatgaatgcggcaaggcatttttcgatcgctcctctttaacacgacatcagcgcatccacaccggggagagtccttatgagtgtcaccaatgtggtaaggctttctcccagaagtctattctgacacggcatcaactaatccataccgggcgtaagccttacgaatgcaacgaatgcggaaaagccttctacggggtaagtagcttgaaccgtcaccagaaagctcacgctggggacccacgatatcagtgcaatgaatgtggaaaggcttttttcgataggtcttctctgacgcagcatcagaagatacatactggcgacaagccttacgagtgttccgagtgtgggaaggccttctcccagagatgtcgtctcacccgccaccagagggtccataccggcgagaagccatttgagtgcacagtgtgtggcaaggtgtttagttccaagtcctcagtcattcagcatcaacggagatacgccaagcagggaattgactag

SEQ ID NO: 212000 - DNA, 1611 bp, synthetic construct
  misc_feature 1..1611: note = Description of Artificial Sequence: Synthetic coding sequence
  source 1..1611: mol_type = other DNA
atgatgttccaggacagcgtggccttcgaggacgtggccgtgagctttacacaggaggagtgggcattgctggacccgtcccagaagaacttgtatcgcgatgtcatgcaggaaacctttaaaaaccttacctctgtcggcaagacatggaaggttcagaatatcgaggacgagtataagaaccccaggaggaacctgtccctgatgcgagagaagttgtgtgaatcaaaggagagtcatcactgcggcgagtcctttaaccagattgcagacgacatgctaaaccgcaagacactcccagggataaccccctgtgagtctagcgtgtgcggggaagtgggtacggggcattctagccttaatacacacatcagagccgataccgggcataagtcttcagaataccaagagtatggggagaatccctaccgcaataaggagtgcaagaaagctttttcctacctcgacagctttcagtcacacgacaaagcttgtactaaggaaaagccttacgatgggaaagaatgcacagaaacctttatatcccactcgtgcatccagcgacaccgggtcatgcattctggtgacggaccctataaatgcaagttctgcggcaaggccttttacttccttaatctgtgtttaatccatgagagaatacacaccggcgtgaaaccatacaaatgtaagcagtgcggtaaagccttcacccgatctacaactctccccgtgcacgaaaggactcacacaggcgtaaatgccgatgagtgtaaggagtgcggtaatgcattcagtttcccctccgagatccggcggcacaagagaagccacacaggcgagaaaccgtacgaatgtaagcagtgtggcaaagtttttatctctttctcatcaattcagtaccataaaatgacacacaccggcgaaaaaccctatgagtgcaaacagtgcggcaaagcctttcgttgtggatcccatctccagaagcatgggagaacccacactggagagaagccgtacgagtgccggcagtgtggtaaggcctttcgatgtacctctgaccttcagagacatgagaaaacacatacagaagataaaccctacggctgtaaacagtgcggaaaaggctttcgatgcgcgtcacagctccaaatccacgagcggactcactctggagagaagccacatgagtgcaaagaatgcggtaaagtgtttaaatattttagcagccttaggattcatgagcgtacccacacaggggaaaagccccatgagtgtaagcagtgtgggaaggccttcagatacttctcatcattacacattcatgagcgcacacataccggggataaaccttacgagtgcaaagtgtgtgggaaagcttttacttgcagttcctccatccggtaccacgaaagaacacataccggggagaaaccctatgaatgcaaacactgcggaaaggcattcattagcaattatatccgctaccatgagaggacgcatacgggagagaagccgtatcagtgcaaacagtgtggcaaggcttttatcgtgcccgtgcacgtggaaaacatgaaggagcttattcccctcattgacgagaagtcattctag

SEQ ID NO: 212001 - DNA, 1599 bp, synthetic construct
  misc_feature 1..1599: note = Description of Artificial Sequence: Synthetic coding sequence
  source 1..1599: mol_type = other DNA
atgatgttccaggacagcgtggccttcgaggacgtggccgtgagcttcacacaagaagagtgggcattgttggatccaagccaaaagaacctgtaccgggatgtcatgcaagagacatttaaaaacttaacctcagtcggcaagacgtggaaagtccagaacattgaggatgaatacaaaaacccccgcagaaacctgagtttaatgagggagaagttatgtgaatctaaggagagccaccattgtggcgagagcttcaatcagatcgccgacgacatgctcaatcgcaagaccctgcctggcataactccctgcgaatctagtgtatgcggcgaggtgggaacgggccattcaagtcttaacacacatattcgggccgacaccgggcataaatccagtgagtatcaagagtacggtgaaaacccatatcgcaacaaggaatgcaaaaaggccttcagctatctggacagctttcagtcccatgacaaggcctgcaccaaggagaaaccatacgatggcaaggaatgtaccgagacttttatatctcactcttgcatacagcgtcatcgtgtcatgcactccggggacggcccgtataagtgtaagttttgtggtaaggctttctattttctcaatctgtgcctaatccacgagcgcatccacaccggagtgaaaccgtataaatgcaaacagtgtggcaaagctttcactaggtccacaactcttcctgttcatgagcggacgcatactggcgttaatgcagacgaatgtaaggagtgtggaaatgccttttcatttccctctgaaataagacgacacaagcgttcacataccggagagaaaccttacgagtgcaagcagtgtggtaaagtatttatcagcttctcctcaatccagtatcataagatgactcacacgggggagaaaccatacgagtgcaagcagtgtggcaaggcctttagatgtggcagccacctgcaaaagcatgggagaacccatactggagaaaaaccctacgaatgtagacagtgtggcaaagcatttaggtgcacaagcgatttgcagcgacacgagaagacgcatactgaagacaagccctacgggtgtaagcaatgcggtaagggatttcgttgcgccagccagttacagatccacgagcgcacgcactccggcgagaagccacacgagtgcaaagagtgcggcaaagtgttcaagtacttctcttccctgcgcatccacgagagaactcacacaggggaaaaaccccacgagtgtaaacagtgcggaaaagctttccgatactttagcagcctgcatatccatgaacggacacacacaggagataaaccctacgagtgtaaagtgtgcggaaaagccttcacttgcagctcttcaatcaggtaccatgaacgcacacataccggtgagaagccctacgaatgtaagcattgcggaaaggcatttataagcaactacatccgataccatgaaaggactcataccggcgagaaaccctaccagtgtaagcagtgtgggaaagcctttatcagagcctcatcctgccgcgagcatgaaaggacccatacgatcaataggtag

SEQ ID NO: 212002 - DNA, 1185 bp, synthetic construct
  misc_feature 1..1185: note = Description of Artificial Sequence: Synthetic coding sequence
  source 1..1185: mol_type = other DNA
atgatggccgccaaggtggtgcccatgccccccaagcccaagcagtcattcatcctgcgtgtgccaccagactccaagttgggccaggacctcctgagggacgccaccaatggtccaaagacgatacaccagctcgttctcgagcatttcctgacatttctacccaagccttccctggtgcagccatctcagaaggttaaagagactctcgtgatcatgaaggacgtgtcgagctctctgcaaaaccgtgtgcatccccggcccctcgtgaagcttctgcccaaaggtgtgcagaaggagcaggaaaccgtcagcctgtatctgaaggctaatccagagctggtggtgtttgaggatctgaatgtgtttcactgccaggaggagtgcgtgtctttggatccaacgcagcagcttacatctgaaaaggaagacgactcatctgtcggagaaatgatgctgctggccgtaaatgggtctaatcctgaaggagaggatccagagcgggagccagtcgagaatgaagactacagagaaaagagttcagacgatgacgagatggacagctccttggtgtcacagcaaccacccgacaaccaggaaaaagagcgcctgaacaccagcattccccagaaaaggaagatgagaaatttgctggtgacgattgaaaacgacacccccctggaagagctgtcgaagtatgtcgatatctcaattatcgcccttacacgcaatcggcgtactaggcgctggtacacttgcccgctctgcgggaagcagtttaacgagtctagttacttaatttctcatcaacgtacccacaccggggaaaagccctacgactgcaatcactgtgggaagtcgttcaaccataagacaaacctcaataagcacgaacgaattcataccggcgaaaagccatactcgtgctcacagtgcgggaagaacttccggcaaaactcccataggtcacggcacgaaggcattcacattagggaaaaaatatttaaatgcccagaatgcgggaaaaccttccccaaaaacgaggagttcgtcctccacttgcagtctcatgaggctgagagaccttatggctgcaaaaaatgtggccggcgattcggcaggctttccaattgcactcggcacgagaaaactcacagcgcctgcaagaccaggaaacagaaatag

SEQ ID NO: 212003 - DNA, 1188 bp, synthetic construct
  misc_feature 1..1188: note = Description of Artificial Sequence: Synthetic coding sequence
  source 1..1188: mol_type = other DNA
atgatggccgccaaggtggtgcccatgccccccaagcccaagcagtcatttatcctccgggtgccaccggacagcaaactgggccaggatctactcagggacgccactaacggaccaaaaactatacatcagctcgtgctggagcattttttaacctttctccccaaaccctctctcgtccagccttcccagaaggtaaaggagacactggttatcatgaaggacgtgagcagcagcttacagaaccgagtgcaccctcgccctcttgtgaaacttctgccaaaaggtgttcagaaagaacaagaaacggttagcctgtacttgaaggccaacccagaagagctagtcgtttttgaggacctgaacgtctttcactgtcaggaagaatgtgtgtcattggaccccacacaacagttgactagcgagaaggaagacgattcttctgttggcgaaatgatgctgctcgcggtaaacggatcgaatccagaaggggaagatcctgaacgggagccggtggagaacgaagactaccgcgaaaaaagcagtgatgatgacgaaatggatagctcgttagtctcccagcagcccccagataatcaggagaaggaacgcctgaataccagtatcccccaaaaacgtaagatgcggaatctgttggtcactattgaaaacgacactcccctcgaagagttatcaaaatatgtggatatcagtatcattgctctgactaggaatcggcgcacacgccgctggtatacttgtcctctctgtggtaagcagttcaacgaatcttcctacctgatatctcaccagcgcacacacactggcgagaagccttatgactgtaatcactgcggcaagtctttcaatcacaagaccaatctgaacaagcacgagcgaatccacactggggagaaaccatattcttgtagtcaatgcgggaagaatttcaggcagaattcccatagatctcggcacgaaggtatacatattagggagaagattttcaaatgccctgaatgcggtaaaaccttccctaaaaatgaggagttcgtcctccatctgcagagtcatgaagcggaaaggccctacggatgtaagaaatgcgggaggcgcttcggcaggctgagtaattgcaccagacatgaaaagacgcacagcgcttgcaaaacacgaaaacagaaatag

SEQ ID NO: 212004 - DNA, 1185 bp, synthetic construct
  misc_feature 1..1185: note = Description of Artificial Sequence: Synthetic coding sequence
  source 1..1185: mol_type = other DNA
atgatggccgccaaggtggtgcccatgccccccaagcccaagcagagctttatcctgagggtgccccccgactctaaactgggccaggacctgctgcgggatgccacgaacggaccaaaaacgatacatcagctcgtgctcgagcacttcttgacattcctgcctaaacctagtctcgtgcaaccatctcagaaggtaaaggaaaccctggttataatgaaggatgtgtccagctctcttcaaaacagggtgcacccacggccgctcgttaaactcctgccgaagggggtccagaaggagcaggaaactgtgagcctgtacctgaaggccaaccctgaggagctggtggtgttcgaggaccttaatgtgttccattgccaggaggagtgtgtgagtttagacccaacacagcagctgactagcgagaaagaggatgactcctctgtcggtgagatgatgctcctggttaatggctctaatccagagggtgaggacccagaacgcgaaccagtcgagaacgaagactaccgcgagaaatcaagcgacgacgatgaaatggactctagtctcgtctcccagcagcctcccgacaatcaggagaaggagcggctgaacacatcaatcccccagaaacgaaagatgcggaacctactagtgactatcgagaatgacacccctctggaggaactgtcaaagtatgtagatattagcattatcgctctcaccaggaatcgcagaacaaggcgatggtacacttgcccattatgtggcaaacagttcaacgagagttcctacttgatcagccatcagcgtacccatactggagaaaagccctacgactgcaatcactgcggaaaatctttcaaccataaaactaatcttaataagcatgagcggattcatacaggggaaaagccctactcgtgctctcaatgcggcaaaaacttcagacagaactctcatagatccaggcacgaagggatccacattagagagaagatcttcaaatgccctgaatgcgggaaaacattccccaagaatgaagaatttgtgctccaccttcaaagccatgaagcggagagaccctacggctgcaagaagtgcggtcggagattcggcaggctgtctaactgcaccaggcatgaaaaaactcacagcgcctgcaagactaggaagcagaaatag

SEQ ID NO: 212005 - DNA, 1185 bp, synthetic construct
  misc_feature 1..1185: note = Description of Artificial Sequence: Synthetic coding sequence
  source 1..1185: mol_type = other DNA
atgatggccgccaaggtggtgcccatgccccccaagcccaagcagtcctttattcttcgcgtgcctcccgatagcaagctggggcaggatttacttagggatgctacaaacggacccaaaacaattcaccagctcgtgctggaacatttcctcacctttctgcccaaaccttccctggtgcagccctcacaaaaggtcaaagaaactctggtaataatgaaggacgtgtctagcagcttacagaatcgggtgcatcctcggcccctggtcaagctgctgcccaaaggcgtgcagaaggagcaggaaaccgtaagtctgtatctgaaggcaaatcccgaagaactagtggtattcgaggacctgaacgtctttcactgccaggaggagtgcgtatccctcgatcctacacagcagcttacgtccgaaaaggaagatgattccagtgtcggggaaatgatgctgctggtgaatggttctaatccagaaggtgaagatcccgagagggaacctgtcgaaaacgaggactacagagagaagtctagtgatgacgacgaaatggactcaagtctggtgagccaacaacctccagacaaccaggaaaaggaacgactcaacacctctatccctcagaagcgcaaaatgcgcaacctcttggttacaatcgagaatgataccccgctggaggaactctccaaatatgtagatatttccattatcgccctaacccggaatcgtcgtacaagacggtggtatacatgccctctctgcggcaagcagttcaatgaatccagctacctgatttcgcaccaaagaacacatacgggcgaaaaaccctatgactgcaaccactgcgggaaatctttcaaccataagacaaacctcaacaagcacgaaaggatacacaccggcgaaaagccctactcctgcagccagtgtggaaaaaactttcgccaaaactctcataggagcaggcatgagggaattcacatcagggaaaagatctttaaatgtcccgagtgcggtaaaacctttccaaagaacgaggaatttgtgttgcacctgcaatcccatgaggccgaacgtccttacggttgcaaaaaatgcgggcggcggttcggccggctctcaaactgcacacgacatgaaaagacacacagtgcctgcaagaccagaaaacagaagtag

SEQ ID NO: 212006 - DNA, 1188 bp, synthetic construct
  misc_feature 1..1188: note = Description of Artificial Sequence: Synthetic coding sequence
  source 1..1188: mol_type = other DNA
atgatggccgccaaggtggtgcccatgccccccaagcccaagcagtcattcatcctccgggtgcctcccgatagcaagctcggacaggatctgctgcgggatgccactaatggccccaagaccatccaccagctagttttggagcatttcctcacctttctacctaaaccctcgctggtacagccatcccagaaagtaaaagagacgctggtcattatgaaagacgtttcctctagcttgcagaaccgcgtccatccgcggccgctggtgaaactgctgcccaagggcgttcaaaaggagcaggaaacggtgtcactttatttgaaggctaatccagaggagctcgtggtatttgaagatctgaacgtatttcactgccaggaggagtgtgtgtctctcgaccctacccagcagctgacatcagagaaggaggacgactccagcgtaggggagatgatgctgctggctgtaaacggcagcaatccggagggtgaggaccccgagcgcgaacctgtcgagaatgaggactatcgcgagaagtcatctgatgacgacgagatggacagttcccttgtgagccaacaacccccagacaatcaggagaaggagagactgaacaccagtattccccagaaaaggaagatgagaaaccttctagttactatcgagaatgacactccactcgaggagttatccaagtatgtagacatcagcattatcgccctcacccgcaaccgaagaacccggcgctggtacacatgccccttatgcggaaaacagttcaatgagtcaagctacctgatctcccaccagcgcacccatacgggcgagaaaccctatgactgtaaccattgcggaaagtcttttaatcacaaaacaaatctcaacaaacacgagagaatccatacgggagagaaaccatatagctgctcccaatgcggcaaaaattttcgccaaaattcccataggtctcgacacgagggcattcatattcgcgagaagatttttaaatgtccagagtgcggaaagacttttccaaagaatgaagaatttgtgctacatctccaaagccacgaggcagaaagaccttacggttgcaaaaagtgtggtagacgcttcggtagactatccaattgcacgcgccatgagaagacacactcggcctgcaagaccaggaagcagaagtag

SEQ ID NO: 212007 - DNA, 1947 bp, synthetic construct
  misc_feature 1..1947: note = Description of Artificial Sequence: Synthetic coding sequence
  source 1..1947: mol_type = other DNA
atggccaccgccgtggagcccgaggaccaggacctgtgggaggaggaggggattctaatggtaaagctcgaagacgacttcacctgtcggcctgaatctgtgctgcagagagacgatcctgtgctggaaactagtcaccagaatttcaggcgcttccggtaccaagaagccgccagcccgagagaggccctcattcgtttaagggaactgtgtcaccagtggctgcggcctgaaagacgtacaaaagagcagatattggaattactggtgctggaacagttcctcactgtcctaccgggggaactgcagtcctgggtccggggccagcgtccagagagtggggaggaggctgtcacattggtcgaaggactgcagaaacagccacgcagaccgcgcaggtgggttacagtgcacgtgcatggccaggaagtgctgtcagaggaaaccgtgcacctgggggtagaacccgaatcccccaatgaactccaggaccccgtccagagctctaccccagaacaaagtccagaggagaccacacagtcccctgacctgggcgctcctgcagagcaacgtcctcaccaagaagaagagctgcagaccctgcaggaaagtgaggtcccggtcccagaagacccggatttgccagctgagcgatcaagtggggacagtgaaatggtggctttgctgacggcactttctcaaggtctggtaaccttcaaagacgttgcagtatgttttagtcaagaccaatggagtgatctggacccaacacaaaaagagttttacggcgaatatgtcctggaggaagactgtggtattgtcgtgagtttatctttcccaattcctcggcctgacgagatttcccaggttagagaggaggagccttgggttcctgatattcaggaaccccaggagacacaggagccggagatcttatcttttacctacacaggggacagaagtaaggacgaagaagaatgcctggagcaggaagatctgagcctggaagacatacacagacctgtcctgggcgaacccgaaatccaccagacacccgactgggaaatcgtcttcgaagacaaccctggcaggctgaacgaacggcgatttggcaccaacataagccaggtcaacagttttgtaaacctgcgggagacaactcccgtccaccctttgttaggaagacaccacgactgtagtgtatgcggtaaaagctttacatgtaactcgcatttggtgcggcatctccggacccacaccggagagaagccgtataaatgcatggagtgtgggaaaagttacactcggtcgtcacatcttgcccgacaccaaaaggtacataaaatgaatgctccttataaatacccactgaatcggaagaacttggaggagacctcacctgttactcaggccgagaggacaccttctgtagaaaagccttatcgatgcgatgattgtgggaagcacttccgctggacttcggacttggttcggcaccagagaacccacacaggggagaagccgtttttctgtaccatttgtggcaaaagcttcagtcaaaagtcagtgttaaccacgcatcagcgtattcatctaggagggaagccctacttatgcggcgaatgtggcgaggatttttctgagcacaggcggtacctggcccatcggaaaacccatgcagccgaggaactatatttatgctctgagtgtggccgatgtttcactcattccgccgcattcgccaaacacctccgaggtcatgccagcgttcgcccctgtcgttgtaatgagtgcggcaaaagcttctcccgtcgggaccacctggttaggcaccaacgaacgcacactggcgagaagcctttcacctgccccacttgcggcaaatctttcagccgcgggtaccacctgatcagacaccagcggacccatagtgaaaaaaccagttag

SEQ ID NO: 212008 - DNA, 1947 bp, synthetic construct
  misc_feature 1..1947: note = Description of Artificial Sequence: Synthetic coding sequence
  source 1..1947: mol_type = other DNA
atggccaccgccgtggagcccgaggaccaggacctgtgggaggaggagggtatcctgatggttaaattggaggatgacttcacctgcagaccagaatcagtcctgcagcgtgatgatcccgtactggaaacttcccatcagaactttcgaaggttccggtatcaagaagccgcctccccaagagaggcactcatccggcttcgggagttatgccaccagtggctaaggcccgaaagacgaacgaaggaacagatccttgagctgttggtcctggagcagttcctgactgtgttgcctggggagctgcagagctgggtgcgcggacaaaggccagagtctggggaagaggccgtgaccctggtggagggattgcaaaaacagccacggaggccccgaagatgggtgacagtacatgtgcacggccaggaggtgctctccgaagagactgttcacctcggagttgaaccagagagcccgaatgagctacaggatcccgttcagtctagcacgcccgaacagagtccagaggaaactacccagagccctgatctgggcgcacctgctgagcagaggccacatcaggaggaagaactgcagaccttgcaggagtcggaagtgccagttccggaggaccccgatctgccggcagagcgaagctctggagattcggaaatggtggccctgctcaccgccctgtctcaagggctggtgactttcaaagatgtcgccgtctgcttctctcaggaccagtggtcagacctggatccaacacagaaggagttttacggggagtacgtactagaggaggattgtggaattgtggtgtctttgagctttccaatccctcggcccgacgaaataagccaggtgagggaagaagagccttgggtgcccgacattcaggagccacaagagacccaggaaccagagattttgtctttcacctacactggggacagatccaaggatgaagaagaatgcctagagcaagaggaccttagcctggaagatattcataggcctgtgttaggcgagcctgagattcatcaaactcccgattgggagattgttttcgaagataatccaggacgactcaacgagagacgcttcgggacaaatatttcccaggttaatagcttcgtcaatcttagggaaaccaccccagttcaccctctgctaggaaggcatcacgactgctctgtgtgcggaaaaagctttacctgtaactcccacctggtccgccatcttagaacacataccggagagaaaccttacaagtgtatggagtgtggtaaatcgtacaccaggtcctcacatctcgcccgccaccagaaggtccacaagatgaatgcaccttacaaataccccctgaataggaagaacctggaggagacctccccagtcacgcaagcagaaagaacaccttccgtggagaagccatacaggtgcgacgattgtggaaagcactttcgatggactagcgatctagtgcgtcaccagcgaacgcacactggggaaaagccttttttttgcaccatctgcggcaagagctttagccagaagtccgtgcttacaacccaccaaaggattcatcttggcggtaaaccctatctctgtggcgaatgcggggaggatttctccgaacatcgccgatatctagcacaccgaaaaactcacgctgctgaggaactctacctgtgctccgaatgcggccggtgcttcacgcacagtgcagcattcgccaaacatctgcggggccacgcttcagtacgcccttgccggtgtaatgaatgcggtaaaagcttttcccgaagagaccacctcgtccgacatcagcgcacccatacaggcgagaagccgttcacgtgcccaacgtgcggaaagtctttcagccgcggctaccatctcatccgccaccagagaacacactcagagaaaacaagctag

SEQ ID NO: 212009 - DNA, 1947 bp, synthetic construct
  misc_feature 1..1947: note = Description of Artificial Sequence: Synthetic coding sequence
  source 1..1947: mol_type = other DNA
atggccaccgccgtggagcccgaggaccaggacctgtgggaggaggagggaatccttatggtgaaattggaagatgacttcacatgtcgccctgagagcgttttgcagcgcgacgaccccgtactggagaccagccaccagaatttccgccggtttaggtatcaggaggctgccagcccccgagaagcactgataagacttcgagagctctgccaccagtggttacggccagagcgtcggactaaggagcagattctggaactactcgtgctcgagcagtttttgaccgtgctgcctggagagttgcagtcttgggtgagggggcagaggcctgagagcggcgaagaggccgtgacactcgtcgagggcctccaaaagcagccgcgccgtccgagacggtgggtgaccgtgcatgtccacggccaagaggtacttagtgaggagaccgtgcacctcggggtcgagccagaatcgcccaacgagctgcaggacccagtacagagctcaacgcctgagcaatcccccgaggagaccactcagtcacccgacctaggggcccctgccgaacaacgaccccaccaggaagaagagctccagacattgcaggaaagtgaggtgcctgttccagaggaccccgatctccctgcagaaagatctagcggcgatagcgagatggtggcccttctgacagctctcagccagggattggttacgttcaaggacgtggctgtgtgcttcagtcaagatcagtggtcggacttagatcccacccagaaggaattctacggcgaatatgttcttgaggaggactgcgggatcgtagtctctcttagcttccccattccacgccccgatgagatctcccaggtgcgagaggaggagccctgggtgccagacatccaggagccccaggagacacaggaaccggagatactgtcttttacctataccggagaccggtccaaggacgaggaagaatgcttggagcaggaagacctgtcattggaggacatacataggcctgtactgggtgagcctgagattcaccagacgccggattgggagatcgtgtttgaagataacccaggccgactgaacgaacggcggttcggaactaatatctcccaggtgaattccttcgtgaatctgagagaaacgactcccgtgcacccattgctgggtcgccaccacgactgttctgtttgtgggaaatccttcacctgcaacagccacctagtccggcatctcaggactcataccggtgagaaaccgtataagtgcatggaatgtggaaaatcatacactcgatcctcacaccttgctagacaccagaaagttcacaagatgaacgcaccctacaaataccctctcaacaggaagaacctggaagagacatcacccgtcacgcaagctgagaggactccctcggtggagaaaccataccgctgtgacgactgtggaaagcattttagatggacaagcgacttagtcaggcaccagaggactcataccggagaaaagccatttttctgtactatctgtgggaagtcatttagtcagaaatctgtgctcaccacccaccaacggattcacttagggggcaagccttacttgtgcggcgaatgtggagaagacttctcggagcaccggagatatctcgcccacagaaaaacacacgcagcagaggagctctacctctgctcggaatgcggacgctgtttcacccactcagccgccttcgcgaagcacttgcgcggacacgccagcgtccggccatgcaggtgtaacgagtgtggcaaatccttctcccgccgcgatcatctggtcaggcatcagagaactcatactggagagaagcccttcacctgccccacatgtgggaagtcctttagcaggggctaccacttaattagacatcagcgcactcactctgagaaaacaagctag

SEQ ID NO: 212010 - DNA, 399 bp, synthetic construct
  misc_feature 1..399: note = Description of Artificial Sequence: Synthetic coding sequence
  source 1..399: mol_type = other DNA
atgaccgccgccgccagcctgctggccagcctgctgcccgccctgcccccactcaatctgcaggatgccaagtttgtcgaggagaggcggaagcagttacagaactatctcagaagcgtcatgaacaaggtgatccagatggtgccggaatttgcggcctctcctaagaaagagacattaatccaactgatgcctttctttgtgatggggctgcaggtgggaatgtatggacttttccacttcggggtaatgatggatcaaccccagccaagtctcacgcgcgccgatgagagcccgtgtgacagggtgctatctccttgtgccgcccatcgtaaacaacgggactgttgcctcagttggaaggcggagcctgaaagattcttggtgaagaagaagtag

SEQ ID NO: 212011 - DNA, 1665 bp, synthetic construct
  misc_feature 1..1665: note = Description of Artificial Sequence: Synthetic coding sequence
  source 1..1665: mol_type = other DNA
atgagcgccgacggcggcggcatccaggacacccaggacaaggagacgccgccagaagtgcctgatcggggccacccccaccaagagatgccctccaagttgggcgaggccgtgccatctggggacactcaggagtctctgcatatcaagatggaaccggaggagccccactctgagggcgcttcccaggaggacggcgcccaaggggcctgggggtgggcgcccctctcccacgggtctaaagaaaaggccttatttctccccggcggtgcgctcccctcaccaaggattcccgtgctctctcgggagggccgaacgcgagatcgccagatggccgcagcattgctcacggcctggtcccaaatgcctgtcacatttgaagatgttgcactgtacctgtcaagagaggagtgggggcgactggaccacacacagcagaatttttaccgggatgtattgcagaagaaaaatggtcttagccttggcttccctttcagcagacccttctgggcccctcaggcacatggcaagggagaggcctccggatcttcccggcaggctggagacgaaaaagaatggcggggcgcctgtaccggagcggtggaagtgggtcagagggtgcagacatcttcagtggccgcgttgggtaatgtgaaaccctttcgtacccgggctggcagggtccagtggggggtgcctcagtgcgcgcaggaggccgcttgtggtaggagttctggcccagctaaagactcaggccagccggccgagcccgaccggaccccagacgccgcgccgcctgatccttcgcctactgagccccaagaatatcgtgtccctgagaaacctaacgaggaggagaaaggcgccccagagagcggcgaagagggacttgcccccgactccgaggtcgggagaaagtcttaccgctgtgagcaatgtggcaagggcttttcttggcactcccacctggtcacacaccgtagaacacataccggagagaagccctacgcctgcaccgactgtggcaagagattcggcaggtcctcccacttaatccagcaccagatcatccatacaggcgagaaaccgtacacctgtccagcttgtcgcaagtctttctcccatcatagtacccttatccagcaccagcgtatccacacaggcgaaaagccatatgtgtgtgacagatgtgctaaacgattcacccggcgctcggatctggtgactcaccagggcacgcacacgggcgccaaacctcataaatgcccgatttgtgccaaatgctttactcagtcctctgctctagtgacacatcagcgcacgcacaccggcgtgaagccatacccttgtcctgaatgcggtaaatgcttcagtcagcgcagcaaccttatcgcacacaataggacccacacaggagaaaagccataccactgcctggactgcggcaagtcattctctcactcttcccaccttaccgcccaccagcgcacccacagaggagtccgaccttacgcttgcccgctttgtggcaagagtttttcgcgacgcagcaatctccacaggcatgagaaaatccacactaccgggcctaaagctttagcaatgctgatgctaggagctgctgcagccggtgcactcgccacaccacctcctgcccccacctag

SEQ ID NO: 212012 - DNA, 840 bp, synthetic construct
  misc_feature 1..840: note = Description of Artificial Sequence: Synthetic coding sequence
  source 1..840: mol_type = other DNA
atgagcgccgacggcggcggcatccaggacacccaggacaaggagaccccaccagaggtgccagaccgtggacatccacatcaagaaatgccttcaaaactgggagaggcagtgcccagtggcgatacacaggagagtctgcacattaaaatggaaccagaagagccgcattcggaaggggcctcacaggaggacggcgcccagggggcatggggatgggccccactgagccatggctctaaggaaaaagccctctttctgccaggcggggcacttccttcaccacggatccccgtgttaagccgggagggaagaactagagaccgtcagatggcggccgcattactaaccgcctggtctcagatgcccgtgactttcgaagacgtcgccctttacttatctcgggaggaatggggtcgactggatcacactcagcaaaacttttatagagatgtcctgcagaaaaaaaatggcctcagtctcggttttccgtttagccggccgttttgggccccacaggctcacggtaaaggggaggcctccgggagctcccggcaggccggcgatgaaaaggagtggagaggggcctgtactggcgcagtggaggtcgggcaaagggtgcaaacttcgtctgttgccgctctcggaaatgtgaaacccttccgcacacgcgccggaagggtgcagtggggggtcccacagtgcgcacaggaggccgcgtgtggccgcagttccggtcctgcaaaagactccggccaacccgccgagcccgatcggacccccgacgcagctccacccgatcctagccctaccgagccccaggagtacagggtcccatag

SEQ ID NO: 212013 - DNA, 357 bp, synthetic construct
  misc_feature 1..357: note = Description of Artificial Sequence: Synthetic coding sequence
  source 1..357: mol_type = other DNA
atgagcgccgacggcggcggcatccaggacacccaggacaaggagactccacctgaagttcctgacaggggacatccccaccaagagatgcctagcaagttaggcgaagccgtgcctagtggagacacacaggaatccctccatattaaaatggaacccgaagagcctcactccgagggcgcaagtcaggaggacggcgcacaaggggcatgggggtgggctccactgagccatggcagcaaggagaaagcgctcttcttgccgggtggggccctgcccagtccaaggatccctgtgctctcacgcgaaggcaggacccgcgacaggcaaatggctgccgcactcctgactgcctag

SEQ ID NO: 212014 - DNA, 1392 bp, synthetic construct
  misc_feature 1..1392: note = Description of Artificial Sequence: Synthetic coding sequence
  source 1..1392: mol_type = other DNA
atgggccggaagaagaagaagcagctgaagccctggtgctggtactgcaatcgagattttgacgatgagaaaatcctgatccaacaccagaaagccaaacacttcaaatgccatatctgtcataagaaactgtacactggccctgggcttgccattcactgcatgcaagttcacaaagaaaccatcgatgcagtgcctaacgcgataccagggagaaccgacatagagctcgagatatatggtatggagggtatacctgagaaggatatggacgagcgtcgaaggctactggagcaaaagacgcaagagagccagaaaaaaaaacagcaggatgacagtgacgaatacgacgacgatgactcagcggcatcgacatccttccagccgcagccggttcagcctcagcaggggtatatcccaccaatggcccagcctggcctcccacccgtcccgggcgcacccgggatgcctcctggcattcctcctttaatgcccggcgttccgcccttaatgcctgggatgccacccgtgatgccaggcatgccacccggactgcaccaccagaggaagtatacccagtctttctgtggggagaacattatgatgcccatgggcggcatgatgccccctggtcctggcatcccccctttgatgcccgggatgcctccaggaatgcccccaccagtgcctcgccctggcataccccctatgacccaggctcaggccgtgagtgcccctggcatcctaaatagacctcccgcccccaccgcaacagtgcccgccccacaaccgcccgtgacaaagccgctcttcccaagcgctggccaggcacaggctgccgtccaggggccagtgggtacagactttaagccactcaattccacacctgccactacaactgagccccccaagcccacttttcctgcttacacacagtccacagcttctacgacatctacgaccaacagcactgcagcaaagccagccgccagtattaccagcaagccagcaactttgaccacaacttccgctacctccaagctcatccaccctgacgaagatatctctctggaagaaaggagggcgcagctgcccaaataccagcgcaatctcccccgccccgggcaggccccaattgggaacccgcccgtgggaccaattggcggtatgatgccaccccagccaggaatcccgcagcagcagggaatgcgcccacccatgccaccccacggacagtatggagggcatcatcagggcatgcccgggtatttgccaggagccatgccgccttacggacaaggaccccccatggtgcctccataccagggagggcctcccaggcccccgatgggtatgcggccccctgtaatgagtcagggcggaagatattag

SEQ ID NO: 212015 - DNA, 1188 bp, synthetic construct
  misc_feature 1..1188: note = Description of Artificial Sequence: Synthetic coding sequence
  source 1..1188: mol_type = other DNA
atgggccggaagaagaagaagcagctgaagccctggtgctggtactgcaatagagactttgacgacgaaaaaatcttgatccagcatcaaaaagcaaaacacttcaaatgtcatatatgtcacaaaaagctttatactggcctgcctcccgtccctggggcccccgggatgccgcctgggatcccaccccttatgccgggcgtgccgcccctgatgcccggtatgccacctgtcatgcctggaatgccacctgggcttcaccatcaacggaagtacactcaaagtttctgcggtgagaatattatgatgccaatgggcggcatgatgcccccaggccccggaatccctccactgatgcccggcatgcccccgggcatgccccctccagtgcctcgacccgggattccgcccatgacgcaggcccaggcagtctcagctccagggatcctcaatcggcccccagcccctaccgcaaccgtgcctgctcctcaaccacctgtcaccaagcccctcttcccatccgctggacagatgggaacacctgtcacgtctagcagcaccgcgtcttccaattctgagtccctgtccgcttcatccaaagcactcttcccttctaccgcccaagcgcaagctgcagtgcagggtccggttggtacagacttcaagccgctgaatagcactcctgccaccacaactgaaccccccaaaccaacgttcccagcatacacgcagagcaccgccagcaccacctctacaaccaacagcactgctgcgaaacccgccgcttcaataacgtcaaagcctgctacactcaccacaactagtgccacctccaaacttatccacccagacgaggatatctctttggaggagaggagagcgcaattgcccaaataccagaggaacctacctcggcccggacaggctcctatcggcaacccccccgtcggtccaatcggtggtatgatgccgcctcagcccggtattccgcagcagcaaggcatgaggcccccaatgccccctcacggtcagtacggagggcaccatcaagggatgcctggttacctccccggtgctatgcccccgtatggccagggtccacccatggtgccaccataccaaggcggtcctccgcgaccgccgatgggtatgcgccctcctgttatgtcccaaggaggccgatactag

SEQ ID NO: 212016 - DNA, 1437 bp, synthetic construct
  misc_feature 1..1437: note = Description of Artificial Sequence: Synthetic coding sequence
  source 1..1437: mol_type = other DNA
atgggccggaagaagaagaagcagctgaagccctggtgctggtactgtaatagggactttgatgacgagaagatcctgattcagcaccagaaggcaaagcacttcaagtgtcacatatgtcataagaagctgtacacgggtcccgggttagccatacattgcatgcaggttcataaagaaaccattgacgcagtccccaatgccattcccggtcgaacggatatagagctggaaatctatggcatggaaggaattccagagaaagacatggatgaacgccgtcggctgctcgaacagaagacccaggagtcacagaaaaaaaagcagcaagacgattctgacgagtacgacgatgatgactccgctgcttcaacctcattccaaccccagccagtgcaaccccagcaggggtacatcccacctatggcccagcccggtttgccccctgtgcccggtgccccaggaatgcctcccggcatacctccactcatgccaggggtgcctcccttaatgcccggcatgccccccgtaatgccaggaatgccgccaggaatgatgcccatgggtggaatgatgccgcctggccccgggattcccccgctcatgcctgggatgccacccggtatgccgcccccggtccctagaccaggaatccctcccatgactcaggctcaagccgtctccgcccccgggatcttgaatcgacctcccgccccaaccgccactgtgcccgctccacagcctcccgtgaccaaacctcttttccccagtgccggccaaatgggaaccccggtcacaagcagctccactgcaagttctaactccgaatccctgtctgcctcctccaaggctctctttccctccactgcccaagcgcaagccgcggtccagggacccgtgggcacagactttaaaccactgaactccacccccgcaacaacaactgagcctcctaaacctacattcccagcatatacccagtccacagcctctaccaccagcactaccaactcaacagctgccaaacccgccgcttctattacaagcaagcctgcaaccctaacaaccacctcagcaacctcgaagctgattcatcccgatgaggacatcagcctggaggagaggcgtgcccagctccccaagtatcagaggaacctccctcggcccgggcaagcccctattggtaacccccccgttgggcctattggagggatgatgcctcctcagccaggaatcccccaacaacaaggtatgcggccacccatgcctccacacgggcagtatggtggacatcaccagggcatgcccgggtacctccccggcgccatgcctccatacggacagggacctcctatggtgccaccttaccagggaggtccacccagaccccccatgggcatgcgacctccggtaatgagccaaggaggccgatactag

SEQ ID NO: 212017 - DNA, 1485 bp, synthetic construct
  misc_feature 1..1485: note = Description of Artificial Sequence: Synthetic coding sequence
  source 1..1485: mol_type = other DNA
atgggccggaagaagaagaagcagctgaagccctggtgctggtactgtaacagagatttcgacgacgaaaaaatcctgattcagcaccagaaggcgaagcacttcaagtgccatatctgccataagaaactgtacaccggaccagggctagcgatccactgcatgcaggtgcataaggagactattgacgccgtgccgaatgccattccaggacgtacggatattgaacttgagatctatggaatggaagggattcccgagaaagatatggatgaaagacgcaggctgctggagcagaagactcaggagtctcagaagaagaagcaacaggacgattcagacgagtacgatgatgatgacagtgcagcgtcaacgtcattccaaccccaaccagtacaaccacagcagggctacattcctcctatggcccaacccggcctgccgcccgtacccggtgcgcccggcatgccaccaggtatcccccctcttatgccaggagtgcctccactgatgcccggcatgcctcctgtcatgccaggaatgcctccggggctgcatcaccagcgaaaatatactcagagtttctgcggcgaaaatataatgatgccgatgggtgggatgatgcccccaggtcctggtattccacccctaatgccagggatgccccccggcatgccaccacccgtcccacgtcccggcatccctccaatgacccaagcacaggctgtctccgccccaggcatactgaacagaccacctgcgcccaccgccacagtgccagccccacagccccccgtgaccaagcctttatttcccagcgcgggacagatgggaaccccagtgacaagtagcagcaccgcaagcagtaattctgaaagcctgtcagcatcatctaaagccctgttcccctccacagcccaggcccaagcggccgtgcagggacctgtcggaactgactttaagcccctcaacagtaccccagccacaactacagaacccccgaagccaacttttcccgcgtatacacaatccacagcaagcacaacctcaaccactaactctaccgccgccaaaccagccgcctccattacttcgaagcctgctaccttaacaacaacaagcgccacatccaagttaatccacccagacgaagacatttctcttgaggaacgacgcgcccagctccctaagtaccagcgcaaccttccaaggcccgggcaggccccaattggtaaccccccagtgggacccattgggggaatgatgccaccgcagccagggattccccagcaacaaggcatgaggcctccaatgcctccccacggtcagtacggcggccaccaccagggaatgcctgggtatctgcctggcgccatgccaccgtacggacaaggcccacctatggtaccaccctatcaagggggccctccaagacccccaatgggaatgagaccaccggtgatgtcacagggtgggaggtactag

SEQ ID NO: 212018 - DNA, 1344 bp, synthetic construct
  misc_feature 1..1344: note = Description of Artificial Sequence: Synthetic coding sequence
  source 1..1344: mol_type = other DNA
atgggccggaagaagaagaagcagctgaagccctggtgctggtactgtaaccgggatttcgacgatgagaaaattctgatccaacaccaaaaagctaagcatttcaagtgtcatatatgccacaaaaaactgtacacagggccgggattggctatccactgcatgcaggtgcataaggagactatcgatgccgtgcctaacgctattcccggtcgcacagacatagaattggaaatctatggcatggaaggaattcccgagaaagacatggacgagaggcgcaggctcctcgaacagaagacccaggaatcacagaagaaaaagcagcaggatgacagcgacgagtatgatgatgatgactctgcagcaagcaccagcttccagccccagcccgtccaaccccagcagggctacattcctcccatggcccaaccggggttaccccctgtgcctggcgcacccgggatgccgccagggatcccccccctgatgcctggcgtgccccctttgatgcctggaatgcctccagtaatgcctggcatgccccctggcatgatgcccatgggtggcatgatgccgccaggaccaggcatcccgcctctgatgcccggaatgccccctggtatgcctcctccagtgcctcggccaggcatccccccaatgacgcaggcacaggcggtgtccgctcctgggattctcaacaggcccccagcgcctactgccacggtgccagccccacaaccgcccgtgaccaagccactctttccctcggctggacaggcccaggctgccgtccagggaccagtggggactgacttcaaaccattgaacagcacgcctgctaccactactgagcctcccaagccgacatttccggcatatacacagtccacagccagtacaacaagcacaacaaattcgaccgcagcaaaacccgccgcatccatcacgtccaagccagccactctgactacaaccagcgccacctcaaagttaatacatccagatgaagacatctccttagaagaaaggagagctcagttgccaaaatatcaacggaacctgccgcggccaggtcaggcgcctattggcaatccccctgtcggtccgatcggtggaatgatgcccccccagccgggaatacctcagcagcagggcatgagaccccccatgccgcctcacgggcagtatggaggacatcaccagggcatgcctggctatttgccaggggccatgcccccttacggtcaagggccccccatggttcctccctatcagggggggcctccaagaccccctatggggatgcggcctccagtgatgtcccagggggggcgttactag

SEQ ID NO: 212019 - DNA, 1491 bp, synthetic construct
  misc_feature 1..1491: note = Description of Artificial Sequence: Synthetic coding sequence
  source 1..1491: mol_type = other DNA
aacaccgtgatgggccggaagaagaagaagcagctgaagccctggtgctggtattgcaatcgagacttcgacgacgagaaaatactcatccagcaccagaaagccaagcactttaaatgccatatttgtcacaagaagctgtacactggccccggacttgccatccactgtatgcaagtccacaaggagactatagacgccgtacctaatgccataccaggaagaaccgacattgagctggaaatatacggcatggaaggtatcccagaaaaggatatggatgaacggcgccggctcctggagcagaaaacccaagagagtcaaaagaagaaacagcaggacgatagtgatgagtatgacgatgacgatagtgccgcctcaaccagcttccagccccagcctgtgcaacctcaacagggttatatcccccctatggcccagcctggactgccgccagtgccgggagcgccaggtatgccccccggaatccctcctttgatgcctggggtgccccccctcatgccggggatgccccccgtgatgcccggtatgccccccggacttcatcaccagcggaaatatacacagtcattctgcggagaaaatatcatgatgcccatgggaggaatgatgcctcccggaccaggaatccccccccttatgcccgggatgcctcccggaatgcctccacctgtgcctcggccaggaatcccccccatgactcaggcccaggccgtcagcgcgccaggaatcctgaatcgccctcctgcccctacagccactgtgcccgccccacagccccccgttactaagcctcttttccctagcgctgggcaaatggggacccccgtcacatcaagcagtacggcttcatctaactcggagtccctgtccgctagcagtaaagctcttttcccctccactgctcaggcccaggcagccgtccaagggcccgtgggcaccgacttcaaacctctgaattctaccccagctacaaccactgagccacctaaacctacatttccagcctacacacaaagtaccgcttctaccacctccaccactaattcgaccgcggcgaaacccgcagcctcaatcaccagtaagccagccaccctgaccacaacatccgcaaccagcaaactgatccatccagacgaggacattagcctagaagaacgacgcgcacagttgcctaaataccagcgcaacttgcctcgccctgggcaggccccaatcggtaacccacctgtgggacctataggaggaatgatgcccccacaaccggggattccccaacagcaggggatgaggccacccatgccccctcacggacagtatggcgggcaccatcaggggatgcccgggtacttacccggagccatgccgccatacggccaggggccccctatggttcccccttaccagggcggaccccctcggccaccaatggggatgagacctcccgtgatgagccagggcttaccatag

SEQ ID NO: 212020 - DNA, 3843 bp, synthetic construct
  misc_feature 1..3843: note = Description of Artificial Sequence: Synthetic coding sequence
  source 1..3843: mol_type = other DNA
atgggcagcctgaccttccgggacgtggccatcgagttcagcctggaagaatggcagtgtctggatacagctcagcagaacttatatcgcaatgtcatgcttgagaattaccggaatctagttttcctcgggatcgcagcatttaaaccggatctgatcattttcctggaagagggaaaagaatcttggaacatgaagaggcacgaaatggttgaagagagtcccgtgatctgtagtcactttgcacaggatctctggcctgagcaggggatcgaggattcgttccagaaagtcattctacggcgttacgaaaagtgtgggcatgagaatttacatctgaaaatcggctacacaaatgtggatgagtgtaaagtacacaaggaaggctacaacaaactcaaccagtctctgacgactactcaaagtaaagtctttcagagggggaagtatgctaatgtgtttcataagtgctctaacagcaacagacacaaaattcggcatacagggaagaaacacctgcaatgcaaggaatatgttaggtcattctgcatgctaagccacctgagtcagcacaaaaggatttacacccgggagaatagttataagtgcgaggagggtggcaaggccttcaactggtcgagtactctgacatattataagagcgctcatacaggcgaaaaaccctaccgctgtaaagaatgtggcaaggctttctccaaattctcgatactcacaaagcacaaggtgattcatacaggggaaaaaagttacaagtgcgaggagtgtgggaaagctttcaatcagagcgccatccttaccaaacacaaaatcatacatacgggagaaaagcccaataagtgcgaagaatgcggcaaggccttctccaaagtctctacattgaccactcacaaggctattcacgctggtgagaaaccttacaaatgtaaagaatgcggcaaagcgttttccaaggtcagcaccttaatcacacataaggccattcacgcaggggaaaagccctataagtgcaaagaatgcggcaaggcattctctaaattttccatcttgacgaaacacaaggtgatccacacaggtgagaaaccttataaatgtgaggagtgcggcaaggcttacaagtggccatctactctgagctatcacaagaaaattcacaccggcgaaaaaccttataaatgcgaggagtgtggcaaaggcttttccatgttctcgattcttacaaaacacgaagtcatccataccggagagaagccctacaagtgtgaagagtgcggaaaggccttcaattggtcatccaatctgatggagcataagaagattcataccggcgaaacgccatacaagtgcgaggaatgcgggaagggcttcagtatgttcagcatactgactaaacataaggttattcataatggggagaaaccctacaaatgcgaggagtgcgataaggctacccacgccggtgaaaaaccatataagtgtgaggagtgtggcaaagcctttaactggagcagcaatttgatggagcataagcggatccatacaggagaaaagccttacaaatgtgaagagtgtggtaagtctttctctacgttctctattctgacaaagcataaggtgatacataccggcgagaagccgtacaaatgcgaggagtgtggaaaggcctacaagtggtctagtaccctctcctaccataagaaaatccacaccgtggaaaaaccatataaatgtgaggagtgcggaaaggccttcaatcagtcagcgatattaatcaaacataagagaatacacacgggcgaaaaaccgtataagtgcgaggagtgcggcaaaacatttagcaaggtgtctaccctcaccacccataaggccattcacgcaggagagaaaccttacaagtgcaaggagtgtgggaagacatttataaaagtttcaaccctgactacccataaagcgattcacgccggagagaaaccatacaagtgcaaggagtgcggaaaagcttttagcaaattctccatcctaacaaaacacaaggtgattcacaccggggagaaaccctacaaatgcgaagaatgcgggaaagccttcaactggagcagcaacctgatggagcataaacggattcatactggagaaaaaccctacaaatgtgaagagtgcgggaaatcattttccaccttttctgtgctgaccaagcataaagtgattcacaccggtgagaaaccctacaaatgcgaagaatgtggtaaagcttacaaatggtcttctaccctgtcataccacaaaaagatccacaccgtcgaaaaaccctacaagtgcgaggagtgtggcaaggccttcaaccgttcggctattcttattaaacacaagcggatccatacagacgaaaaaccatataagtgcgaagagtgcggcaagaccttcagtaaagtctcaactctcaccacgcacaaggccattcatgctggcgaaaagccctacaagtgcaaggaatgtggtaaagcatttagcaaattcagtattctgaccaaacataaagtgatccacaccggtgaaaaaccatataagtgtgaagaatgtggtaaggcctacaagtggccttcaacccttagctatcacaaaaaaatacacacaggggagaagccttacaagtgtgaggaatgtggaaaggggttcagcatgttctccattctgaccaagcatgaggtgatccacaccggcgaaaaaccgtataagtgcgaggaatgcgggaaagccttctcttggctgagcgtgtttagcaagcataagaagactcacgccggcgaaaaattctacaagtgtgaggcttgcggaaaagcttataagagtagttctacgctgagttaccacaagaagatacacacagaagaaaaaccatacaaatacgaagagtgtgggaaggggtttagtacctttagcatactgactaagcataaagtgattcacactggcgaaaagccctataaatgtgaggaatgcggtaaggctttcaactggtccagcaatttgatggaacataagaagatacacaccggggagacgccatacaagtgcgaagaatgtgacaaggccttttcatggccatctagtttgactgaacataaagcaacccatgcaggggagaaaccttacaaatgcgaagagtgcggtaaggctttcagttggccatctagactgacagaacacaaggcgacccacgcaggcgaggaaccttacaaatgcgaagagtgcggcaaagcgtttaattggtccagtaatttgatggaacacaagagaattcatacgggggagaaaccatataagtgcgaagaatgcggcaagtccttctcgactttctcaatactgactaagcacaaagtgatacatacaggtgagaagccatataaatgtgaggaatgcggcaaggcctacaaatggagttcgaccctgagctatcacaagaagatacatactgtggagaagccctataagtgcgaagaatgtggaaaagggttcgtgatgttttctatactcgccaaacataaagtgatccacacaggggagaaactttacaaatgtgaagagtgcggcaaggcatataaatggccatctacactgcgataccataaaaaaattcacaccggcgagaagccttataagtgtgaagaatgtggaaaagcattttcaactttctctattctgacaaagcataaggtcatccacaccggcgaaaaaccctataagtgcgaagagtgcggcaaagcttttagctggctgtcggtgttcagcaagcacaaaaaaatccataccggagagaagctatag

SEQ ID NO: 212021 - DNA, 123 bp, synthetic construct
  misc_feature 1..123: note = Description of Artificial Sequence: Synthetic coding sequence
  source 1..123: mol_type = other DNA
ggcaagggcttcagcatgttcagcatcctgaccaagcacaaggccactcatgctggagaaaagccatacaagtgcgaagaatgtggaaaagcttttaactggagtagcaacctcatggagtag

SEQ ID NO: 212022 - DNA, 3504 bp, synthetic construct
  misc_feature 1..3504: note = Description of Artificial Sequence: Synthetic coding sequence
  source 1..3504: mol_type = other DNA
atgggcagcctgaccttccgggacgtggccatcgagttcagcctggaggaatggcaatgcctcgatactgctcagcagaatctgtatcgcaatgtaatgcttgagaattatcgtaacctcgtgttcctgggcattgccgcctttaaaccggatttgatcatctttctcgaggagggaaaggagtcatggaatatgaaaagacacgagatggtggaggagagccctgtgatatgctcccattttgcccaggacctttggcccgaacagggaattgaggactcgttccagaaagttatcctccgcaggtacgaaaagtgcggtcatgaaaatttgcacttaaagatcggctatacgaatgtggacgagtgtaaagtacacaaagagggctacaataagcttaatcagtctctgactactactcagtccaaggtgtttcaacgcggcaagtatgctaacgtgttccataagtgctctaactcaaatcgtcataagattcggcacaccgggaaaaaacacctccagtgcaaggagtatgtgaggtcattctgtatgttgagtcacctctcacagcataaacgaatttatacacgtgagaacagctacaaatgtgaggagggcggtaaagccttcaactggagctccacactgacatactataaatccgctcatactggtgagaagccttacaggtgtaaagaatgcggcaaagcattttccaagttttccatactgacaaagcacaaagtgattcacaccggggaaaaatcttataagtgcgaggaatgtgggaaggcttttaaccaatcagcaatcctgacgaagcacaagattatccacacaggcgagaagcctaacaaatgtgaagaatgcggaaaggcatttagtaaggtgtccacccttacgacgcacaaagcaatacatgctggcgaaaaaccgtacaaatgcaaggagtgcggcaaggcattctcaaaggtttcaaccctgatcacccataaagccattcacgcgggggagaaaccctacaagtgcaaagaatgtggcaaggcattctctaagttttcgatcctcactaaacataaagtcatccatacaggcgagaaaccatacaaatgtgaggaatgtggtaaagcttacaagtggccctcaacgctcagttaccataagaagattcacacgggcgaaaagccctacaagtgcgaagagtgcggtaaagggttctctatgttctcaatcctgaccaaacacgaggtgatacatactggagaaaaaccttataagtgtgaagagtgtggaaaagcctttaattggtccagtaacctgatggaacataaaaaaatacacacaggggagactccatataagtgtgaggaatgcgggaaaggatttaaatggtcctccacactgtcttatcataagaaaattcacacagttgagaaaccttacaaatgtgaagaatgcggtaaagcctttaatcaatccgccattctgataaaacacaagcgcatccacactggtgagaagccatacaaatgtgaggagtgcggtaagacgttcagcaaagtgagcacattgacaactcacaaggcaattcacgctggagaaaaaccttacaaatgcaaggagtgtgggaagacattcatcaaagtctcgacattaaccacccacaaggctattcatgctggagagaagccatataaatgtaaagaatgtggtaaggcattttctaaattttcaatcctcaccaaacacaaggtgattcatacaggggagaaaccctataagtgtgaagaatgcggcaaagcattcaactggtcaagcaatttaatggaacataagagaatccataccggagagaaaccatacaagtgtgaagagtgtggcaagtcgttcagcacgtttagcgtgctgaccaaacacaaagtcatacataccggggaaaaaccctataagtgtgaagagtgcggaaaagcttataagtggagcagcaccctgtcttaccataagaaaattcacacagttgaaaaaccctataaatgcgaagaatgtgggaaggcctttaatcgcagtgcaatcctgattaaacacaagcgcatccacaccgacgagaagccttacaagtgtgaggagtgcggcaagacattttcgaaggtcagcacattaacgactcacaaagcaatacatgctggagagaaaccctacaaatgtaaggagtgcgggaaagctttcagcaaattcagtattctcacaaagcacaaagtcattcacacaggagagaaaccatacaagtgcgaggagtgcgggaaagcatacaagtggccgagcactctgtcttaccataaaaagatacacaccggagagaaaccatataagtgcgaggagtgcggaaagggctttagcatgttcagtattcttactaaacatgaggttattcataccggtgagaaaccatacaaatgcgaggagtgtggaaaagccttcagctggctctctgtgttcagcaagcacaagaagacccacgccggagaaaagttttataagtgcgaggcatgcgggaaggcttacaatactttcagcatacttaccaagcacaaagtgatccatacaggcgagaaaccttataaatgcgaagaatgcggaaaggcattcaattggagcagcaacctgatggaacataaaaaaatccacactggcgagaccccttacaagtgcgaggagtgtgacaaggcgttctcctggcccagctctctgaccgagcacaaggcaacacacgcgggcgaaaaaccttacaagtgcgaagaatgcggcaaggcctttagttggccatctcggctgacggagcataaagcaacacatgccggtgaagaaccctataagtgcgaggagtgcgggaaagccttcaactggtcctcaaacttgatggagcataagagaatccatacaggcgagaaaccgtacaagtgcgaagaatgcgggaaaagtttctctaccttctccattcttacaaagcacaaagtgatccataccggtgagaagccttataaatgtgaggagtgcggcaaagcttacaagtggtcttctacactctcttaccataaaaagatacacactgtcgagaagccgtacaaatgcgaagaatgtggaaaaggctttgtaatgtttagcatcctagccaaacacaaggtcattcacactggagagaagctttacaagtgcgaagaatgtgggaaggcctacaagtggccctccaccttgcgctaccataagaagatccacaccggagagaagccttataagtgcgaggaatgtgggaaagcatttagtacgttcagtattcttactaagcacaaggtgatacacactggcgagaagccttacaaatgtgaagagtgtgggaaggcgttctcgtggctgtcagtttttagtaagcataaaaagattcacacaggcgtgcctaatccaccaactcacaagaagatccacgcaggcgagaagctgtacaaatag

SEQ ID NO: 212023 - DNA, 1488 bp, synthetic construct
  misc_feature 1..1488: note = Description of Artificial Sequence: Synthetic coding sequence
  source 1..1488: mol_type = other DNA
atggccgagagcgcccccgcccggcaccggcggaagcggcggagcacgccgctaacctcctcgaccctgcccagccaggccacagaaaagtctagctattttcagactactgagatctccctgtggacagtggtcgcggctatccaggccgtggagaagaagatggagagccaggctgcccggctccaaagcttggaagggagaaccggaaccgcggagaaaaagttggcagactgtgagaagatggcggtggagttcggcaatcagttggaaggcaagtgggctgtcctgggcacgttactgcaggaatatggcctgctgcagagaagactggagaatgtggagaatctgttaaggaaccggaacttttggatactccggttgccccctgggtcaaaaggagaggcccctaaggtgtccagaagcctagagaacgatggtgtctgcttcacagagcaggagtgggagaacttagaagattggcaaaaagagttgtatcgcaatgtcatggagtccaattatgaaacccttgtcagtctgaaagtgttgggtcaaacagaaggggaggcagaactgggaactgaaatgctcggagatctcgaggaagagggcccagggggggcccaccccgccgggggtgtcatgatcaagcaagagctgcagtatacccaggagggcccagccgacttaccaggcgagttttcctgcatcgctgaagagcaggcattcctgtctcccgagcaaaccgagctgtgggggggccaaggctcttcagtcctgctggaaaccgggcccggagattctaccctggaagagcctgtaggatctcgagtgccttcgagctctaggacggtagggtgtccaaaacaaaagtcccatcgccaggtccagttggaccaggagtgcggccagggtctgaaactaaagaaggacacctccagaccctacgaatgttcagagtgtgagattaccttccgctacaaacagcagctagcgacccatctgcgaagtcactccgggtgggggtcatgtacacccgaggaacccgaggaatccttaagacctaggccccgactcaagcctcaaaccaagaaagcaaagctccatcagtgcgacgtgtgccttcgatctttttcctgtaaagtcagtttggtgacacaccagcgttgtcatttacaggaggggccttcagccgggcaacacgtgcaggaacgattcagtcctaattcactagttgccctgcccggacatatcccatggaggaagtccagaagttccctgatctgcggttactgcggcaagtccttcagtcacccctccgatctggtgagacaccagaggatccacaccggagagcgaccctatagctgtactgaatgcgagaaatcgtttgtgcagaagcagcatctgctgcagcatcagaaaatccatcagagagagaggggcggtcttgctctggagcccggacggccgaatggccttctatag

SEQ ID NO: 212024 - DNA, 1380 bp, synthetic construct
  misc_feature 1..1380: note = Description of Artificial Sequence: Synthetic coding sequence
  source 1..1380: mol_type = other DNA
atggccgcccccctggaggcccaggaccaggcccccggcgagggcgaaggcttgctgatagttaaagtggaggatagctcttgggagcaggagtcggcccaacacgaggacggtcgcgattcagaggcttgtagacaaaggttccgccagttctgctacggcgacgtccatggacctcatgaggctttcagccagctgtgggaattatgttgccggtggctcaggcccgagctgcggaccaaggaacagattctggaactcttagttctagaacagttcttaacagttctgccaggggagatacagggatgggtgcgcgagcagcatccagggagcggcgaagaagctgtggccttagttgaagatctgcagaaacagcccgtgaaggcctggagacaggatgtgccttcagaagaagccgagcccgaagcagcaggtcggggtagccaagcaacaggtccgccccctaccgtgggggctcggcgaagacccagtgtgccacaggaacaacactcccattccgctcagccgccagcgctactaaaagaggggaggcccggtgagaccactgatacatgttttgtgtccggggtccacgggcctgtcgctcttggagacattcccttttacttctcaagagaggaatggggaacacttgatcccgcccagagggacttgttctgggacatcaagagagagaatagtcgtaacactaccctagggtttggcctgaaggggcagagcgaaaagtcccttctacaggagatggtccccgtggtacctgggcaaacaggcagtgacgttactgtttcatggtcgccggaagaagcagaagcatgggaaagtgagaaccgccctcgagccgcccttggccccgtagtcggtgcgcgccggggacgcccccctacccgacgaagacaattccgggatctggccgccgaaaagcctcattcttgtggacaatgcggaaaaagattcagatggggctccgacctggcaaggcatcaaaggacccacactggagagaaaccccacaagtgtcctgagtgtgataagtcctttaggtcaagcagcgaccttgtcagacaccagggggttcacaccggcgagaagccattctcctgctctgaatgcggcaaaagtttttcccggagcgcatacctggcagaccaccagcggattcacacaggcgaaaagccgtttggctgcagtgattgtggcaagtcattttcccttaggtcttacctccttgaccacagacgggtgcatacaggggagagaccctttgggtgtggcgaatgcgataaatcatttaagcagcgcgcacatctcatcgcccatcagagtctccatgctaagatggcccagcctgtaggatag

SEQ ID NO: 212025 - DNA, 906 bp, synthetic construct
  misc_feature 1..906: note = Description of Artificial Sequence: Synthetic coding sequence
  source 1..906: mol_type = other DNA
atgtgcccccggcggcggcggaacccccggctgcaggccggcgaccctcggccccggggcttgccccgcagatgggggcatggcggagggcggcttttcccgaggagttccaccgctatagccggtccggtggcgctcggcgatatccctttttatttctcacgagaggagtggggtacccttgaccccgctcaaagagatctattctgggacatcaaacgcgagaattctcgcaacacaaccctgggatttggcttaaaaggccaatccgagaagtccctgctgcaggaaatggtacccgtggtccccggccaaacaggcagcgatgttacggtgtcatggtccccagaggaagcagaggcttgggaatctgagaaccggccccgcgccgcactggggcctgttgttggagctaggcgcggccgccctccaacacggaggaggcagttccgggacttggcagctgaaaagccccactcctgcggacagtgtggcaaacggtttcggtggggatctgatctggctaggcatcagcgaacccacaccggtgaaaagccccacaaatgcccggagtgtgataagtccttcaggagctcctcagacttagtgcgccaccagggggtccacaccggggagaaaccctttagctgtagtgagtgcggcaaaagtttctcacggtctgcctacctcgcggatcaccagagaatccatacaggggagaagccttttgggtgcagtgactgcgggaagtcattctccctgcggtcttacttactggaccacaggcgcgtccacacaggggaacgcccttttggctgtggagaatgtgacaagtcctttaaacagcgggcccacttaatcgcacatcagagtctgcacgccaagatggcacagccagtcggctag

SEQ ID NO: 212026 - DNA, 1821 bp, synthetic construct
  misc_feature 1..1821: note = Description of Artificial Sequence: Synthetic coding sequence
  source 1..1821: mol_type = other DNA
atggccgtgaccttcgaggacgtgaccatcatcttcacctgggaggaatggaaattcctggactcgagtcagaagcgcctctacagggaggtcatgtgggaaaattatacaaacgtgatgtccgtcgagaattggaacgagtcttacaaaagtcaggaggagaaattccgttacctcgaatacgaaaatttttcatattggcagggctggtggaacgccggagcccagatgtatgaaaaccagaattatggggaaacagtccagggcacggatagtaaggacctgacccagcaggatcgtagccaatgccaggagtggctcatcctgagtacccaggttcctgggtacgggaattacgagctcacctttgagtccaagagcctgcgcaatctcaagtacaaaaactttatgccgtggcagtcgctggaaacgaagaccacgcaagactacggccgtgaaatctatatgtccggatcacatggattccaggggggccgctaccgactcggtataagccggaagaacttgtccatggaaaaagagcagaaattaattgtacagcactcttatatccctgtggaagaagccctcccccagtacgtgggcgttatttgtcaggaggatctcttacgagactccatggaagagaaatactgcggatgcaataaatgtaaagggatctactactggaattcccggtgtgtgttccacaaaagaaaccagcctggggagaatctctgtcagtgcagtatctgcaaggcctgttttagccagcgctctgacttgtacaggcatccaaggaatcacatcgggaaaaagctgtatggatgtgatgaagttgacggaaattttcatcagtcttcgggcgtgcactttcatcagagggttcatatcggggaggttccatacagctgtaatgcttgcggtaaaagttttagccaaatctcctctctgcataatcaccagagagtccatacagaagaaaaattctataagatcgaatgtgataaagacttatctaggaactctctcctgcacattcatcaaaggttacatatcggtgaaaaaccatttaaatgcaaccaatgcggaaaaagcttcaataggagctccgtgctacacgttcaccagagagtgcacactggagagaagccatacaagtgtgatgagtgcgggaaaggatttagccagagtagcaacctcaggatccatcagctggtccacacgggagagaagagttataagtgcgaggattgcggcaaaggattcacacagaggtcaaatctgcagattcaccaacgggtccataccggcgagaaaccctataaatgtgatgattgtgggaaagatttttcccattcttctgatcttaggattcaccaacgagtccacaccggcgagaaaccttatacatgtcctgagtgtggcaaaggcttcagcaagagcagtaaacttcacacacatcagcgagtccatactggtgaaaagccctacaaatgcgaggagtgcggcaagggtttttctcagcgaagtcacctgcttatccatcagcgcgtgcacactggagagaagccatataagtgtcacgactgtggaaagggcttctcccacagcagcaacttgcatatccaccagcgagtgcacacgggagaaaagccgtatcaatgtgccaaatgtgggaaggggttttcccacagcagcgctctacgcatccatcagagagtccacgcaggcgagaaaccatacaagtgcagggagtattataaaggctttgatcacaactcacacctccacaacaaccacagaagaggaaacctttag

SEQ ID NO: 212027 - DNA, 1821 bp, synthetic construct
  misc_feature 1..1821: note = Description of Artificial Sequence: Synthetic coding sequence
  source 1..1821: mol_type = other DNA
atggccgtgaccttcgaggacgtgaccatcatcttcacctgggaggagtggaaattcctcgactccagccagaaaagactgtatcgggaggtgatgtgggaaaattacacaaacgtgatgtctgtggaaaattggaatgagtcatataagagtcaggaggaaaaatttcggtacctcgagtacgagaatttctcttattggcagggctggtggaatgctggcgcccagatgtacgagaatcagaactatggtgagaccgtgcagggtacagatagcaaagacctgacacaacaggatagaagtcaatgccaggagtggctgattttgtccacacaggtgccaggatatgggaattatgagttgacgtttgagagcaaaagcctaaggaatctcaagtataagaattttatgccttggcagagtctcgagacaaagactacacaggactatggtagggaaatttatatgtcaggttcccatggttttcaaggaggacgctaccgactgggaatttctagaaaaaatttaagcatggaaaaagagcagaagctgatcgtgcagcactcatatattccggtagaggaagctcttcctcaatatgtcggggttatatgccaggaggatctgctgagggatagtatggaggaaaagtattgcggatgtaataagtgtaagggcatctactactggaacagcaggtgcgtcttccacaagcgcaatcagcctggggagaacctttgtcagtgttcaatatgtaaagcatgcttctcgcagaggtctgatctctatagacacccacggaatcacatcgggaagaagttgtacggctgcgatgaagtggacggcaattttcaccagtccagtggagttcacttccaccagcgggtccacatcggggaggtgccttactcctgtaacgcatgtggaaagtccttttcccaaatttcttccctccataaccaccagagagtgcacacagaggaaaaattctacaaaattgaatgcgacaaggatctctcccgtaatagcttgctacacatacatcaacggctccacataggtgagaaacctttcaaatgtaatcaatgcggtaaaagtttcaatcgctctagtgttctgcatgtgcatcagagggtgcacactggagaaaagccctataagtgtgatgagtgtggtaaaggcttctcccaatccagcaatcttagaattcaccagctggtccatactggagagaaaagctataaatgtgaggactgcggaaagggattcacgcagcgctccaatttgcaaatccaccaacgggtgcacacaggcgagaagccctacaagtgtgacgactgtgggaaagacttctctcattcttccgacctgagaatccatcagagagtgcacactggggagaaaccctacacatgcccagagtgtggcaaaggcttcagcaagagctccaagctccacacccaccagagagttcataccggggagaaaccttacaaatgcgaggaatgcgggaagggcttttcgcagcggtctcacctcctcattcaccagcgcgtgcataccggggagaagccttacaaatgtcatgattgtggaaagggattttcgcattcgagcaatctgcacatccaccaacgcgtacataccggcgagaaaccctaccagtgcgctaagtgcggaaaaggtttctctcattctagcgcactccgaatacatcagagggtccacgctggcgagaaaccatacaaatgcagggagtattataaaggctttgaccataacagccacctgcacaacaatcatcgacgcgggaacctatag

SEQ ID NO: 212028 - DNA, 1554 bp, synthetic construct
  misc_feature 1..1554: note = Description of Artificial Sequence: Synthetic coding sequence
  source 1..1554: mol_type = other DNA
atgcagcccctgagcaagctgatggccatcagcaagccccggaacttgtctctgcgcgaacagcgcgaagtgctgcgggccgacatgtcctggcaacaggaaacgaaccccgtagtcgagactcatgactcggaagcctccagacagaagtttaggcacttccagtacctaaaagtatccggcccacacgaggctttatcacagctgtgggagctgtgcttgcaatggcttaggccagagatccacactaaaaagcagatcatagagttattggttctggaacagttcctcgccatcctacctgaagaagtcaggacatgggtcaatttgcagcaccccaacaattctaaggacatggttactctgatagaggacgtcattgagatgcttgaggacgaagatatgccttgcaaggacagtgctctacagatggggagcataaaggaaaagatgaaggcaggatcgaggactggcaagccacaggagccagtaacctttaaagatgtcgtcgtggaattctccaaagaagaatggggccaactggattcggctgtcaaaaatctgtaccggaatgtaatgcttgagaactttaggaatctaaacagccttaggaaagcccacttgctcagtaaacctttcgaatctctgaaactggaaagtaaaaaaaagaggtggatcatggaaaaagaaattcccagaaagacaatttttgatatgaagtccatctccggcgaggaaagtagccacggggttattatgacgcgtcttactgaatcagggcatccatcttctgatgcctggaagggagagaactggctataccggaatcaaaaaaaatgggatattaacctcccacaggaggcctttattcccgagactatttatacagaggaagaggacttcgagtgctctgaaaataagaagtcattcgacattaactccgtcagcagcatctgcgccatccaagttgggatccctagtaggaagggcagccctaaatgcgacaaatttaagacatactttaaatttaacctggattcggtgggaaaacaacacagcgagtatgaatatggcaatgacctgtctctgtccacagatattcggcaccagaagtcccatacgacaatgaacagctacgaatgctaccaatgtgggaaagcattctgtagaagttctagcctcattcggcatcagattattcacaccggcgagaagccatataaatgtagcgaatgtgggcgattctttaataggaggacgaacttaactaagcaccagaagctccatgctgaggccaaagcatgtacaagtaataaatgtggaaaggcattctccaagtcggaggactcaaataacccaaccctgcacttcggtaataacttttatcagtgcgtgaattgtggcaagagtttcaatcggtcttcctctctgatcagacatcaaatgattcacactggagagaagcccttcaagtgcaaggagtgctccaaggcctttaatcggtccagcaacttggtgaaacatcaaaaactgcacacacgggacaagtcatag

SEQ ID NO: 212029 - DNA, 1554 bp, synthetic construct
  misc_feature 1..1554: note = Description of Artificial Sequence: Synthetic coding sequence
  source 1..1554: mol_type = other DNA
atgcagcccctgagcaagctgatggccatcagcaagccccggaacctttctctgagagagcaaagagaggtactgagagccgacatgagttggcagcaggaaaccaatccagtggtggagacccacgattcggaggcgtcaagacagaagtttcgccactttcagtacctaaaggtttctggcccccacgaagccctctcccaactgtgggagctgtgcctgcaatggctccgtcctgagattcacactaagaagcaaataatcgagctgcttgtgctcgagcaattcctggcaattctcccagaggaagttcgcacatgggttaacctgcagcacccgaataactccaaagacatggttactctgattgaggatgtgattgagatgcttgaggacgaggatatgccttgtaaagactccgccttgcaaatggggagcattaaggagaaaatgaaggctggctccaggacgggcaaaccacaggagccagttacgtttaaggatgtagtggtagaattttccaaggaagagtggggtcagctcgactctgccgtgaaaaacctatatagaaacgtgatgttagagaactttcgcaacctgaattccctgagaaaagcacacctcctcagcaaaccatttgaatcactgaaactcgaatcaaaaaaaaaacggtggattatggagaaggagattccacggaagaccattttcgatatgaaaagcatctcaggcgaagagagtagtcacggagttattatgacacggcttaccgagtccggacacccgtcttcggatgcatggaagggggagaactggctttaccggaaccagaaaaagtgggatatcaacctgcctcaggaagccttcatccccgagacgatttacactgaagaggaggattttgagtgcagcgaaaacaaaaaaagctttgacataaactccgtgagctcaatttgcgccatccaggtcggcattccaagtcgcaaaggttcccccaagtgtgacaagttcaaaacctatttcaagtttaatttggattccgtcgggaagcaacactcagaatatgagtacggcaatgatctgagcctgtccacggacatacgccatcagaagagccacacaaccatgaattcatatgaatgctatcagtgcggcaaggctttctgcaggagcagcagcctcatccgacatcaaattattcataccggggagaaaccatataagtgttcagagtgcggcaggtttttcaacaggagaacaaaccttactaaacaccagaaattgcatgcagaagcgaaagcctgcacctcaaacaaatgtggtaaagcattctcaaagtccgaggactcgaacaatccaacactgcacttcggcaataatttttaccagtgtgtcaactgcggaaagtccttcaacaggagcagttccctgatcagacatcaaatgattcacaccggagagaagccctttaaatgcaaggaatgctccaaagccttcaacaggtccagtaatctcgtgaaacatcaaaaactgcatactcgtgataaatcttag

SEQ ID NO: 212030 - DNA, 915 bp, synthetic construct
  misc_feature 1..915: note = Description of Artificial Sequence: Synthetic coding sequence
  source 1..915: mol_type = other DNA
atgcagcccctgagcaagctgatggccatcagcaagccccggaacctgtctctgcgggagcagcgggaagtgcttagggccgacatgagctggcagcaggagacgaaccctgtggtggaaacacatgattctgaggccagtcgccagaaatttaggcattttcaatatttaaaggtcagtggtcctcacgaagctctgtcccagctgtgggagctgtgcttgcagtggctaagaccagagatacataccaagaagcaaatcatagaactgctggtactggagcaattcctagctatcctgcccgaagaagtgaggacctgggtcaatctccagcatcctaacaattccaaagacatggtaacgctgatagaggatgtaattgaaatgctggaggacgaggacatgccatgcaaagactcggcactccagatgggctctatcaaagaaaagatgaaagctggctcgcggacaggaaaaccacaagagcccgtaacttttaaggacgtggtcgtggagttctcaaaagaagagtggggccagctagattctgcagtgaaaaacctgtacaggaatgtgatgctagaaaatttccggaacctcaattctttacgcaaggctcacctattgagcaagccattcgagtccctgaagttggagagcaaaaagaaacggtggatcatggagaaggagatacctcgtaaaacaatcttcgatatgaagtccatctccggcgaggagtcatcacacggagtcatcatgaccaggctgactgaatctgggcatccgagctccgacgcctggaaagacggggtgagtctgctgttacctagactggaatataatgatgctgtgagtgcccattgcaacctccatctatgggtccaagtgatcttactgccccaacctcccgaatag

SEQ ID NO: 212031 - DNA, 3147 bp, synthetic construct
  misc_feature 1..3147: note = Description of Artificial Sequence: Synthetic coding sequence
  source 1..3147: mol_type = other DNA
atgcagagcaaggtgaccggcaacatgcccacccagagcctgctgatgtacatggatgggcctgaagttatcggatccagtctgggaagtcccatggaaatggaagatgctctctccatgaagggcaccgccgttgtgccattcagagccacacaggaaaaaaatgttatccaaatcgaaggctacatgcctctggactgtatgttttgctcccagaccttcacacacagcgaggatcttaacaagcacgtgttgatgcagcacagacccacactgtgcgagcctgcggtgctccgggttgaagctgagtatctcagccccctggacaagtctcaggtgcggacggagccccccaaagagaagaactgcaaggaaaacgagttttcttgtgaagtgtgtggccagacattccgggtcgcattcgatgttgagattcatatgcggactcacaaggattcattcacgtatggctgcaatatgtgtgggcgccgatttaaggaaccatggtttctgaagaatcatatgagaacacataatggtaaaagcggggcgcggtcaaagctacaacagggactggaaagttctcctgccactattaatgaagtggtgcaagttcacgccgcggagtcgatctcaagtccatacaagatttgtatggtctgtggatttctctttcctaataaggagagtctgattgaacatcgcaaagtgcatactaagaagacagcattcggcacctcttctgcacagactgacagcccacagggcgggatgcccagcagcagagaggactttctgcaactatttaacttgcggcccaagagccaccccgaaactgggaagaaacccgtgcgctgtatacctcaactagatcccttcacaacttttcaggcatggcagctggcaaccaaaggaaaagtggccatctgccaggaggtgaaagaatctggacaggagggaagcactgataacgacgacagctcttcagagaaggaattgggggagactaacaaaggatcttgtgcggggctcagccaggaaaaggaaaagtgcaagcattcacatggagaggcaccctcagtggacgctgaccctaagttgccttcctccaaggaaaagcctactcactgcagcgagtgtgggaaggccttccgcacataccaccagctggtacttcattctagagtgcacaagaaagatcggcgggccggggctgaaagccccactatgagtgtggacgggcggcaacccggtacttgctcccccgacctggcagcaccccttgacgagaacggtgccgtagaccggggtgagggtggatctgaagatggttccgaagacgggctgcctgagggcatccatcttgataagaacgacgacggagggaagattaagcacctgacaagttcaagagaatgtagctattgcggtaagttttttcgcagtaactactatttaaacattcacctgcggacccacaccggggaaaagccatataaatgtgagttttgtgaatacgctgccgctcaaaaaacttccctccggtaccatttagagaggcaccataaggagaagcagacagatgtggccgcagaggttaaaaatgacggaaagaatcaggacaccgaggacgcccttctcacagccgactcggcccaaacgaaaaatctgaaacggttttttgatggggctaaggatgtcactggttctccccctgcgaaacagctaaaggagatgcccagtgtctttcagaatgtgctaggaagtgctgtgcttagcccagcccacaaggacacgcaggacttccataaaaatgccgccgacgattctgccgataaggtgaacaagaacccaacccccgcatacttggacctcctcaagaagagaagcgctgtcgagacacaggcaaacaatctcatttgcaggaccaaagccgatgttacacctcctcctgacgggtccacaactcacaacctcgaagtgtcgccaaaggaaaaacagacagaaacagcagcggactgccgatacagaccatcagttgattgccacgagaagcccttgaatctatccgtcggggccctgcacaattgtccagctatcagcctttccaaatctctaatcccatcaatcacctgccctttctgtacctttaaaactttctaccccgaggtactgatgatgcaccagcgactcgagcataagtacaatcctgacgtgcacaagaattgcagaaacaagtccctgctacggagtaggagaaccggttgccctccagcgctgttaggcaaggacgtgccacccctctctagcttctgtaagccaaaacctaaaagcgcttttcccgcccagagtaaatccctaccttcagctaagggaaagcagagcccacccggccccggtaaagccccccttacaagcggaattgacagttcaacactggctccctctaatctgaaatctcacagacctcagcagaatgtcggcgtccaaggcgctgccacacgccagcagcagagcgaaatgttcccgaaaacctccgtgagcccagcccctgacaaaacaaagcgcccagagacgaaactcaagcccctgccagtggccccttcccagcccactctcgggagtagtaatattaacgggtctatcgattatcctgccaagaatgattcaccctgggcaccccccggtagggattatttttgcaatagatccgcctctaatacagccgccgagtttggagaacctctgccaaaacgcctaaagtcaagcgttgtcgcattggatgtggatcagccaggagccaactacaggcgtgggtacgatctgcctaagtatcacatggtgcggggaattacatctttgctgccccaggactgcgtctaccctagccaggccctgccccctaagcccagatttctgtcctcctcggaagtggattcccccaacgtcctgaccgtccagaaaccctacggaggctcagggcccctctacacctgcgtgccagccggctcaccagcctccagtagcaccctggagggcaagaggccggtgagttatcagcacctaagcaattccatggcccaaaagcgaaactacgagaacttcatcgggaatgcccactaccgaccaaacgataaaaaaacttag

SEQ ID NO: 212032 - DNA, 3147 bp, synthetic construct
  misc_feature 1..3147: note = Description of Artificial Sequence: Synthetic coding sequence
  source 1..3147: mol_type = other DNA
atgcagagcaaggtgaccggcaacatgcccacccagagcctgctgatgtacatggatggccctgaggtcattgggagctccttaggctccccaatggagatggaggatgcgctttctatgaaggggacagccgtggtgccgttcagggccactcaggagaagaatgtgatccaaatagagggatacatgccactggattgcatgttttgttcacagacattcacacattccgaggacctgaacaaacatgtcctgatgcagcatcggccaaccttgtgtgaacccgccgtgctccgagttgaagccgagtatctcagtccactggacaagtcgcaggtccgcacagagccccctaaggagaagaactgtaaagaaaacgaattcagctgtgaagtgtgtggccaaacgttcagggtggcgtttgacgtcgagattcatatgcgtacccataaagactccttcacatatggttgcaacatgtgtgggagacgatttaaggagccgtggtttctcaagaatcacatgagaacgcataacgggaaatccggtgctcgctctaagctacagcaggggctggagagcagccctgctacaattaacgaagtagttcaagtccatgcagcagagagtatctctagtccctacaaaatttgcatggtgtgtggttttctgttcccaaacaaagaaagcctaattgagcatcgtaaggtgcacaccaaaaagactgcctttggcacatcgagcgctcaaacagactcaccacaagggggtatgcctagtagccgcgaggacttcctacagttgttcaatctaaggcccaagtcgcatccagaaacaggtaaaaaacccgtgagatgcatcccacaactggatccattcaccactttccaggcctggcagttggctacaaaaggcaaggtggccatctgccaggaggtgaaagagagtgggcaggaaggatctaccgacaatgacgactcttcaagtgagaaggagttgggtgaaaccaataagggttcctgtgcgggactgtcccaggaaaaagagaagtgcaagcactcgcatggcgaggctcctagcgtggacgctgatcctaagctccccagctctaaggagaaaccaacccactgttctgaatgtggcaaagcttttcgtacataccaccagctggtgctgcactcccgtgttcataagaaagatagacgggcaggcgctgaatcaccaactatgtctgttgacggtcgccagcctggtacgtgctcacccgatctcgcagctccgctcgatgagaatggcgctgtcgatcgaggagaagggggctccgaagacggatccgaggacggtctgcctgagggcatacatctggacaaaaatgacgacggaggaaagatcaagcacctgacttctagcagggagtgctcctactgcggcaaatttttccgttcaaactattatctgaacatccacttgaggacccataccggcgagaagccttacaaatgtgaattttgtgaatacgctgctgctcagaagactagtcttcggtaccatctggaacgccaccataaagagaaacaaacagatgtggcagcagaagtgaaaaatgacggaaagaatcaagatactgaggacgcactgctgacagcagactctgctcagactaagaacttaaagcgtttcttcgacggcgccaaggacgttacggggtcacccccggccaaacaattgaaagagatgcccagtgttttccagaacgtccttgggagcgctgtgcttagcccagcccataaagatacccaggactttcataaaaatgccgccgacgactccgctgataaggtgaacaaaaatcctactccggcatacctcgacctcctgaaaaagcgaagcgccgtagaaacgcaggctaacaacctgatatgtcggactaaggcagatgtaacaccgccacctgacggaagtacaacgcacaatcttgaggtgtcacccaaagagaaacagaccgaaactgctgctgattgtcggtatcgtccaagcgtagactgtcacgagaaacctctcaatttgagtgtcggagctctgcataactgccctgccatctcattgtctaaatccctgataccgtctatcacctgtccattctgtacatttaaaacattctaccccgaagtgctaatgatgcaccagcggctggagcataagtataaccctgatgtgcacaagaactgtcgcaataagagtctgcttagatcccgtcgcacaggctgtcctccagcgctgctggggaaagatgtgccacctttgtcgtctttctgtaaacccaaacccaaatcagccttccccgctcagagtaaatcccttcccagcgctaaaggcaagcagtctccgcccggtcctggaaaggcccctttaactagcggaatagattccagcactctggccccgtccaatctcaaaagtcatagacctcagcaaaatgtgggcgttcaaggagccgctacaaggcagcagcagagtgagatgtttcccaagacctcagttagtcctgcacccgacaagacaaaaagacccgagacaaagctcaagccgctgcctgtagccccatcccagcctaccctggggtcgagcaatattaacggcagcatcgactaccccgctaaaaatgacagtccttgggctccaccaggcagagattacttttgtaacagatctgcatccaacaccgccgctgaattcggggagccactgcctaaaagactaaagagcagcgtggtggctttagacgtcgaccagcctggggctaactaccgacggggctatgaccttccgaaatatcacatggtgcgagggatcacttccctgctgccacaggactgcgtatacccatcacaggccctcccgcccaagcctcgatttttgtcttcgtccgaagtcgacagcccaaatgtgcttactgtacaaaagccctatggcgggtctggccctctctacacctgtgtaccagccggatcccccgcttcctcatcaacgctggagggaaaacggccagtgtcctaccaacatctgtctaatagtatggctcaaaagcggaattacgagaacttcatagggaacgcccactatcggccaaatgataaaaaaacatag

SEQ ID NO: 212033 - DNA, 666 bp, synthetic construct
  misc_feature 1..666: note = Description of Artificial Sequence: Synthetic coding sequence
  source 1..666: mol_type = other DNA
atgttccccaagaccagcgtgagccccgcccccgacaagaccaagcggccagagaccaagttgaaacctctgcctgtggccccttcccagcccaccctgggttccagcaacattaatggctctatcgactaccctgccaaaaatgattctccttgggcaccgcctgggcgggattatttctgtaaccgcagcgcctccaacactgccgctgaatttggcgagccactacccaagagactgaagtcatcagtcgtcgcattggacgttgatcagcccggggcaaactaccggaggggatatgaccttcccaaatatcacatggtcagaggcattaccagccttctgccccaggactgtgtttacccaagtcaagcgctgcctccgaagccccggttcctcagctcatctgaggtggacagtccaaacgtccttaccgtacaaaagccctacggagggtctgggcctctgtacacttgtgtgccagcaggatcacctgcttcctcctccactctggaggggctgggaggatgccaatgcctgctgccaatgaaactgaactttaccagcagtttcgagaagcgaatggtgaaggccactgagatttcttgcgattgtaccgtccacaagacttacgaagagtcagccaggaacaccactgtcgtatag

SEQ ID NO: 212034 - DNA, 288 bp, synthetic construct
  misc_feature 1..288: note = Description of Artificial Sequence: Synthetic coding sequence
  source 1..288: mol_type = other DNA
atgcagagcaaggtgaccggcaacatgcccacccagagcctgctgatgtatatggatggcccggaagtcattggctccagtctcggttctcccatggagatggaggatgccctgagtatgaaaggcaccgctgtggtcccttttcgcgctacacaggagaagaacgtgatccagatagaagggtatatgccgctggattgcatgttttgttctcagacctttactcacagcgaggatttaaataagcacgtattgatgcagcaccgacctaccttatgcgagccctag

SEQ ID NO: 212035 - DNA, 2169 bp, synthetic construct
  misc_feature 1..2169: note = Description of Artificial Sequence: Synthetic coding sequence
  source 1..2169: mol_type = other DNA
atggagggcagccggccccgggcccccagcggccacctggccccctcccctccggccttcgacggggaactggatctgcaaaggtacagcaacggccctgccgtcagcgccggatcccttggaatgggcgccgtgtcctggtcagaatcacgcgcgggcgagagaagatttccctgcccagtttgcggcaaacggttcaggttcaattcaattctcgccctgcatctgcgtgcacatcctggcgcacaggcttttcagtgtcctcactgtggccacagagcagcccagcgcgcactgctgagatcccatttgcgaacacatcaacctgaacgcccaaggagccccgccgcccgactcctgcttgaactcgaagaaagggcgttgctgcgcgaggctcgattgggaagggcacggagttccgggggtatgcaggccacccccgcaacagaagggttggcccggccacaggccccctcttcctccgcttttaggtgcccctactgtaagggcaaatttaggactagcgcggagcgcgaaaggcacttgcacatcctgcaccggccctggaagtgcgggctgtgttctttcgggtccagccaggaggaggagttgctacaccatagcctgaccgcacatggagcacccgagcgcccgctggccgccacatcggcagcccccccacctcagcctcaacctcagccgcccccacaacctgagcccaggtctgtgcctcaacccgagccggagccagaaccagagcgagaagccactcctacccccgcacctgccgctcctgaagaacctccagcccctcctgaattccggtgtcaggtgtgcggccaatcttttacccagtcgtggttcctgaagggccacatgcgcaagcacaaagcttctttcgaccacgcatgccccgtgtgcggccggtgctttaaagaaccgtggttcttgaagaatcacatgaaagtccacgcctctaagttgggaccacttagggcccccggcccggcctccggtccagcccgtgcaccccaacccccagatttaggtctgctggcctatgagcccttgggccccgcacttctgctggctcctgctcctaccccagccgagcgccgtgagcccccctctctcttgggatatctctctctaagggccggggaagggcgaccaaatggcgagggagccgagcctggtccagggcggagttttggggggttccgccccttaagctccgcactaccagcacgtgctcggaggcaccgggctgaggagccagaggaagaggaggaggtcgttgaggccgaggaagagacttgggccaggggccggagcctggggtccttggcctctctccatcctaggcccggtgagggccccggacactctgccagtgctgcgggtgctcaggctaggagtaccgccacgcaggaggaaaacggcctgctcgtgggcgggaccaggccagagggcggccgaggagctaccggcaaagattgtccattctgcggaaaaagctttaggagcgcacatcatctgaaggttcatctgcgcgttcatacaggcgaaagaccttataaatgccctcattgtgattatgcaggtactcaatcaggttcactgaaataccacctccagagacaccatagagagcagagaagcggtgctggcccaggacctccaccagagccaccaccaccgagccagcgcggctcggccccccagtccggggccaaaccatctccacagcccgccacttgggttgagggggcaagttcaccccggccaccatccagcggagccggaccaggatcgaggcgaaagcctgcaagtcctggaagaacactgaggaacggccgaggaggagaggccgaaccactagatctgagtttgagagcaggccctgggggtgaggctggtcctggcggggccctccatcggtgcctgttttgcccatttgctactggcgccccagagcttatggctctacatctgcaggtacatcattcccgtagggcccggggacgccgccccccccaagctgacgcctcccccccctatgcccgggttccttccggtgaaactcctccttctcccagccaagagggggaggaagggtctgggcttagccgccccggcgaggctggtctgggcggtcaggagcggtag

SEQ ID NO: 212036 - DNA, 2169 bp, synthetic construct
  misc_feature 1..2169: note = Description of Artificial Sequence: Synthetic coding sequence
  source 1..2169: mol_type = other DNA
atggagggcagccggccccgggcccccagcggccacctggccccctctccgcccgcttttgatggcgaactcgatttgcaacgctactcaaatggtccagccgtgtccgccggctccttagggatgggagccgtctcttggtcagagagcagagccggggagcgtaggttcccttgtccagtctgcggaaaacgctttagatttaactccattctggcactgcaccttagggcacaccccggggctcaggcttttcaatgccctcactgtggacatcgagcagcccagagagctctccttcggtcacaccttagaacacaccagccagaacgacctaggagccccgccgccagattattattggaactggaggagagagcccttctgcgtgaagctagattgggccgcgcgcggagctccggcggaatgcaggccacccccgccacagagggactggctcgtccacaggcccctagcagctctgcattccggtgtccctactgtaaaggaaaatttcgcacaagcgcggaacgcgaacgccacctgcatatcctacatcggccctggaaatgcggcctgtgcagctttggaagctcccaggaggaagagctgcttcatcactccctaaccgcccatggtgcacctgaaaggccgctcgctgccacttctgccgccccccccccgcagcctcaaccccagccccctccgcagcctgagccccgcagcgtgccgcagccggaacctgagccagaacccgaacgtgaagccaccccgacaccagcccctgccgcacccgaggagccacccgcacctcctgaatttcggtgtcaggtgtgcggccagagctttactcagagctggtttcttaagggccacatgagaaagcacaaggcatcattcgaccatgcgtgcccagtgtgcggacgttgcttcaaagaaccctggttcttgaaaaatcatatgaaggtgcatgctagcaagctgggcccactccgcgcccccgggcccgcatccggtcccgcgcgggccccccagccccctgacctaggcctccttgcttacgaaccgcttggacccgcgttgttgctggcacctgcgcctacgcccgctgaacggcgggaaccccctagtttattgggctatctcagcctaagagcaggggaaggacgcccaaacggggaaggagcagagcctggccccggccggtccttcggtggattccggcccctcagctctgcccttcctgccagggcccgtaggcacagggctgaggaaccagaagaggaggaggaggtggttgaggctgaggaggagacatgggcaaggggaagaagtctgggctccttggcctcccttcaccctagacctggtgagggccctggtcatagcgcctccgccgctggtgcccaagcacgctccactgcaacccaggaagagaatggattgctggtcggaggcacaaggccggaaggcggacgaggggcgacaggtaaagattgtcccttctgtggcaagtcctttcgaagtgcacatcatcttaaagttcacctgagggtacatacaggcgaacgcccatacaagtgcccccactgtgattacgctgggacccagtcaggatccctgaaataccatcttcagcgccatcacagggaacagcgcagcggcgctggacctggcccaccacccgagcccccacccccgagccagaggggttctgctccacagtccggcgctaagccgagtccccagccagcaacctgggtggagggcgcctctagccctaggcccccaagctccggagctggccccggttctcggcgtaagccagcctcccccggtagaacattaaggaacggtcgggggggcgaagcggagcctctagacttatccctcagggcaggacccggtggtgaagccggcccgggtggggctctgcatcgatgtctcttctgtccgtttgctactggtgcgccagagctgatggccttgcatctccaggtgcaccactcacgcagagctaggggacggcgtcccccacaagcagacgccagccccccctacgcacgggttcccagcggcgaaacgccaccatcgcctagccaagagggcgaagaaggcagcgggttgtctagaccaggtgaggccggacttgggggacaagagcgatag

SEQ ID NO: 212037 - DNA, 2169 bp, synthetic construct
  misc_feature 1..2169: note = Description of Artificial Sequence: Synthetic coding sequence
  source 1..2169: mol_type = other DNA
atggagggcagccggccccgggcccccagcggccacctggcccccagtcctcctgcctttgatggggaattggacctgcagcgctactccaatggaccagctgtttctgctggttcgttgggaatgggggcggtctcatggtctgagagccgcgctggagagcggaggttcccttgccctgtctgcggcaagcgattcaggtttaattcaatcttggccctgcatctgagggcccatccgggggcccaggccttccagtgccctcactgcggacaccgagccgcccaacgggccctgcttagaagccacctcagaacccaccaacctgaaagaccacggagtccagctgccaggttgctgctggagcttgaagaaagggctctgctgcgcgaagctagactgggacgggctaggtcctcgggcggtatgcaagccacaccggcgacagagggcttggccaggcctcaagcccccagctcaagcgcatttaggtgtccttactgtaaaggaaaattcagaacttcggcagaaagggagaggcacctacatatcctgcataggccctggaaatgcggactgtgtagtttcgggtcctcccaggaggaggagctactacaccattcccttaccgctcatggtgctcctgagcggccgctggccgcaaccagcgccgctccccctccacagccacaacctcaacccccccctcagcccgagccccgctccgtccctcaaccagaacccgagccagagcccgagcgcgaggctacaccaacacccgcaccagccgcaccagaagagcctccggccccacctgagtttcgatgtcaggtctgcggacagagttttactcagtcttggttcctgaagggtcacatgaggaagcacaaggcttcattcgatcacgcatgccctgtgtgtggccggtgctttaaggaaccctggtttctaaagaatcacatgaaggtccatgcgtctaaacttggtcccctgcgcgcccccggtcccgcctctgggccagctcgagccccccagcctccagacctgggcctcctcgcctacgaaccattgggccctgccctgctcttagccccagcacccaccccagctgaaaggagagagccacccagtctgttgggctacttgtctctgagggccggcgagggacggcccaatggtgagggagcagagccagggcctggccggtcatttggtggattcaggcctctctcatccgctctgcctgcaagagccagacgacacagagccgaagagccagaagaggaggaagaggtcgtcgaagctgaagaagagacttgggcccgaggcaggtccctggggtccctggccagcctccaccctcgacccggcgagggacctggccattcggcgtccgcggccggcgcacaggccaggtccactgctactcaggaggagaacggattattagtgggaggcactagacctgagggaggtagaggagctacagggaaggattgcccgttctgcgggaagagttttaggtcagcccaccacctgaaggtccacttacgagtgcacacaggcgagaggccatataaatgcccccattgtgattatgcaggaactcagtctggatcactgaagtaccaccttcaacgtcatcacagggaacagcgttccggggcaggacctggcccacctccagagccacccccaccaagccagcgtggctccgcgccacagtccggcgccaaaccctcaccacaaccagctacctgggtggagggagcatcctcccccaggcccccttcaagtggagctggccctggaagcaggcgcaagccagcatccccagggcggaccctgcggaacggtagaggaggcgaggccgaaccactggacctctccctgagagccggccccggcggcgaggctggccctgggggggctctccacagatgcctgttctgcccattcgcaaccggcgcccctgaacttatggcactgcatctgcaggtgcaccatagccgccgagctagagggcggaggcccccacaggctgacgcctcgcctccttacgctcgagtgcccagcggcgaaactccccctagcccatcccaagagggcgaggaaggaagtggcttaagccgtcccggtgaggctggacttggaggtcaagaacggtag

SEQ ID NO: 212038 - DNA, 324 bp, synthetic construct
  misc_feature 1..324: note = Description of Artificial Sequence: Synthetic coding sequence
  source 1..324: mol_type = other DNA
atggagggcagccggccccgggcccccagcggccacctggcccccagccccccagctttcgatggggagcttgacctgcagcggtatagcaacggacccgccgttagtgcgggaagtttgggcatgggtgctgtctcatggtctgaatcacgggctggggaaaggcgctttccctgccccgtgtgtggcaagcgtttcaggtttaattccatactggccctgcatctgagggcgcaccctggggcgcaggcattccaatgcccacactgtggacatagagcagcccaaagggcattactccggtctcatctgcgcacgcattag

SEQ ID NO: 212039 - DNA, 636 bp, synthetic construct
  misc_feature 1..636: note = Description of Artificial Sequence: Synthetic coding sequence
  source 1..636: mol_type = other DNA
atggagggcagccggccccgggcccccagcggccacctggccccctcgcccccagcatttgacggggaactggacttacagagatactctaacggccctgccgtaagcgctgggtccctgggaatgggggcagtgtcatggtctgagtcacgggctggcgaacggcgattcccctgtcctgtatgtggcaaacgctttaggtttaatagcattctcgccctacatctgcgggcccaccctggggcacaagctttccagtgcccgcactgcggacatcgcgccgcgcaaagggcactcttgaggagtcacttgaggactcatcaacccgagcggccacggtcaccagcggcacgcctgttgctggaactggaggagcgtgcgttacttagagaagccagactggggagggcccgatcttctggcgggatgcaggcaacgcctgcaacggagggtctggctaggccccaggccccctcctccagcgcttttaggtgtccatattgtaaggggaagttccgcacctccgcggaaagagagcgccatctgcacattcttcatcggccatggaaatgcggcctgtgctcattcggaagctcacaggaggaggagctgttgcaccactccctgacagcctag

SEQ ID NO: 212040 - DNA, 96 bp, synthetic construct
  misc_feature 1..96: note = Description of Artificial Sequence: Synthetic coding sequence
  source 1..96: mol_type = other DNA
atggagggcagccggccccgggcccccagcggccacctggccccctctccaccagccttcgacggggagctggatttgcagaggtatagcaattag

SEQ ID NO: 212041 - DNA, 336 bp, synthetic construct
  misc_feature 1..336: note = Description of Artificial Sequence: Synthetic coding sequence
  source 1..336: mol_type = other DNA
atggagggcagccggccccgggcccccagcggccacctggccccctccccaccagcattcgacggagaattggatcttcagcgatactctaacggaccggccgtgagtgccggatccctgggtatgggcgcagtgagctggagcgagtctcgtgccggcgagaggaggtttccttgcccagtgtgtggcaaaagattcagatttaatagtattttggccctgcatctgagggctcaccccggagctcaagcctttcagtgccctcattgcggacatcgggccgctcagcgcgccctgttgagatcacatttaagaacccaccaacccgagcgctag

SEQ ID NO: 212042 - DNA, 675 bp, synthetic construct
  misc_feature 1..675: note = Description of Artificial Sequence: Synthetic coding sequence
  source 1..675: mol_type = other DNA
atgcggctggccaagcccaaggccggcatcagccggagcagcagccaggggaaggcttacgagaacaaaaggaaaaccgggagacaacggcaaaagtgggggatgactattagatttgattctagttttagccggctcagacgtagcctggatgacaaaccctacaagtgcaccgaatgtgaaaaaagcttctctcagagctccactcttttccagcaccagaagattcacacgggaaagaagagtcacaagtgtgctgattgcggaaaaagctttttccagtcttcaaatcttatccagcatcggcgtatccatactggagagaagccctacaaatgcgacgagtgcggggagagcttcaaacagtcctccaatctgatccagcaccagcggattcatactggggaaaagccctatcagtgcgacgaatgcggaaggtgttttagtcaatcaagccacctgattcagcatcaacgcacacacactggtgagaagccctaccagtgctctgaatgcgggaagtgcttctctcagtcgagtcaccttagacagcacatgaaggtgcacaaggaagagaaacctcgtaagactcggggtaaaaatatcagagttaaaacccacctgccctcttggaaagccggcactggccgtaaatccgtggcaggcctgagatag

SEQ ID NO: 212043 - DNA, 237 bp, synthetic construct
  misc_feature 1..237: note = Description of Artificial Sequence: Synthetic coding sequence
  source 1..237: mol_type = other DNA
atgaccaccttcaaggaggccatgaccttcaaggacgtggccgtggtctttactgaggaggaattgggcctgttagatctcgcacagcgaaagctttacagggacgtcatgttggaaaacttccggaatctcctatccgttggccatcaggcattccaccgtgataccttccattttctgcgagaagaaaagatctggatgatgaagactgcaatccagagagaagggaattcttag

SEQ ID NO: 212044 - DNA, 2124 bp, synthetic construct
  misc_feature 1..2124: note = Description of Artificial Sequence: Synthetic coding sequence
  source 1..2124: mol_type = other DNA
atgaccaccttcaaggaggccatgaccttcaaggacgtggccgtggtcttcactgaggaggagttaggactgttagacctcgcccagcgcaagctgtatcgggatgttatgttagagaatttccgcaacctgctgagtgtcggacatcaggccttccacagagacacattccatttccttagagaagagaagatctggatgatgaagacagccattcagcgtgaggggaactccggagacaaaatccaaaccgaaatggaaacagtgagtgaggcgggcacacatcaggagtggtcctttcaacagatctgggagaaaatcgccagtgatctgacacgctcacaggatctcatgatcaactcatcccaattttctaaagagggtgatttcccatgccaaactgaggccggcctgtctgtcattcacaccaggcagaagtcatcccaggggaacggatacaaaccttcattctcagacgtttcccattttgactttcaccaacagttgcacagtggcgagaagagtcacacttgcgacgagtgcggcaagaacttttgctatatttccgctctaaggatccaccagagagtgcatatgggagagaaatgctataaatgcgacgtgtgcggcaaagaattttcccagtcgtcgcacctccagactcaccaaagagtacatactggcgagaagccttttaaatgcgtggaatgtgggaaaggcttttcgagaagatcagccctaaacgttcaccataaactccacacaggggaaaagccttataattgtgaggaatgcggcaaggcttttatccacgacagtcagctgcaggagcaccaacggatccatacgggggaaaagccttttaaatgcgacatctgcggcaagtctttctgtggcaggtcccggctcaacagacatagcatggtccataccgccgagaaaccttttaggtgtgacacatgcgacaagtcctttagacagcgcagcgccctgaattcacaccgcatgatccataccggggagaagccctacaagtgtgaggaatgcggaaaaggctttatatgccgacgcgacctctatacccatcatatggtgcacaccggagaaaagccgtataattgtaaggagtgcggaaagtcctttcgttgggcctcttgcctcttgaagcaccagcgggttcactcgggcgaaaaaccttttaagtgtgaagaatgtggtaagggtttttacaccaatagtcaatgttattcacaccaaaggagtcattcgggagagaaaccttataagtgcgtggaatgcggcaaaggctataaaagaagactggacctcgatttccatcagcgggtgcacactggggagaaactgtataattgcaaagaatgtggaaagagtttctcaagagcaccctgtctgctgaaacatgaacgcctgcacagcggggagaagccattccaatgcgaggagtgcgggaagagattcacacaaaattctcaccttcattctcaccagagagttcacacgggtgagaaaccctacaagtgtgagaaatgcggtaagggctacaattctaaattcaatttagatatgcatcaaaaggtacataccggagaaagaccatataattgcaaggaatgcggcaagagctttggctgggcttcatgcctgttgaaacaccagcgtctgcatagcggcgaaaaacctttcaagtgcgaagaatgcggaaagcggtttacacaaaactcccagcttcacagccatcagcgggtgcatactggggagaagccctacaagtgtgacgagtgcgggaaagggttctcctggagctccactagactcacacaccagcgtaggcatagtcgcgagacaccattgaagtgcgagcagcatggaaagaatattgtgcagaattcgtttagcaaggtgcaggagaaagtgcactcggtagaaaagccctacaagtgtgaggactgcggcaaggggtacaaccgtcggctgaacctcgatatgcaccagagggtgcacatgggggagaagacctggaaatgccgggagtgcgacatgtgcttcagccaagcatcctccctccggcttcaccagaatgtccacgtgggcgaaaaaccctag

SEQ ID NO: 212045 - DNA, 1932 bp, synthetic construct
  misc_feature 1..1932: note = Description of Artificial Sequence: Synthetic coding sequence
  source 1..1932: mol_type = other DNA
atgctggagaactacggcaacgtggccagcctgggcttccccctgttgaaacccgcggtgatatcgcagttggagggcggaagtgagctgggcggtagctctccacttgcggcgggcaccggcttacagggactgcagacagacatccagactgacaacgatctcaccaaagagatgtacgaagggaaagagaacgttagtttcgaactccagagagattttagccaggaaacagacttttcggaagcgtcactgctggagaaacaacaagaggtgcactcggctggaaacatcaaaaaggagaagtcgaacactatcgatggtacggtgaaagacgagaccagccccgtcgaggaatgttttttcagccagtcaagcaatagttaccaatgtcatacgatcaccggggagcagccatccgggtgcaccgggctcggaaagtctatatcctttgacaccaagttggttaaacatgagattataaacagtgaggagcgaccgttcaagtgcgaggaactggttgagccctttagatgtgattctcagttaattcagcaccaggagaataacactgaagaaaagccctaccagtgctctgaatgtggcaaggccttttctatcaacgagaaactgatatggcatcagcgcctgcattcgggcgaaaaaccttttaagtgcgtggaatgtggtaagagcttttcttactcctcacactatattacccaccagaccatccacagcggcgagaagccctatcagtgtaagatgtgtggtaaggcctttagcgtcaacggctcattgtctcgccaccagaggatccacaccggtgagaagccctatcagtgcaaagagtgcggaaatggattctcttgttcaagtgcttacataacacatcagcgggtgcacacaggtgagaaaccctacgagtgcaatgattgtgggaaggccttcaacgtgaacgccaagctaattcagcaccagaggatacacactggcgagaagccatatgaatgtaacgagtgtggcaagggctttcggtgcagctctcaattaaggcaacaccagagcatacacactggcgagaagccatatcagtgtaaggagtgcggtaagggcttcaacaacaatacaaaattaattcagcaccaaagaatccacaccggtgagaagccctatgaatgtacagaatgtggaaaggctttttctgtgaagggcaaactgatccaacaccagaggatccatacgggggaaaagccttatgaatgcaacgaatgcggcaaggctttcagatgcaattctcagttcagacagcacttgcgaattcacactggggagaagccctatgagtgcaatgaatgcggaaaagccttttccgtcaatggcaagctcatgcggcatcagaggatacatacgggagagaagccattcgagtgtaatgaatgcgggagatgctttaccagcaagaggaatctcctcgaccaccaccggatccacactggcgagaaaccgtatcagtgcaaggagtgtggcaaggctttttccattaatgctaagctgacacggcaccaacgaattcatacaggagagaagcccttcaagtgtatggagtgtgagaaagccttttcttgtagttcaaattacatagtgcaccaacggatccacaccggggagaaaccctttcagtgtaaagaatgtggaaaggcattccacgtaaatgcccaccttatcaggcaccagcgatctcataccggggagaagcccttcagatgtgtagaatgcgggaaggggttcagcttttctagtgattatatcattcaccagaccgtgcatacttggaaaaaaccctacatgtgcagcgtctgcggaaaagcatttaggttttctttccagctgagccagcaccagtccgtacattctgaagggaaaagttag

SEQ ID NO: 212046 - DNA, 1248 bp, synthetic construct
  misc_feature 1..1248: note = Description of Artificial Sequence: Synthetic coding sequence
  source 1..1248: mol_type = other DNA
tgcggcaaggccttcagcatcaacgagaagctgatctggcaccagcggcttcacagcggggagaagcctttcaagtgtgtggagtgtgggaagtcctttagttactcctcccattacataacccaccagacaattcatagcggcgaaaagccctatcaatgtaagatgtgtggcaaggccttcagtgtgaacggctccctgagtcgacaccagcgcatccatacaggcgagaaaccctatcagtgcaaggagtgcggaaacggattctcgtgctctagcgcttatattacccatcagcgagtccatactggggagaagccttacgagtgtaatgactgcggtaaagccttcaatgtaaacgctaaactcattcagcaccagcgaatacacaccggcgaaaaaccatatgagtgtaatgaatgcggcaaagggttccgatgcagctcccaattgagacagcaccaaagcatccatacaggggaaaagccttaccagtgtaaggagtgtggtaagggcttcaacaataatacaaaactcattcagcaccagaggatacatactggagagaaaccttacgagtgcaatgagtgcggcaaggcatttagatgcaattcacaatttcgccagcacctcagaattcacaccggagaaaaaccctacgaatgcaacgaatgcgggaaagcattttcagttaacggaaaactgatgagacatcagcgaatacacacaggcgagaaaccattcgaatgcaacgagtgcgggcgctgtttcacctctaaaagaaacttattggaccatcaccgaattcataccggtgagaaaccttatcaatgcaaggagtgcggaaaagcgttttctattaacgccaagttgaccagacaccagcgcattcataccggcgaaaagcctttcaagtgcatggagtgcgagaaagctttcagctgcagctcaaattatattgttcaccaacggatccacaccggagagaagccatttcagtgcaaagagtgtggaaaagctttccacgtcaatgcgcacttgattcgccatcagcgttcccacacaggggagaaacccttccggtgtgttgagtgtggcaagggcttcagtttttcttcagactatataattcaccagacagttcacacttggaagaaaccttacatgtgtagtgtgtgtggaaaggcattcagattctcgttccagctctcacagcaccagtcagttcatagtgaggggaagtcttag

SEQ ID NO: 212047 - DNA, 1932 bp, synthetic construct
  misc_feature 1..1932: note = Description of Artificial Sequence: Synthetic coding sequence
  source 1..1932: mol_type = other DNA
atgctggagaactacggcaacgtggccagcctgggcttccccctgctgaagcctgcagtgatctcccagctggaagggggcagtgaactcggtgggagttcacctttggccgctggaaccgggcttcagggccttcagaccgacattcagactgataatgaccttaccaaagagatgtacgaaggcaaagaaaacgtaagcttcgagctgcagcgggatttttcgcaagagaccgacttcagtgaagcatctctcctggaaaagcagcaggaggttcactccgcggggaacattaaaaaggagaaatcaaatactatcgacggcacggtgaaggatgaaacctcacctgtggaggaatgcttctttagccagagctccaattcatatcaatgccacaccatcacaggcgaacagccttcaggctgcacgggcctgggcaagtctatctcttttgatactaagcttgtcaagcacgagatcatcaatagcgaagagcgaccctttaaatgtgaagagttggtggaacccttccgatgtgattcacagctcatacagcaccaggagaacaatacggaagaaaagccgtaccagtgtagcgaatgtggcaaggccttctcgattaatgagaagctcatatggcaccaaagactgcacagtggcgagaagcctttcaaatgtgtggaatgtggaaagtctttctcctactcatcccactacatcacccatcagacaatacattccggcgaaaaaccctaccagtgtaaaatgtgtggcaaggctttttccgtgaatggctctttgtcacgacatcaacgcatccatacaggggagaagccataccagtgtaaagaatgcggcaatggttttagttgcagttcagcttatattactcaccaacgagtgcacaccggcgaaaagccgtacgaatgtaatgattgtggtaaggctttcaatgtgaacgccaaactcattcaacaccagagaatccacacaggagagaaaccctatgaatgtaatgagtgcggaaaggggtttcggtgttcatcgcagttgagacaacaccagagtattcacacgggggaaaagccatatcaatgcaaggagtgtggaaagggcttcaacaacaataccaagctgattcagcaccagcgcattcacacaggcgagaaaccatatgagtgtaccgagtgcggcaaagcctttagcgtcaaaggaaagctgattcagcatcagagaattcatactggtgagaagccctacgagtgtaacgagtgcggcaaggccttccggtgtaatagccaattcagacaacacctacgcatccacacaggcgaaaaaccttacgagtgtaacgagtgcggcaaagctttttctgtgaatggaaagctgatgcgccaccaaaggatccataccggggagaagccgttcgagtgcaacgagtgcggacgctgcttcaccagtaagaggaatctgctcgaccatcatcggattcataccggcgagaaaccctaccaatgtaaggagtgcgggaaagcgttcagtatcaacgcaaaactcactcggcaccagcgtattcacaccggcgagaagcccttcaagtgcatggaatgtgagaaagcgttttcttgctcctcaaattacattgtgcaccagcgaatccatactggcgaaaaaccgttccaatgcaaggaatgcgggaaagcctttcacgtgaatgctcatctgatcagacaccaacgctcacacaccggggagaaaccctttaggtgtgtggagtgtggcaaggggttctcattctcaagcgactacatcattcatcagacggttcatacttggaaaaagccctatatgtgttctgtctgtggcaaagcattcaggttctcattccagcttagccagcaccagtcagtgcactctgaggggaagtcctag

SEQ ID NO: 212048 - DNA, 1932 bp, synthetic construct
  misc_feature 1..1932: note = Description of Artificial Sequence: Synthetic coding sequence
  source 1..1932: mol_type = other DNA
atgctggagaactacggcaacgtggccagcctgggcttccccctgttaaaacctgcggtgatcagtcagttggaggggggcagcgaactgggtggttcttctcctctggctgccggcacaggcttgcagggcctgcagacagacattcagacggacaacgaccttacgaaggaaatgtacgagggtaaggagaatgtatcgtttgagctgcagcgcgactttagtcaagagaccgacttctcagaggctagcctgcttgagaagcagcaggaagtgcattccgcgggaaacattaagaaagagaagtccaacacgatcgatggcacagtgaaggatgaaacctcccccgtagaggagtgtttcttctctcagagttccaattcttatcagtgtcatactataacaggtgagcaaccgagtggttgtacgggtttgggcaaatcgatcagctttgatactaagctggtgaagcacgagattatcaactcagaggagcggccgtttaaatgtgaagagctcgtcgagccctttaggtgcgacagccaactgatccagcaccaagaaaataataccgaggaaaaaccttatcagtgctccgagtgcgggaaagccttcagcataaacgagaagctgatctggcaccagaggttacactctggcgagaagcctttcaagtgcgtcgagtgcggaaagagtttttcctactccagccactacataacacatcagacgattcattctggtgagaaaccatatcagtgtaaaatgtgtggtaaggccttttctgtaaacggctctctgtctcgccaccagcgcatccatacaggtgagaagccctaccagtgtaaggagtgtggcaacggttttagctgctcctcagcatacattacgcaccagagagtgcacactggggaaaagccatacgagtgcaatgattgtggcaaggcctttaacgttaacgccaaactgatacaacatcagagaatacacactggcgaaaagccctacgaatgcaacgagtgtgggaagggtttccgatgcagtagccaactgaggcagcaccagagtatccataccggagaaaaaccttatcagtgtaaggaatgtggtaagggctttaacaataatactaagctgatccaacaccagaggatacacacaggagagaaaccctacgaatgtacggaatgcggcaaagctttcagcgtgaagggaaaactgattcagcatcagaggatccacactggtgaaaaaccatacgagtgcaacgagtgtggcaaggccttcagatgtaattcacaattcaggcagcacctcagaattcataccggtgagaaaccctatgagtgcaacgagtgtgggaaggccttcagtgtgaacggtaagttgatgcgccatcagcggatccataccggcgaaaagccatttgagtgcaacgagtgtggacggtgctttacaagcaaaagaaatctgctggatcaccaccggattcatactggcgaaaaaccctaccagtgtaaagagtgtggcaaggccttttccattaatgcaaaattgaccaggcaccagcgcatccacacaggcgagaaaccattcaagtgtatggagtgtgagaaagctttcagttgttccagcaactacatcgtgcaccagaggatacacaccggcgaaaaaccattccagtgcaaagagtgcggaaaggcatttcatgtgaacgcccatttgatccggcaccagagaagccataccggtgaaaagccgtttcgatgtgtggagtgtggtaaaggattttccttctccagtgattatatcattcaccaaactgtgcacacctggaaaaaaccgtatatgtgttcagtctgtggcaaggctttccgattcagtttccaattatcccagcaccaatctgtgcacagcgagggcaaaagctag

SEQ ID NO: 212049 - DNA, 1758 bp, synthetic construct
  misc_feature 1..1758: note = Description of Artificial Sequence: Synthetic coding sequence
  source 1..1758: mol_type = other DNA
atgtacgagggcaaggagaacgtgagcttcgagctgcagcgggacttctctcaggaaacagacttttccgaggcctcacttctggagaagcaacaagaggtgcattccgcgggtaatatcaagaaggagaaatccaataccatcgatgggacggtgaaagatgagacatcaccggtggaagagtgcttttttagccagagctctaatagttaccagtgccacacgataacaggtgaacagcccagtggatgcaccgggttggggaagtctatcagctttgatactaagcttgtcaagcatgagattataaattctgaagagaggccattcaagtgcgaagaactggttgagccctttagatgcgattctcagctgatccagcatcaagaaaataacacagaggagaaaccataccaatgcagtgaatgcggcaaagccttcagtatcaatgaaaaacttatctggcaccagcgcctccattccggcgagaaacctttcaagtgcgtggaatgcggaaaatctttctcttactctagtcactacattacacaccagactattcactctggcgagaagccatatcagtgcaagatgtgtggaaaagccttttcggtcaacgggagtctctctcgtcaccagcgcatccacacgggggaaaaaccatatcaatgcaaggagtgcggcaatggatttagctgcagcagcgcctatatcactcaccaacgtgtgcacactggcgaaaagccctatgaatgtaatgattgtgggaaagctttcaatgtaaacgctaagctgattcaacaccaacgaattcacacaggcgaaaaaccatacgaatgtaatgaatgcgggaaaggttttaggtgctccagccagctgcgccagcatcagagcatccatacaggcgagaaaccataccagtgcaaggagtgtggtaaagggttcaataacaacacaaaattgatccagcaccagcgcattcacacaggagaaaagccatacgagtgcacggagtgtggaaaggcattcagtgtgaagggaaagctgatacaacaccagaggatccatacaggtgagaaaccatatgaatgcaatgaatgcgggaaagcctttcgctgcaacagccagtttcgccagcacctgcggattcacactggcgagaaaccatacgaatgcaatgagtgtggcaaggccttttctgtgaacggaaagcttatgcgccaccagcggatccatactggcgagaaacccttcgagtgtaatgagtgcggccgatgtttcacatccaaaaggaacctgttagatcatcatcgcatccatactggagaaaaaccttaccagtgtaaggaatgcggcaaggctttctcaatcaatgccaaactgactagacaccagcggatccataccggtgagaagccctttaaatgcatggaatgcgaaaaagcgttttcttgcagctccaactatatcgtgcaccagaggattcacaccggagagaagcccttccagtgtaaggagtgtgggaaagccttccacgtcaatgctcacttgattaggcatcagcgcagtcacacaggcgagaagcccttcaggtgcgtggaatgcgggaaggggttctccttcagctccgactatattattcatcagaccgtgcatacttggaagaaaccatatatgtgttccgtttgcggaaaagcctttcgcttctcattccaactctctcagcatcagtctgtgcactcagaaggaaagtcatag

SEQ ID NO: 212050 - DNA, 1758 bp, synthetic construct
  misc_feature 1..1758: note = Description of Artificial Sequence: Synthetic coding sequence
  source 1..1758: mol_type = other DNA
atgtacgagggcaaggagaacgtgagcttcgagctgcagcgggactttagtcaagagacggacttttcggaagcaagcctgttagagaagcagcaggaagtacatagtgccggcaatattaagaaggaaaagtccaatacgatcgacggcactgttaaagacgagacctcgcctgtggaggaatgcttcttctcgcagagcagcaactcttaccaatgccacacaatcactggcgaacaaccttcgggatgtacaggcctgggcaagtcaatcagtttcgacaccaagctggtcaagcacgaaatcatcaatagcgaggagagaccatttaagtgtgaggagctcgtcgagcctttcagatgtgactcccaattaattcaacaccaggaaaacaacaccgaggaaaagccttaccagtgtagcgaatgcgggaaagcattttcaattaacgaaaagctgatttggcaccagagactacattctggagagaagccattcaaatgtgtagagtgcgggaagtctttttcctattctagtcactatattacgcaccagacaattcattcgggtgagaaaccctatcagtgcaaaatgtgcggcaaagccttcagcgtgaatggctccctgtcccggcatcagcgcatccacaccggcgagaagccatatcaatgtaaggagtgtggcaacgggtttagctgctccagcgcctatatcacccatcagagggtgcatacaggtgagaagccatacgaatgtaacgactgtggaaaagccttcaatgtgaacgccaagctgatccagcaccaaagaatccacaccggagaaaaaccctacgaatgcaatgagtgcgggaagggatttagatgctccagtcaactcaggcagcaccagagcatacataccggagagaagccttaccagtgcaaggagtgtggaaaaggattcaacaacaacaccaagctcatccagcaccagagaatccacaccggcgagaagccgtacgagtgtactgaatgcggcaaagcattttctgtgaaaggcaaacttatccagcatcaacgaatccacaccggcgaaaagccttacgagtgcaacgagtgcgggaaagccttccgctgcaattctcaatttcggcaacacctgcgcatacacaccggcgaaaaaccgtatgaatgcaacgagtgcggtaaggccttttccgtcaacggaaaactaatgagacatcagcgcatacatacaggggagaagccatttgaatgcaacgaatgcggccgttgttttactagcaaacgaaacttactggaccaccatcgcattcacaccggcgagaagccttatcagtgtaaggagtgcgggaaagctttcagtatcaacgcaaaactgacgcgtcaccagcgcatccatactggagagaaaccattcaagtgcatggaatgcgagaaggctttttcatgttctagcaattatattgtccatcagcgaattcataccggtgaaaagccctttcagtgcaaggagtgtggcaaggccttccacgtaaacgcacacttgatccgacatcaaagatcccatacaggggagaagccatttagatgcgtggagtgtgggaaaggattctcttttagtagcgattatatcattcaccagactgtgcatacttggaaaaagccttacatgtgctctgtatgtgggaaggccttccggtttagcttccaactcagtcaacatcagtctgttcattctgaagggaagagttag

SEQ ID NO: 212051 - DNA, 5538 bp, synthetic construct
  misc_feature 1..5538: note = Description of Artificial Sequence: Synthetic coding sequence
  source 1..5538: mol_type = other DNA
atgggcctgtgcggcctgctggagcggtgctggctgcaccacgaccctgatggagtcctgaccctcaacgccgagaatacaaactatgcttatcaagtgcccaatttccacaagtgtgagatctgtctgctgtcctttcccaaagaatcacaatttcaacgacacatgcgtgaccatgaacgcaatgacaagcctcaccgatgtgaccagtgcccacagaccttcaatgtggaattcaatttaaccctgcacaaatgcactcactctggcgaggatccgacatgccctgtgtgtaacaaaaagttttcacgcgtcgctagtttgaaggcacacatcatgctgcatgaaaaggaggagaacctcatctgtagcgagtgcggagacgaattcaccctgcagagccagctggccgtgcacatggaggagcacagacaggagctggccggcactcgacagcatgcatgcaaggcctgcaagaaagaattcgaaactagctcagagctgaaggaacatatgaaaacacactacaagattcgcgtctcctctacacgctcttataatcggaatattgatagaagcggttttacttactcatgcccacactgcggcaaaaccttccagaaacccagtcagctcacccgacacattcgcattcacacaggcgagcgcccatttaagtgctccgaatgtggcaaggctttcaatcagaaaggcgctctgcagacacatatgatcaaacacacaggcgagaaaccacatgcgtgcgcgttttgccctgcagcgttttctcagaaggggaatctccagtcccatgtccagagagtgcatagcgaggttaagaatggccccacatataattgtaccgaatgttcatgcgtattcaaaagtctggggtctctgaacactcacataagcaaaatgcacatgggagggcctcagaattccacctcctctaccgagactgctcatgtcttgacggctacacttttccaaaccttaccactccagcagactgaagcccaggccacttccgccagctctcagcccagttcccaggccgtgtcagacgttattcagcagctcctggaactaagcgaaccggcgcctgtggaaagcggccagagtccccagcctgggcagcaactgtctataaccgtagggataaaccaggacattctgcaacaagctttagagaactctggcttgtcgagcattcccgccgccgcacacccgaatgacagctgccacgcaaaaacgagcgccccacacgctcagaatcccgacgtctcttccgtgtccaacgaacagacagatcctacggatgccgagcaggaaaaggaacaggaatcaccagagaagctggataaaaaggaaaagaagatgatcaagaagaaaagcccttttctccccggttccatccgggaagagaacggggtcaggtggcacgtgtgcccatattgcgccaaagagttccgcaaacctagcgatttggtgcgacacattagaatacatacccatgaaaagccctttaaatgtcctcagtgctttagagccttcgctgtgaagtctaccctcaccgcacacattaagacacatacaggaatcaaggcctttaagtgtcaatactgcatgaaaagctttagtacctccgggagtttgaaagtgcatattcggctacacacgggcgtaagaccttttgcatgcccccactgcgataagaaattccgaacctcagggcacagaaagacacacatcgcttcccattttaaacatactgagttgcgtaagatgaggcatcaacgcaaaccagctaaggttcgcgtggggaagacaaacattccagtgcctgacatacccctccaagagcctatccttattaccgacctgggattgattcaacctatccctaaaaatcagttcttccaatcctatttcaacaacaacttcgtcaatgaggcagataggccttacaagtgcttctactgtcatagagcttataaaaagagttgccaccttaagcagcacattagatcccatacaggtgaaaagccgttcaaatgcagtcaatgtgggaggggattcgtgagcgcaggagtcttgaaagcgcatataagaacccatactggtctcaaaagtttcaagtgcctgatatgtaatggggcctttacaactggtggtagcttaagaaggcacatgggaatccacaatgatctcaggccctatatgtgcccatattgccaaaaaacatttaagacttctcttaattgtaagaagcatatgaaaacccaccggtacgagctagctcagcagcttcagcaacatcagcaagcagccagcattgacgatagcacagttgaccagcagagcatgcaggcttcaacgcagatgcaagtggagatcgagagtgatgagctcccccagacggccgaggtcgtggcagccaatcccgaggccatgttggatctagaacctcagcacgttgtcggaactgaagaagctggccttggccagcagctagctgaccagcccttagaagccgatgaagacggtttcgtagctccacaggacccactacgcgggcacgtggaccagttcgaagaacagtcccctgcccaacagtcctttgagcccgctggccttccccagggcttcacggtgaccgacacttaccatcaacagccacaattccctcctgtccaacagttacaggatagttcaacgcttgagagccaggctctgtccacaagttttcatcagcagtctcttctgcaggcacccagctctgacgggatgaatgtcactactaggcttattcaggagagtagccaggaggagctggacctgcaggcccagggaagccaattcctggaggacaatgaagaccagtcgagaagaagctaccgttgcgattactgtaataaaggcttcaagaagagtagccacctgaagcagcatgtaaggtcccacactggggagaaaccctataaatgcaagttgtgcggaagggggtttgtttcaagcggagtcctgaaaagtcatgaaaagactcacacgggtgtcaaggcctttagttgcagtgtttgtaatgcatcttttaccaccaacgggtcacttaccagacacatggccacccacatgtctatgaagccatataagtgcccattttgcgaagagggattccggacgaccgtccattgtaagaaacatatgaagaggcaccaaactgtacctagcgccgtcagcgcaacaggggagactgaaggcggggacatatgcatggaggaggaggaagagcacagtgaccgaaatgctagtagaaagtcaaggcccgaggtgatcacattcacagaagaggaaaccgcccagttggcgaagatcaggccacaggagtcagcaactgtcagcgaaaaggtactggtccagtccgcagccgagaaggacagaatctccgagctcagggataagcaggctgagttgcaggacgagcccaagcacgccaactgttgcacctattgtccaaagtccttcaagaaaccgtccgacctggttcgtcatgtccgtattcataccggagaaaagccctataaatgtgacgaatgcggcaagtcattcaccgtcaagtctacactggattgccacgtcaagactcacactgggcagaaactcttcagttgccacgtgtgcagcaacgcattttccactaaaggatcccttaaagtccatatgcggctccacactggcgctaagccatttaagtgtcctcattgcgagttacgattcaggacttcgggccgccgaaagacccatatgcagttccactacaagcccgacccgaaaaaggcacgcaagccaatgactcgaagttcttcagagggtctccagccggttaacttgctcaattcctcttcaacagatcctaacgtgttcatcatgaacaatagcgtactcacgggacagtttgatcagaatctgctgcaacctggacttgttgggcaggccatcctgcctgcgtctgtaagtgccgggggcgacctgaccgtgagcctcactgacggaagcttggccaccctagagggaatacaattacagctggcagcaaatctcgtcgggcctaatgtccagatttccggaattgatgctgccagcatcaacaacataaccctgcaaatcgaccctagtattttgcaacagacgctccaacaaggtaacttgctcgcacagcaactcaccggtgagcctggtctggctccacagaactcctcgcttcagacaagtgactccactgttccagccagtgtagtgatccaacctatctccggtttatctctgcagcccactgtaacaagcgcaaacctaacaataggacccttgtccgagcaggatagtgttctgacaactaacagctctggcactcaggatctgactcaggtgatgacatctcaggggttggtcagcccttccgggggccctcatgagatcacattaactataaataatagcagtttgagccaggtgctcgctcaggcagcaggacctaccgctaccagctcatcagggtcgccacaggagatcaccctgaccatcagtgagctgaatactacatctggcagtctgcctagcactactcccatgtctccttcagccattagtacgcagaacttggttatgtcttcatcaggtgtgggcggtgacgctagtgtcacactgacacttgccgatacccaaggaatgctttcagggggactggacacagtgacactcaacattaccagccaaggacaacaattccctgccctgctgactgatcctagcctgtcgggccagggcggtgcaggttccccccaggttatccttgtctcccacactccacagagcgcaagtgccgcgtgcgaggagattgcctatcaggtggctggcgtgagtggcaatttggcacctggtaaccaacctgaaaaagaaggacgggcccaccagtgcctcgagtgcgaccgcgccttctcttccgctgctgtgctcatgcatcactctaaggaagtgcacggccgtgaacgcattcatggttgccctgtttgccggaaggcctttaaaagagcgacccacctgaaagagcacatgcaaacccatcaggctggcccctcattgtcctctcagaaaccccgagttttcaaatgcgacacctgcgaaaaagccttcgctaagccctctcagctcgaacgtcatagccgaatccataccggtgaaaggcccttccattgcacactatgtgagaaggcttttaaccaaaagagcgcactccaagtgcacatgaaaaaacacactggggaacgcccgtataaatgtgcctactgtgtgatgggatttacacaaaagtctaatatgaagcttcatatgaagcgggctcattcctatgccggcgcgctccaggagtcggctggacatcccgagcaagacggcgaggagctgagccgcacgttacatttagaggaagtagtccaagaagcggctggggagtggcaggcgctgacacatgtcttctag

SEQ ID NO: 212052 - DNA, 4677 bp, synthetic construct
  misc_feature 1..4677: note = Description of Artificial Sequence: Synthetic coding sequence
  source 1..4677: mol_type = other DNA
atgggcctgtgcggcctgctggagcggtgctggctgcaccacgacccagacggggtcctgacacttaacgccgaaaatacaaattatgcctatcaagtaccaaactttcacaagtgcgaaatttgcctgttaagcttccctaaggagagccagttccaaagacacatgcgtgatcacgagagaaatgataaaccacacagatgcgaccaatgtccccagaccttcaatgtggagtttaaccttactctgcataagtgcacccatagcggggaggatccgacctgtcccgtatgcaataagaagttctctcgcgtagcaagcctgaaggcacatatcatgctgcatgagaaagaggaaaatttaatttgttctgaatgtggcgatgagttcacgctccaatcccagctggccgtccacatggaagagcatagacaggagctcgccggcacgaggcagcatgcctgtaaggcatgtaagaaggagttcgagacttcttccgaactgaaggaacatatgaaaacgcactacaagataagggtgtcatctactcggagttacaatcgaaatattgaccggtctggctttacatattcatgtccacactgtgggaaaacttttcagaaaccctcacagcttacacggcatattcggatccacaccggcgaacggcctttcaaatgctccgaatgtggcaaggcgttcaaccagaagggggccctccagacgcacatgattaagcacacaggagaaaaaccccatgcctgtgctttctgtccggcagcattcagtcagaagggcaacctgcagagtcacgtgcagcgggtccacagtgaggtcaaaaacgggccaacttataactgcactgagtgttcttgtgtctttaagagtctgggctctcttaacacgcatataagcaagatgcacatgggaggcccccagaactctaccagctccacggagaccgcacatgtgttaaccgctactttattccaaacactgcccctgcaacaaacagaagctcaagcaacttccgcctcaagtcagccctcctcccaagccgtcagcgacgtgatccaacagctgctcgagctcagcgagcccgcacccgtggagtcgggacaatctccacagccaggtcaacagcttagcattacagtgggaatcaaccaggacattttgcagcaggccctggagaatagcggactgtctagcattcccgcagccgcacacccaaatgacagctgccatgctaaaacctcagccccacatgcccagaacccggacgtgagcagcgtctccaacgagcagaccgaccccactgatgctgaacaggagaaggagcaagaatcccccgagaaactggataaaaaggaaaagaagatgattaagaagaagagcccttttttacccggatccatacgggaggaaaatggggtgcgttggcacgtgtgtccttactgtgcgaaggaattcagaaagcccagcgatctagttcgacacatccggatacatacccacgaaaagccctttaaatgcccacagtgtttcagggcatttgcagtcaaaagtactctaaccgcacatatcaaaacgcacaccggaattaaagccttcaagtgtcagtactgtatgaagagtttttcaactagtggctccctgaaagtgcacatacggctgcacacgggagtacgcccctttgcttgccctcattgcgacaagaaattccgcacctcaggccatcgcaaaacccacatagcttctcattttaaacacacagagctacgaaaaatgcgtcaccagcgcaagcctgcaaaagtgcgggtgggaaaaaccaacatccctgtccctgatattccactgcaagaacctatcctcatcacagacctggggctgatccagcccatcccaaagaaccagttctttcagagttattttaataacaattttgtcaacgaggccgacaggccctataagtgtttttattgtcacagggcctacaagaagtcctgtcacctcaagcagcacattagaagtcacacgggtgagaagccgtttaagtgttctcaatgcggaagaggatttgtgtccgcgggggtgctcaaggcccatattcgcacgcatacggggctgaagagcttcaaatgcttgatctgcaatggagcttttaccaccggtggttcactgaggagacacatgggtatccacaatgatttaagaccttatatgtgcccatattgtcagaagaccttcaaaacctctctgaattgcaagaaacatatgaaaacacaccggtacgaactggcccagcagctgcagcaacatcagcaggccgcatctatagacgatagcaccgtggaccagcagtccatgcaggcgtcaacccagatgcaggtcgagatcgaaagcgatgaactgccgcagactgccgaagttgtggccgccaatccagaagcaatgctggatctggagcctcagcacgtggtgggcaccgaggaggccggactgggacagcagctagccgatcaacccctggaagccgacgaggatggatttgtagccccccaggatcccctccgcggacacgttgaccagttcgaagaacagtcacccgcccaacagtctttcgaacctgccgggcttccacaaggctttacagtcacagacacctatcatcaacagccacaattccctccggtccagcaactgcaggactcttccacactcgagtcccaagcgctgtcaacttcttttcaccagcagtcactgctccaggccccttcatctgacggaatgaacgtaacaaccaggcttatccaagagtcttcacaggaagaattggatcttcaagcacaaggctcccaatttctggaggataatgaggaccagtcccgccgctcatacaggtgtgactattgcaataagggcttcaaaaaaagctcccatctgaaacagcacgtgcgctcccatacaggagaaaaaccctataaatgtaagctatgcggacgtggatttgtatcctcaggagtgctgaaaagtcacgagaagactcacaccggggtaaaggcctttagctgcagtgtgtgtaatgcttcttttactacgaatggatccctcacccgccacatggccacacatatgagcatgaagccctacaagtgtcctttctgtgaggaggggttccgcacaaccgtgcattgtaaaaaacacatgaaacgtcaccagaccgtgcccagtgctgtgtccgcaacgggagaaaccgaggggggcgatatatgtatggaagaagaggaggagcactccgatagaaacgcctctcggaagtcccgcccagaggtcatcacgttcactgaggaagaaaccgcccagctggctaaaattaggccgcaagagagcgccaccgtgtcggaaaaggtgctcgtgcaatctgccgcagaaaaggataggatcagtgaattgcgtgacaagcaggctgagctgcaggatgaacccaagcacgcaaactgttgtacatactgccccaagtcgttcaaaaagccctctgacttggtaaggcacgtgagaatccatactggagagaagccttataagtgcgacgagtgtggaaaatccttcactgtcaagtcgaccctggactgccatgtaaaaacccataccggtcagaagctctttagctgccacgtgtgctctaatgcattctctaccaaggggtccctcaaagtgcatatgagactccataccggcgctaagccgtttaaatgcccgcattgcgagctgcgattccggacttcaggacgtcggaagacacacatgcagttccactacaagcccgaccctaagaaggccagaaagcctatgacccgaagctcgtccgaggggcttcagccagtaaatttgctgaacagttcttccacagatcctaatgtattcatcatgaacaacagcgtcctgaccgggcagtttgatcagaacctccttcagccagggctggtcggacaggcaatcctcccagcaagtgtgtccgctggtggcgatttgacggtcagcttgactgacggctcactggctacactggagggaatccagctacagctcgccgcaaatctggtcgggcccaatgtgcaaatttcgggcattgacgcagcaagcatcaacaatataaccctgcagatcgacccctcaatcttacaacagaccctgcaacaaggaaatctgttagctcagcagctcacaggggaaccgggactggcaccgcagaactcgtctctgcagaccagcgatagcaccgttcccgcatccgtggtgattcagccaatcagtggactaagcctccagcccactgtgacctctgctaacctgaccattggtcccctaagcgagcaggactccgtgcttacgacaaactccagcgggacccaggatctgacccaggtgatgacaagtcaggggctggtgtcgcctagtgggggtccccacgagatcactctaacaatcaacaacagttctctgtcacaagtacttgcccaggccgccggtcctactgctacctcatcaagcggatcaccacaggagattactctgacgatctcagggtctcggtctgtccagcattctgtaggcccacaggaatgtggaagcgtggaggctctatatctggaaaacagctccgacaaaacctag

SEQ ID NO: 212053 - DNA, 4677 bp, synthetic construct
  misc_feature 1..4677: note = Description of Artificial Sequence: Synthetic coding sequence
  source 1..4677: mol_type = other DNA
atgggcctgtgcggcctgctggagcggtgctggctgcaccacgacccagacggggtactgactctgaacgctgaaaatactaattacgcttaccaggtgccaaattttcacaagtgcgagatctgtctgctaagcttcccaaaagaatcacagtttcagcgccatatgcgggaccatgaacgcaatgacaagccacacagatgcgatcagtgcccccagactttcaatgtggaatttaacctgacactacataagtgcacgcacagtggcgaagaccccacgtgccctgtgtgtaataagaaatttagccgcgttgcatccctgaaggcgcacattatgctccatgagaaggaggagaacttaatctgttcagaatgcggggatgaatttaccctccagtcgcaacttgccgttcatatggaggaacacagacaggaattggctgggacgagacagcacgcttgtaaagcctgtaaaaaggaattcgaaacgtcgtcagagctgaaagaacatatgaagacgcattacaagatcagagtgtcatccactaggtcttacaaccgcaatattgaccgctcaggcttcacctacagttgcccacactgcgggaaaaccttccagaagccatcgcagctcactcggcacatacgcatccatacaggagagagacctttcaagtgctcagagtgcggcaaagcttttaatcagaaaggggccctccagacccacatgatcaaacacacgggagagaaaccgcacgcatgcgcattctgtcctgcagcctttagtcagaaaggaaacctccagtcccacgtgcagagggtgcactccgaagtaaaaaatggtcccacatacaactgcacagagtgctcatgtgtattcaagtcgctgggctctctcaatacacacatctccaagatgcacatgggcggcccccagaactcaactagctctaccgagacggctcatgtgctgaccgcaactctcttccagaccctgccactgcaacagaccgaggctcaggcaacctctgcctctagccagcccagctcccaagccgttagtgacgtgattcagcaactgctggaattgtcagaacccgctccggtcgaaagtggtcaatcccctcaaccaggtcagcagttaagtataacggttggtattaatcaggatattctacagcaagcccttgaaaactctgggctgtcaagcatcccagccgcagctcaccctaatgattcatgtcacgctaaaacttctgcacctcatgcccagaaccctgacgtatcttctgttagcaatgaacaaaccgatccaaccgacgcagagcaagaaaaggagcaggagtctcctgaaaagctggataaaaaggagaaaaagatgataaagaaaaaatcaccattccttcctggctctatccgcgaggagaatggggtcagatggcacgtgtgcccttattgcgctaaggaatttcgcaagccttctgacctcgtgaggcatatcagaatccacactcacgaaaaacctttcaaatgcccccagtgttttagggcctttgctgtcaaatctacactaactgctcacatcaaaacacacaccggaatcaaggcctttaaatgtcagtattgcatgaagtcttttagcacctccgggtccttgaaagtccacattcggttacacacgggggtgcggcctttcgcatgtccacattgtgacaagaaattcaggactagtggtcacagaaagacccatatagcctcgcacttcaagcatacagagcttagaaaaatgcgccaccagagaaagcctgcgaaagtacgggtcggcaaaaccaacatcccggtgcccgatattccattgcaggagcctattctgattacagacctgggtctgattcagccaattccaaaaaaccagttcttccagtcctactttaataacaatttcgttaatgaggcagaccggccatataaatgcttctattgccacagggcatacaagaagagttgccatctgaaacagcacatccgaagccataccggagagaaaccctttaagtgctcccagtgcggacgggggttcgtttccgctggcgtgctcaaggcccacattcggacacacactggtctgaaatcttttaagtgcctgatctgtaatggagcctttacaaccggcggaagtctgaggaggcacatgggtatacataatgatctgcgtccgtacatgtgtccatactgtcaaaagacattcaagacgtcactcaactgtaaaaaacacatgaaaacccaccgttacgagcttgcccagcagctccagcagcatcagcaggccgcctcaattgatgactctactgtggaccaacagtccatgcaagctagtacccagatgcaggttgagattgagagtgatgagctccctcagactgctgaggtagtggccgcaaaccccgaggccatgctggatttggagccccagcacgtcgtgggaaccgaagaggcgggactgggccagcagctcgctgatcagccactggaggctgatgaggatggtttcgtggctccccaggatcccctcagaggacatgtagaccagttcgaggagcagtcacccgcccagcagagcttcgagcccgctggcctcccacaagggtttacagtgaccgacacgtatcatcaacagccgcaattccccccggttcagcaactacaggactctagcacattggagagtcaggctctcagcacctcatttcatcaacagagtctcctccaggcccctagctccgacggcatgaacgttacaacacggctgatccaagagagcagccaggaggagctggacctgcaagctcaaggcagtcagttcctcgaggataacgaggatcagtcacggcgaagctacagatgtgactattgcaataagggctttaagaagagcagccacttgaagcagcacgtacgctcccatactggtgagaagccatacaaatgcaagctgtgtggtagaggttttgtttctagcggagttttaaagtcccatgagaagacacatacaggagtaaaagcattttcctgtagtgtatgcaatgcatcttttaccaccaatgggagtcttaccagacatatggccactcacatgtctatgaagccctataaatgccctttctgcgaagaaggttttaggaccactgtacactgtaagaaacacatgaagaggcatcaaacagtgccctctgccgtaagtgccacaggtgagaccgaagggggcgacatatgtatggaagaggaagaagaacattccgatcgaaatgcatccaggaaaagtcgcccagaagttataactttcaccgaagaagagaccgctcaactggcaaagattagacctcaagagagtgcaaccgtaagtgagaaggtgctagtgcagtcagccgcagagaaggaccgcatctccgaactgagagataagcaagccgaacttcaggatgaacccaagcacgccaactgctgcacatattgtccaaagagttttaagaaaccttcagatctggtgaggcacgtgcgcatacacacgggggagaagccatataaatgcgacgagtgcggtaagtcctttaccgtgaagtctactttggactgccacgtgaagactcacactggccagaagctgttctcctgccatgtgtgcagtaacgccttttcaacaaaggggtccctgaaagtgcatatgcgcctgcataccggcgccaagcccttcaaatgcccccactgcgagctcagatttcgtacctccggcaggagaaaaacccacatgcagtttcattacaaacccgacccgaagaaggcccggaagcctatgaccagaagttccagcgagggcttgcagccggtgaacttgctgaattcgtcctccaccgaccctaatgtctttattatgaacaattccgtcctgactgggcagttcgaccagaacctactccagcctggcttggtcgggcaagcgattctgcctgcctctgtttctgccggcggcgaccttacagtgtctcttacagatggatccctggctacactcgagggaattcagcttcagctcgccgccaatctggtcggcccgaacgtgcagattagcggcatcgacgccgcttccataaacaacatcaccttgcagatcgacccctctatcctgcaacagacgctccagcagggaaatctgcttgcccagcagctgaccggcgaacccggcctcgcaccacagaattcctccctgcagacttcagattcaacagtaccagcaagtgtcgttattcagcccatctccggactgtcactgcaacccactgtgaccagcgcaaacctgaccattggccctctttctgagcaggacagcgtgctgactactaacagctctgggacccaggatctcacgcaggtgatgactagccaagggctggtgagcccaagcgggggcccacacgagatcactctgactattaataactccagcctctcacaggttctcgcacaggctgctggtcctaccgcaacctcctcttccggatctccacaggagatcacccttacgatttctggctccagatctgtgcagcacagtgttggaccccaggagtgcggttccgtagaggctctctatctggagaattcctccgataagacttag

SEQ ID NO: 212054 - DNA, 1596 bp, synthetic construct
  misc_feature 1..1596: note = Description of Artificial Sequence: Synthetic coding sequence
  source 1..1596: mol_type = other DNA
atgtgccccaagggctacgaggacagcatggagttccccgaccactccaggcacctgttgcaatgcctcagtgaacagcgacatcagggctttctgtgcgattgcacggtgttagtcggcgacgctcagtttagagcacaccgggctgtgcttgcctcttgcagcatgtactttcacttgttctacaaggaccagctggacaaaagagatattgttcacctcaacagtgacatcgttactgcacctgcctttgctttgctactggaattcatgtatgagggcaagttacagttcaaggatctgccgatcgaggacgttctcgctgccgcctcgtacctacatatgtatgacattgttaaagtgtgcaaaaaaaagctcaaagagaaggccacaaccgaggcagacagtactaagaaagaggaggatgcttcctcatgcagcgacaaggtggaatcactgagcgacggctcttcccacattgctggggacctcccatccgacgaggatgaaggcgaagacgagaagctgaatattctgcccagtaaacgcgatctcgcagcggagccaggaaacatgtggatgcgcctgccctcagacagtgccggaatccctcaagcaggcggagaggctgagcctcacgcaacggccgccggaaagacggtggcctccccctgttctagcacagagagcctctcgcagcgctcagttacttctgtgcgagatagcgcagatgtggactgtgtgcttgacttatctgttaagtcgagccttagtggagttgaaaatctgaattcctcgtacttctctagtcaagatgtactgcggtcaaacctggtacaggtgaaggtggagaaggaagcctcctgtgacgagagtgacgttggaaccaatgattacgatatggagcacagtaccgtgaaagaatctgtgtccacaaacaatcgagtgcagtatgagccagctcacctggcccctctgagagaggacagtgtacttcgcgagttagaccgagaggataaagcatccgatgacgagatgatgacacctgagagcgagcgcgtacaagtcgaaggaggaatggagagctctctgctaccctatgtgtctaatatcctgtctcccgcgggccaaatctttatgtgtcccctctgcaataaagtgttccctagcccacatattctccagattcacctgagcacacacttcagagaacaggatggcatcagatctaagccagcggcagacgtaaatgtgcccacatgcagcttatgtggtaagacgttttcatgcatgtataccctgaagagacacgagagaacacatagcggcgagaagccctatacttgtacgcagtgcgggaaaagtttccaatattcacataacctgagtcgtcacgccgtggttcacactcgcgagaaaccgcatgcgtgcaagtggtgcgagagacgattcacccagtcgggagacctatataggcacatacggaaattccactgtgagctggtgaattcgcttagcgtcaagagcgaggcgttgtccctccctaccgttagagattggactctggaagattcctcacaggagctctggaagtag

SEQ ID NO: 212055 - DNA, 1464 bp, synthetic construct
  misc_feature 1..1464: note = Description of Artificial Sequence: Synthetic coding sequence
  source 1..1464: mol_type = other DNA
atgtgccccaagggctacgaggacagcatggagttccccgaccactcccgccatttgctccaatgcctgagcgagcagaggcaccagggttttctgtgtgactgcacagttctggtcggagacgctcaatttcgcgcccaccgggccgttcttgcttcctgcagtatgtatttccatctattctataaggatcagcttgataagagggacattgtccatctcaacagcgacattgttactgccccagctttcgcgctcctcctggagtttatgtacgaggggaagctccagttcaaggatttacctattgaggatgtgctggccgcagcctcatacctgcatatgtacgacatcgtcaaggtgtgtaaaaaaaagctgaaagagaaggccactacggaggccgactctacgaaaaaggaggaggatgccagcagttgtagcgataaagtagagagcctttcggacggatcgtctcatattgccggagatcttccttcagacgaggacgagggagaggacgaaaaactgaacatccttcccagcaagcgggacctagctgctgaaccgggtaatatgtggatgagactgccgtccgactctgcaggtattcctcaggctggcggagaagccgagccgcacgctactgccgccggcaagaccgtagcatctccctgctctagtacagagagtctcagccaacggtctgtgaccagtgtaagggattccgccgatgtggactgtgtactggatttgtcggttaagtcgtctctgagcggcgtggagaacttgaattctagttacttttcaagtcaggatgtcctgagatctaatttggtgcaggtgaaggtcgaaaaggaggcaagctgcgacgaaagtgacgtgggcaccaatgactacgacatggagcatagtacagtaaaggagtccgtgagcacaaacaacagagttcagtatgagcctgcccatctcgctccactccgtgaggactctgttcttagggaactggatagagaagataaggctagtgatgatgagatgatgaccccagaaagcgagagagtacaggttgaggggggcatggagagcagtctgctgccttatgtgagtaacatcctgtccccagcggggcaaatcttcatgtgccctctgtgtaataaggtcttcccgtccccgcacattcttcaaatccacctttcgacacattttcgagagcaggacggcatcagaagtaagccagccgctgacgtgaatgttcccacatgctctctgtgtggcaaaactttctcttgtatgtataccctgaagagacatgaacgaactcactctggggagaagccatatacctgcacacagtgcgggaaatcatttcagtatagccacaatctttcgagactccaggtcgttagagcccaagtccatgctgttcgaggccccgtgcaaacacactctcaggtgcccctctag

SEQ ID NO: 212056 - DNA, 1377 bp, synthetic construct
  misc_feature 1..1377: note = Description of Artificial Sequence: Synthetic coding sequence
  source 1..1377: mol_type = other DNA
atggccagcaccatcaccggcagccaggactgcatcgtgaaccacagaggagaggtggacggcgagcctgagctcgatattagcccatgccagcagtggggggaggcgtcttctccgatatcaaggaaccgcgattccgtgatgaccttgcaaagcggctgttttgagaacattgagtctgagacgtacctacctctgaaagtgagctcgcagatcgatacacaggattcatctgttaagttttgcaagaatgaaccacaagaccaccaggagtcccgccgtctcttcgtgatggaagagtccaccgaaagaaaagtcatcaaaggggagtcttgctctgaaaatctacaggtcaagctcgtgagcgatgggcaggaactggcctccccattgcttaatggtgaggccacttgtcagaatgggcagttaaaagaatctctggacccgatcgactgcaactgtaaagacatccatggatggaaatcccaggtcgtgagttgtagtcaacagcgggctcacactgaggagaaaccttgtgaccataataattgtggaaaaattctgaatacttctcctgacggccacccctacgagaaaatacatactgcagagaaacagtacgaatgctctcagtgcggtaaaaatttctcccagtcctctgagctcttgcttcatcaacgagaccacactgaagagaagccatacaagtgcgagcagtgtggtaagggcttcacacgctccagttccctgctcatacatcaggccgtacatacggatgaaaagccgtacaagtgtgacaaatgtggtaagggctttacacggtcatcttctttactcattcatcacgcagtgcacaccggcgagaaaccttataagtgcgacaagtgcgggaagggatttagtcagagctcaaaacttcacatacaccaacgcgtacacacgggggagaagccatatgaatgtgaggaatgcgggatgtccttctcccagcgaagtaacctacacatccaccaacgtgtccacacaggagagcgaccctataagtgcggcgagtgcggcaaagggttcagccagtcatccaacttacacattcacaggtgcatccacaccggcgagaagccctaccaatgctacgaatgcgggaaggggtttagccagtcttccgacttacgcatccacctcagagtgcacaccggggaaaaaccctatcactgcgggaagtgtggcaaagggttctcccaatcgagtaaacttctcatacaccagagagtccacaccggagagaagccttacgaatgcagtaagtgcggcaaaggatttagtcaaagtagtaatctgcacatccaccaaagagtacataaaaaggatcctagatag

SEQ ID NO: 212057 - DNA, 1377 bp, synthetic construct
  misc_feature 1..1377: note = Description of Artificial Sequence: Synthetic coding sequence
  source 1..1377: mol_type = other DNA
atggccagcaccatcaccggcagccaggactgcatcgtgaaccacaggggcgaagtcgatggagagcctgaattagacatttccccttgtcagcaatggggagaggcctcaagccctatctcgcgcaatcgcgactccgttatgactttgcagagcgggtgcttcgaaaacattgaatctgagacatatctgccgcttaaagtctcctcgcaaattgatacacaagactctagcgtgaagttctgtaagaacgaaccacaagatcaccaagagtctcgacgtctattcgttatggaagagtctaccgagcggaaagtcatcaagggcgagtcctgctccgaaaacctccaagtaaaactggtgagtgacggtcaagaactagcctcccccctgcttaacggggaagctacctgccagaacggacagcttaaagagagcctcgaccctatagactgcaattgtaaggacattcacggatggaaaagccaggttgtgtcttgcagtcagcagagggcgcacaccgaagaaaaaccgtgcgatcacaataattgtggaaaaattctgaatacctcccccgacggacacccgtacgagaaaatccacacggctgagaaacagtatgagtgtagtcagtgcggcaaaaatttcagccagtcctcagagttactcctgcaccaacgtgaccacactgaagaaaaaccctataagtgcgaacagtgcggcaagggctttaccagaagtagctctctcttgatccaccaggccgtccacaccgacgagaaaccttacaaatgtgataagtgtggcaaggggtttacacgaagcagcagcttattgatccaccacgcagtccacaccggagaaaagccttacaaatgtgataagtgcgggaaaggattttcccaaagctctaaactccatattcaccagcgcgtgcacaccggagaaaaaccatatgaatgtgaggaatgtggaatgtcattttcacagcgtagcaacttgcatattcaccagagggttcacacaggggaaaggccctataagtgcggggagtgtggcaagggcttcagtcagagcagcaatctgcacattcaccgctgtatccacactggcgagaagccgtaccagtgttatgagtgtgggaagggattcagccagtctagtgatctgagaattcacctgcgcgtacacacaggagaaaaaccctaccactgcggaaaatgtggcaaaggcttcagccagagcagtaagttactcatacatcagcgcgtgcacacgggcgaaaagccatacgaatgctccaagtgcggtaaggggttcagccagagttcaaacctgcacattcaccaacgcgtgcataagaaagaccccagatag

SEQ ID NO: 212058 - DNA, 1377 bp, synthetic construct
  misc_feature 1..1377: note = Description of Artificial Sequence: Synthetic coding sequence
  source 1..1377: mol_type = other DNA
atggccagcaccatcaccggcagccaggactgcatcgtgaaccaccgcggtgaagtggacggcgagcctgagctggatatatctccctgtcaacaatggggtgaggcctcttcaccgatttctaggaacagagattctgtcatgacacttcagtcgggttgttttgagaacattgagagcgagacctatctgcctctcaaggtgtcttcacaaatcgacacacaagatagttctgtaaaattttgcaaaaatgagcctcaggatcatcaagagtccagacgcctgtttgtgatggaggagagcactgaacgcaaagtaatcaagggcgagtcctgtagcgaaaatttgcaagtgaagcttgtatccgatgggcaggagttagccagcccattgttgaatggtgaggcaacttgccagaatggccagctcaaggaaagtctggacccgattgactgtaattgtaaagacatccatggctggaaatcacaagtggtttcatgcagccagcagcgtgctcacaccgaggagaaaccatgcgatcacaataactgcgggaagatcctgaataccagtcctgacggccatccttatgagaaaatacacactgcggagaagcagtacgagtgttcccagtgcggcaagaatttcagccagagctcagagttactgctacaccagagagaccatacagaagaaaagccctacaagtgcgagcaatgcggaaaaggctttaccagatccagtagtctcttgatccaccaggcagtacataccgacgagaaaccatataagtgtgataagtgtggcaaagggttcactagatcctcatcactgctgatccatcacgcagtgcacaccggagaaaagccctataagtgcgataaatgtggtaaaggcttctcacaaagctccaagctccacattcatcagcgcgtgcatacaggtgaaaaaccttatgaatgcgaggaatgcggcatgagcttctcccaaagaagcaatcttcacattcatcagcgagtccacactggtgaacgcccttataaatgtggagaatgcggtaaagggttttcgcagagcagtaaccttcacatccaccggtgcatccatacaggggagaaaccctatcagtgttatgaatgcggtaaagggttcagccagagctcagacttacgaattcacttacgggtccacactggcgagaaaccttatcattgtggcaagtgcggaaagggcttctcccagagcagcaagctgctgattcaccaacgggttcatacgggagaaaaaccctatgagtgctcgaagtgcggcaaaggcttttcccagtctagtaaccttcatatccatcagagagtgcataagaaggatccccggtag

SEQ ID NO: 212059 - DNA, 1377 bp, synthetic construct
  misc_feature 1..1377: note = Description of Artificial Sequence: Synthetic coding sequence
  source 1..1377: mol_type = other DNA
atggccagcaccatcaccggcagccaggactgcatcgtgaaccaccgtggcgaggtggatggggagccggagctcgacatcagcccgtgtcaacaatggggggaggccagtagtcccattagccgcaacagggactccgtcatgaccctccagtcaggctgtttcgaaaacattgaatcagagacatatctccctctgaaggtatcaagtcagattgatactcaggacagcagcgtgaaattctgcaagaacgagccgcaggatcaccaggaatcaagacggctctttgtcatggaagaatcaactgagcggaaggtcattaaaggagagtcttgtagcgagaatctgcaagtgaaactggtgagcgacggtcaagagctcgctagcccactgttaaatggcgaagccacatgccagaacggtcagctcaaggaatcactggatccaatcgactgtaattgcaaagacatacacggctggaagtcccaggtggtctcttgttcgcagcagcgtgcccacactgaagaaaagccatgtgatcacaataattgcggcaagatcctgaacaccagtcccgacggccacccttatgaaaagatccataccgcagagaagcaatacgaatgctcgcaatgcggtaagaacttttcacagtcctccgagcttctgctccaccagcgggaccacacagaggagaagccctacaagtgtgagcagtgcggcaagggcttcacaagaagctcctctctcctgattcatcaggccgtgcataccgatgaaaagccctacaaatgcgacaaatgtggaaaggggttcacaaggtctagtagtctgttgatacaccacgctgtgcacacaggcgaaaagccctacaaatgcgacaaatgtgggaaaggcttctcccagtcttctaaactgcacatacatcagagagtgcatacaggggagaagccttatgagtgtgaggagtgcggaatgtccttttcccaaaggagtaacctgcatatccatcagagagtccacacaggagagagaccttataagtgcggcgaatgtggcaaaggattctcccagtcatcaaatttgcatatccatcgctgcattcacactggggagaagccatatcaatgttacgagtgcggaaagggattttcacagtctagcgatctccgcattcacttgcgcgttcatacaggcgagaaaccctatcactgcgggaagtgcggaaagggcttttctcagagttcaaaattgcttatccaccagcgcgttcatacaggagagaaaccatatgagtgtagtaagtgtggaaaaggcttctcacagagctcgaatctccatatccaccaaagggtgcataaaaaagacccacggtag

SEQ ID NO: 212060 - DNA, 1377 bp, synthetic construct
  misc_feature 1..1377: note = Description of Artificial Sequence: Synthetic coding sequence
  source 1..1377: mol_type = other DNA
atggccagcaccatcaccggcagccaggactgcatcgtgaaccaccgcggagaggtcgacggcgagccagaactggatatctcgccctgccagcagtggggagaagctagctccccaatcagccgcaacagagattctgttatgaccttgcagagcgggtgctttgagaatatcgagtccgagacatacttaccactgaaagtgagttcgcagattgacacccaggactcctcagtgaaattttgtaagaacgaacctcaggatcatcaggaaagcagaaggctgttcgtgatggaagagagcacggagcgcaaggtgatcaaaggcgagagctgcagtgagaaccttcaggttaaactcgtgtcagacggacaagaactggcctcaccattactgaatggtgaggcaacatgtcagaatgggcagctcaaggaaagtttggatcccatagactgcaattgcaaagatattcacggttggaaatctcaggtggtgtcctgcagtcagcagagggcccacacagaagaaaaaccctgcgaccacaataattgcgggaagatcttgaataccagccctgatggacatccatacgagaaaatccataccgccgaaaaacagtatgagtgctctcagtgcgggaagaatttctcacagtcgtctgagcttctgctccaccagcgagatcacactgaagaaaagccatacaaatgcgagcagtgcggaaagggattcacacgatccagctcactcctgatccaccaggcggtacacaccgatgagaagccttacaagtgtgacaagtgcggtaaaggattcactcgttcctcaagcctcttgattcaccacgccgtccacaccggggagaaaccctataaatgcgataagtgtggcaagggattctctcagtcgtctaagctgcacattcaccaacgagttcacacgggcgaaaaaccttatgagtgtgaggaatgtggaatgtccttctcccagcggtctaacttgcacatacaccagagagttcacacaggcgagcgcccgtacaagtgcggtgagtgcggcaaagggttctcccaatctagcaacttgcatattcatcgctgcatacatactggtgagaagccctatcagtgttatgaatgtggcaagggcttctctcagagctcagatctgaggatccacctgagagttcatactggcgagaaaccataccactgcggtaagtgcggtaagggattttcacagagttcaaagctgcttattcaccagcgggtgcacaccggagagaaaccatatgagtgtagcaagtgtggtaagggtttcagtcagtcctctaatctccacatccatcagcgcgtgcacaaaaaggaccccaggtag

SEQ ID NO: 212061 - DNA, 1107 bp, synthetic construct
  misc_feature 1..1107: note = Description of Artificial Sequence: Synthetic coding sequence
  source 1..1107: mol_type = other DNA
atgagcgcccagagcgtggaggaggacagcatcctgatcatccccacaccggatgaagaggaaaaaattctgcgcgtaaaactggaggaggatccagatggggaagagggctccagtataccttggaatcacctgcccgacccagaaatcttccggcagcggtttcgccagttcggttaccaggacagccctggaccacgggaggcggtgagccaactgcgggagttatgcaggctgtggctgagaccagagacacacactaaggagcaaatcctcgagctggtcgtcctggaacagtttgtcgcgatcttaccgaaagagttgcagacctgggtgcgggaccaccatccagagaatggcgaggaggccgtgactgttctggaggatctcgagagtgagctggatgatccaggacagccagtgtccttgcgccgcaggaagagagaagtgttggtagaggatatggtgtcacaggaggaagctcaggggttacccagcagcgagttggacgcagtagaaaaccaactcaagtgggccagctgggagctccacagcctccgccattgcgacgatgatggcaggacagagaacggcgcgcttgcccctaaacaggaactgcctagcgcactcgagtctcacgaagtaccaggtaccctcaacatgggtgttcctcagattttcaagtacggggagacttgctttccaaaaggacggtttgagcggaaaaggaatccaagccgcaagaagcagcacatctgcgatgaatgtggaaagcacttttctcaaggtagcgcactaatcctgcaccagaggattcactccggagagaagccctatggctgcgtggaatgtggtaaggcattctcaagatcatcgattctggtgcagcatcagcgcgtccacacaggagagaagccatataaatgcttggagtgcggcaaggctttcagtcaaaatagcgggttaattaatcaccaacgtatacacaccggcgaaaaaccgtacgagtgcgtccagtgcggaaagtcatacagccagagctccaatttgttccgtcatcagcggcgccataatgccgaaaagttgctgaacgtggtgaaggtttag

SEQ ID NO: 212062 - DNA, 1107 bp, synthetic construct
  misc_feature 1..1107: note = Description of Artificial Sequence: Synthetic coding sequence
  source 1..1107: mol_type = other DNA
atgagcgcccagagcgtggaggaggacagcatcctgatcatccccacacccgatgaggaagaaaaaatccttcgagtgaaactagaggaagatccagacggcgaggaaggatcttccataccatggaaccaccttcctgatccagaaatattccgccagagattccgccagtttggatatcaagatagtcccggaccccgcgaggcagtgtcacagctccgagaactttgtcgattgtggctcagacccgagacgcatactaaagagcaaattctagagctggttgtcttagaacaatttgtggcaatactgcctaaggagctgcagacctgggtccgggatcatcaccccgagaatggtgaagaggccgttacggtgcttgaagatctcgagtcagagctggacgatccaggacagccagtttccttgcgcaggagaaaaagggaggtcctcgtggaggacatggtgagtcaagaagaggcccagggtctgccgtcaagcgaactggatgccgtggagaaccagctgaagtgggcctcctgggagctgcactctctaaggcactgtgacgatgacgggcgcaccgaaaatggggctctggctcctaaacaggagctgcctagcgccctggagtcccatgaagtgccggggactcttaacatgggggtgccacaaatattcaaatatggagaaacatgctttcctaaaggaagatttgagcgaaagcggaacccctcacgtaaaaagcagcacatttgtgacgaatgcggaaagcacttctcccagggatcggccttgatactgcatcagagaatccacagtggagaaaaaccctacgggtgcgtggagtgcgggaaagccttcagccgctcctccattctggtacagcaccaacgcgtgcacactggagagaaaccatataagtgcttggaatgcggaaaagccttttctcagaatagcggactgatcaatcatcaaagaattcatacgggtgagaagccttatgagtgcgtgcagtgtggaaaatcctactcccagtctagcaacctctttcgccaccagagacgacataatgccgaaaaattgctgaacgtggttaaggtgtag

SEQ ID NO: 212063 - DNA, 1371 bp, synthetic construct
  misc_feature 1..1371: note = Description of Artificial Sequence: Synthetic coding sequence
  source 1..1371: mol_type = other DNA
atgaacaagttccagggccccgtgaccctgaaggacgtgatcgtggagtttactaaagaagagtggaagctcttgacccccgcacagcgcaccctatataaagatgtaatgctcgagaactatagtcaccttgtgtcggtagggtaccacgtgaataagccgaacgccgtcttcaagctgaagcaaggcaaggagccatggatcctggaagtcgaattcccacacaggggtttccctgaagatctttggtctatccacgatctggaggccagataccaggagagccaggcgggcaacagccgcaacggggagctgactaagcatcagaagacgcacacaaccgagaaagcatgcgagtgcaaggagtgtgggaaatttttttgccagaagagcgcattgatcgtccatcagcatacccacagtaaaggaaagtcttatgattgcgataaatgtgggaagtcattttctaaaaacgaagacctgattaggcaccagaaaatccataccagggacaaaacctacgaatgtaaggaatgcaagaagattttctaccacctttccagccttagccgccacttgcgaacccacgctggggaaaagccctacgagtgcaatcagtgcgaaaaaagcttctaccaaaagccacacctcaccgagcatcaaaagacacataccggtgaaaagcccttcgagtgcaccgaatgcgggaaatttttctatgtgaaggcctacttaatggtgcatcagaaaactcacacaggcgaaaaaccctatgaatgtaaagagtgtggaaaggccttttcccagaagtcacatctgacggtccatcagcgaatgcacaccggcgagaagccctacaaatgcaaggagtgtggaaagttttttagccgcaattctcacttgaagacccaccagaggtctcacaccggagaaaaaccatacgaatgtaaagagtgtcgcaaatgcttctatcagaaatccgccctgaccgtgcaccaaaggactcacacaggcgaaaaaccgtttgaatgtaataaatgcgggaaaacgttttattacaagagtgatcttacgaaacatcagagaaagcacaccggcgagaagccctatgagtgtacagaatgcggcaagtctttcgcagtgaatagtgtcctgcggcttcaccaaagaacccatacaggggagaagccttacgcctgcaaagagtgcggaaaatccttcagccaaaagtcccacttcatcatccaccagcgcaagcataccggggagaagccgtacgagtgtcaggaatgcggcgagacattcatccagaagtcgcagctgaccgcacaccagaagacgcacactaagaaaaggaacgctgaaaagtag

SEQ ID NO: 212064 - DNA, 1263 bp, synthetic construct
  misc_feature 1..1263: note = Description of Artificial Sequence: Synthetic coding sequence
  source 1..1263: mol_type = other DNA
atgctggagaactacagccacctggtgagcgtgggctaccacgtgaacaagccaaacgcagtgtttaagctgaagcaaggcaaggaaccttggattctcgaggttgaatttccacaccgcggatttccggaggatttgtggagtatccatgacctggaggcccgttaccaagagtctcaggctggtaattcgcggaatggagagctgaccaaacaccagaagactcataccacagaaaaggcgtgtgaatgcaaagaatgcgggaagttcttctgccagaaaagtgccctcatcgtgcatcagcacactcattctaagggcaagtcctatgactgtgacaagtgtggaaaatccttttctaaaaacgaggacctgattagacatcagaaaatccacacccgggacaaaacatatgagtgtaaggaatgcaaaaaaatcttctaccatctctcctccctgtcacgccatcttcgaacgcatgctggggaaaagccctacgagtgcaaccagtgcgagaagtccttctaccagaaaccccacctgacggaacaccagaaaacacacactggcgaaaagccattcgagtgcacagaatgtgggaaatttttctatgtgaaagcatacctcatggtgcaccaaaagacacacactggcgagaaaccatacgaatgcaaagagtgtggcaaggcattttcccaaaagagccatttgacagttcaccagaggatgcacaccggtgagaaaccttacaagtgtaaggaatgtgggaaattcttctctcggaattctcacctaaagactcaccagcggagccacaccggcgagaaaccgtacgaatgcaaagagtgtagaaaatgcttctatcagaagtcggctctgactgtgcaccagcgcacacacacaggcgaaaagcccttcgaatgcaataaatgtggtaaaaccttctactataaatcagatctcaccaagcatcagaggaagcatacaggggagaaaccctatgagtgcactgaatgtggtaagtcatttgccgttaacagcgtactgcgtttacatcaaaggacacacactggcgaaaagccctatgcatgcaaggagtgcggtaagtcctttagccaaaagagtcattttataatacatcaacgcaagcacactggagaaaagccttacgagtgccaggaatgcggtgaaacatttatccagaaatcacagctgactgcccatcagaagacccacactaagaaaagaaatgcagaaaagtag

SEQ ID NO: 212065 - DNA, 1500 bp, synthetic construct
  misc_feature 1..1500: note = Description of Artificial Sequence: Synthetic coding sequence
  source 1..1500: mol_type = other DNA
atgggccccctgcagttccgggacgtggccatcgagttcagcctggaagaatggcactgtctcgatactgcacagagaaatctgtacagggatgtgatgctggagaattatcggaatctcgtctttctcggcattgtggtgagcaagccagaccttgtcacatgcctggagcaaggaaagaaaccgctcacaatggagaggcacgaaatgatcgccaagccacctgtgatgagcagtcacttcgcccaggatctctggcctgagaacatacagaacagtttccagatcggaatgctgaggcgctacgaggaatgtcgtcacgacaacctccaacttaaaaagggatgtaaaagcgtgggagagcataaagtgcataaaggcggctacaatggcttaaaccagtgtctgacaaccacacagaaagagattttccaatgcgacaagtatgggaaagtctttcataaattttctaactccaacacctataaaacgagacatacagggatcaatttattcaagtgcattatttgcgggaaggccttcaagagatcatctactctgacaactcacaagaagatacacaccggtgagaagccatacagatgcgaagagtgtggcaaagcctttaaccaaagtgcaaatctgaccacccacaaacggatccacaccggcgaaaagccctacaggtgcgaggaatgtggtaaggctttcaagcaatctagtaacctgacaacgcataaaaagatccataccggcgagaagccttacaagtgcgaggaatgcggaaaagccttcaataggagcacagatttaacaacgcacaaaatagtccatactggggagaaaccctataagtgtgaggaatgcgggaaggccttcaagcacccatctcatgtgaccactcacaaaaaaattcacacccgcggtaagccgtataattgtgaagagtgcggcaaatcttttaagcactgctcaaatctgacaatccataaacgaattcatactggagaaaagccatacaaatgtgaagagtgcggaaaagcattccatctctcttcccacttaaccacacataagatcctccatactggggaaaaaccctatcgctgtagggagtgcggcaaggcttttaatcatagcaccactctgttcagccatgagaaaatccacaccggggagaagccatacaaatgcgacgaatgcgggaaaacctttacctggccttctatcttatctaagcacaaacgaacgcacacgggggagaaaccctataaatgtgaggagtgtgggaaatctttcactgcctccagtacccttactacccataagagaatacatacaggggagaaaccttataaatgcgaagagtgcgggaaggctttcaattggagttcagatctgaataagcacaagaagattcatatagagcggaaaccctatattgtcaaaaatgtaaccgatctcctgaatgtacctcctctactgattagcattcgttag

SEQ ID NO: 212066 - DNA, 1500 bp, synthetic construct
  misc_feature 1..1500: note = Description of Artificial Sequence: Synthetic coding sequence
  source 1..1500: mol_type = other DNA
atgggccccctgcagttccgggacgtggccatcgagttcagcctggaagagtggcactgtctcgatacggcacagcggaatctttaccgcgacgtaatgctggaaaattataggaatctcgtgttcttgggcatcgtagtgagtaaaccagacctcgtcacatgccttgaacaagggaaaaagccgctgacaatggagcgccacgaaatgattgctaaaccccctgtgatgagctctcattttgcgcaggacctgtggcccgaaaacatacagaattcttttcagatagggatgctgcgaaggtacgaggagtgccgccacgacaatctccagttgaagaagggttgtaagagcgtcggcgaacacaaagtgcataaggggggatacaatgggctgaatcagtgcttgactacaacgcaaaaagagatcttccagtgcgataaatatggtaaagtattccacaagtttagcaattctaacacctacaaaacccgtcataccggcataaacttgtttaaatgtattatttgtgggaaggcattcaagcggtcttccactctgacaacgcataaaaagatccacacaggagaaaaaccttatcgctgtgaagagtgtgggaaagcctttaaccagtcagccaatttaactactcacaaacggattcacaccggagaaaagccatacagatgcgaggagtgcgggaaagcttttaagcagagctctaatctcacaacccacaaaaagattcacactggggaaaaaccgtacaaatgcgaggaatgcggcaaagctttcaaccggtccaccgacctgaccacgcacaagattgtgcacaccggagagaaaccttacaaatgtgaggagtgtggtaaggcatttaaacatccgagtcacgttaccacacacaaaaagatccacacccgcgggaaaccatacaactgcgaagagtgcggcaagtcctttaagcattgttcgaatttaactattcacaagcgaatacataccggagagaagccttataagtgcgaggagtgcggtaaagcctttcatctgagcagccacctgacaacacacaagattctacacaccggtgaaaagccgtatcgatgtagagagtgtgggaaagctttcaaccacagcacaacactattttcgcacgagaaaatccacactggagaaaaaccgtataagtgtgacgaatgcggcaagaccttcacctggccttcgattttgtccaagcacaaacgcacccatacaggcgaaaagccctacaaatgcgaggagtgcggcaagtcttttacagcctcgagtaccttaaccacacacaagcgcatccacaccggagaaaagccatacaagtgtgaggagtgcggcaaggccttcaattggtcatctgacctgaacaagcacaaaaaaatacatattgaaaggaaaccctatattgtgaagaatgtgaccgatttgctgaacgtgccccccttgctgatctcaatccggtag

SEQ ID NO: 212067 - DNA, 276 bp, synthetic construct
  misc_feature 1..276: note = Description of Artificial Sequence: Synthetic coding sequence
  source 1..276: mol_type = other DNA
atgcccggccccccccggagcctggagatgggcctgctgaccttcagggacgttgctatagagttctccctcgaggaatggcagcacctggacatagcacagcagaacctttataggaacgtgatgctcgaaaactacaggaacttggcctttctgggaatagccgtctcaaagccagacctcatcacatgtctggagcaaggtaaggagccttggaacatgaagcgccacgaaatggtcgacgagcccccaggtctggacttctccttgctctag

SEQ ID NO: 212068 - DNA, 1725 bp, synthetic construct
  misc_feature 1..1725: note = Description of Artificial Sequence: Synthetic coding sequence
  source 1..1725: mol_type = other DNA
atgtgcccccacttcgcccaggacctgtggcccgagcagggcatggaagatagttttcaaaaagccatccttcgcagatacggaaagtatggccacgagaatctccagctgcggaagggatgcaagtctgtggatgagtataaagtaaacaaagaggggtataacggcttaaaccagtgcttcactaccgcacagagcaaagtatttcaatgcgacaagtaccttaaggtgttctacaagttcctcaacagtaatcgccctaaaatccggcacacagaaaagaagagcttcaagtgtaaaaagcgggtcaagttgttttgtatgcttagccataagactcagcacaaaagcatctaccacagagagaaatcctataagtgtaaagagtgcggcaaaaccttcaactggagctccacactcaccaaccaccgaaaaatttacaccgaggaaaagccttacaagtgtgaggagtacaacaaatcgcccaagcagctctcaacactcacgacccatgagatcatccacgccggagagaaactttataagtgtgaggagtgcggggaagcctttaacagatcctccaacctgaccacccataagatcattcacaccggggaaaagccctacaaatgcgaagaatgcggaaaagcttttatctggagctccacccttacggagcataaaaagatccataccagaaagaagccctacaagtgtgaagagtgtggaaaggcatttatctggtcctccactttaactagacacaagagaatgcacacgggggaaaaaccctataaatgtgaggaatgtgggaaagcattctcccagagtagtacactaaccactcataaaattattcatacaggtgagaaaaggtacaagtgcctggagtgtggcaaggcattcaaacagctgtccacactcactactcacaaaattatccacgtcggcgaaaagctttataagtgtgaagaatgcggcaagggctttaatcgatcaagtaacctgacaacgcataaaattattcataccggggagaagccatacaaatgtgaggagtgtggaaaagctttcatctggtccagcaccctcaccaagcacaaacgtatccacaccagggaaaaaccatacaagtgcgaggagtgtggcaaagcctttatctggtcgtctaccctcacacgccacaaacgcatgcacacaggagagaagccatataagtgtgaagagtgtgggaagtccttctcccagagcagtacactgaccactcacaaaatcatccataccggagaaaagccttacaagtgtgaggagtgtgggaaagccttcaactggtccagtactttgacgaagcataaaattattcataccgaggaaaaaccatacaagtgcgaaaaatgcggaaaggctttcaagcagagcagtatattaaccaatcacaagcgaattcacaccggcgagaagccgtacaaatgcgaagagtgcggcaaaagcttcaacaggagtagtaccttcaccaaacacaaggtgattcatacaggagtgaagccgtataaatgtgaggagtgtggaaaggcatttttttggtcctctactttgactaagcataaacggatccacacaggggagcaaccatacaagtgggagaaatttggcaaagcctttaaccgctcttctcacctcacgaccgacaagattacacattggagggagatcctgcaggtttag

SEQ ID NO: 212069 - DNA, 1980 bp, synthetic construct
  misc_feature 1..1980: note = Description of Artificial Sequence: Synthetic coding sequence
  source 1..1980: mol_type = other DNA
atgcccggccccccccggagcctggagatgggcctgctgaccttcagggatgtcgcaattgagtttagcctcgaggagtggcagcacctcgacattgcacagcagaacttataccggaatgtgatgctggagaattaccgaaatctggcatttctgggcatcgcagtctctaagcctgacctaataacctgcttggagcaggggaaagagccatggaacatgaaacgccacgaaatggttgacgagccacccgggatgtgtccccactttgctcaggatctctggcccgagcagggtatggaagactcctttcagaaggcaattcttagacggtacgggaaatatggacacgagaacttgcagctccgtaagggctgcaaaagcgtggatgaatataaggtgaacaaagagggctataacgggctgaaccaatgcttcactaccgcacagtccaaagtattccaatgcgataaatacctgaaggtattttataaattcctgaacagtaatagaccaaagattaggcacactgaaaaaaagagctttaagtgtaagaagcgggtgaaattgttctgtatgctctcacacaagactcaacacaagtcaatttaccaccgggagaaaagttacaagtgtaaagaatgtgggaaaaccttcaactggtcgagcaccctgaccaatcataggaagatttatactgaagagaagccttacaaatgcgaagagtacaacaagagccccaagcagttgtctactttaaccacccatgagattatccacgcaggcgaaaagctttacaagtgcgaggagtgcggcgaagcctttaaccgatcctctaacctaactactcacaaaatcattcacaccggcgaaaagccgtataagtgcgaagagtgtgggaaggccttcatttggtcctctacactgacagagcacaaaaaaattcatacccggaaaaagccatacaagtgtgaggagtgcggtaaggccttcatttggagctctacactcacacgacacaaacggatgcataccggagaaaagccctacaaatgtgaggagtgcggcaaggcctttagccagagctctacgttgaccacacataagatcattcacaccggggagaaaaggtataagtgcctcgagtgtggaaaggcctttaagcaactgtccacccttactactcacaaaattatacacgtcggcgagaagctctataagtgtgaagaatgcggtaagggattcaacagatcttctaatctgaccacacacaaaattattcataccggtgagaagccttacaagtgtgaggaatgtggcaaggcttttatttggagctctacattaactaaacacaaacgcattcacactcgcgaaaaaccctacaaatgcgaggagtgtggcaaggctttcatttggtcctccactcttactagacacaagcgcatgcacacaggcgaaaagccatacaagtgcgaggagtgtggaaagtctttcagtcagagtagtacactcaccacacacaagatcatccacaccggcgaaaagccatataagtgtgaggagtgcggtaaggcattcaattggtcttctactctgactaagcataaaatcatccacacagaggaaaaaccgtataagtgcgaaaaatgtgggaaagcatttaagcagtccagtatcctgactaatcacaagcgaattcataccggcgagaaaccttacaaatgtgaagaatgcggcaaaagcttcaatagatcaagcactttcacgaaacacaaggttatccacaccggggtcaagccatataaatgcgaggaatgtggaaaagctttcttctggtcctctactcttactaaacataagagaattcacacaggcgagcaaccatacaagtgggagaagttcggcaaggcttttaatcggtcatcccaccttacaacagacaagatcacgcactggcgcgaaatcctgcaagtctag

SEQ ID NO: 212070 - DNA, 1056 bp, synthetic construct
  misc_feature 1..1056: note = Description of Artificial Sequence: Synthetic coding sequence
  source 1..1056: mol_type = other DNA
atgcccggccccccccggagcctggagatgggcctgctgaccttcagggatgtcgcgatcgagttttccctggaggaatggcagcacctggatattgcgcagcagaatctctataggaacgtgatgctcgagaactacagaaacctagccttccttgggatcgccgtgtccaagcctgacctcataacgtgtctggagcagggaaaagagccttggaatatgaagcggcacgagatggttgatgaaccaccagggatgtgcccccattttgcccaagatctttggccagaacaaggaatggaagattcttttcaaaaggccattctccggagatacggaaagtatgggcacgaaaatttgcaattgaggaaggggtgcaagtccgtcgatgagtacaaagtgaacaaggaaggatacaacggcttgaaccagtgctttaccaccgcccaatctaaggtcttccagtgcgacaaatatctgaaggtcttctataagttcctgaatagcaacagaccaaagatccgccacaccgaaaagaaaagcttcaagtgtaagaaacgagttaagctgttttgcatgctctcgcataaaacccagcataaaagcatatatcatcgcgagaaaagctacaagtgcaaggagtgcggcaaaaccttcaactggagttctacacttacaaatcaccgcaagatttacactgaagaaaaaccctataaatgtgaagagtataacaaaagtcccaaacaactcagtacactgacaacacatgagataatacacgccggagaaaagttatataagtgtgaagaatgtggagaggccttcaaccggagctctacgtttacgaaacacaaggttatccacactggagtgaaaccttacaagtgcgaggaatgtggcaaagccttcttctggtcctctacattaacaaaacacaagagaatccatacaggcgagcagccttacaaatgggagaaattcggtaaagccttcaacaggagctcccacctgacaactgacaaaatcactcactggcgcgagatattacaggtctag

SEQ ID NO: 212071 - DNA, 1884 bp, synthetic construct
  misc_feature 1..1884: note = Description of Artificial Sequence: Synthetic coding sequence
  source 1..1884: mol_type = other DNA
atggccgccgccgagctgaccgcccccgcccagggcatcgtgacctttgaggatgtagcagtatacttctcatggaaggagtggggcctactcgatgaagcgcagaagtgcctatatcacgatgtcatgctggaaaacttaacactcacaacttcccttggcgggtccggggcaggagatgaggaggccccgtatcagcagtcaacttctccacaaagggtctcccaggtgcgaatccctaaggcacttccttcacctcagaaaaccaacccttgtgagatttgcggtccagtgcttaggcagatcctccacctggtcgaacatcagggtacccaccacggccagaaactctacaccgacggagcctgtaggaagcaactgcagtttacggcatacctgcaccagcatcagaagcagcacgtcggtcagaaacatttccggtccaatggcggccgcgacatgttcctgagcagctgtacttttgaagtgtccggaaaacctttcacatgtaaagaagtgggcaaggattttctggtgcggtctaggtttctccagcagcaggccgcgcatacgagaaagaaatctaaccgcactaaatctgccgtcgcgtttcatagtgtgaaaaaccattacaactggggggagtgcgtcaaggccttctcttataagcatgtgcgggtccagcaccagggagacctgatccgggaaaggtcctatatgtgcagcgagtgtgggaaatcattctcaacctcctgctccctgtctgatcaccttcgcgtccacactagcgagaaaccttacacttgtggggagtgtgggaagtcgtataggcagtccagcagcttaattacgcacagaagaattcatactggggtgaggccacaccaatgcgatgagtgcgggaagctgtttaatcgcaaatacgatcttttgatccaccagagggttcatactggggagcgcccatacaaatgttctgaatgcggcaagagctttagtcactctagctctctgatcacacaccaaagaatccacaccgggatgaggccatacgaatgcagcgagtgtggtaagtcctttattcatagttcatcgctgatcacccaccagagagtacataccgggacacggccgtatatgtgtagcgaatgtggcaagtccttttcacagtcctgccacctcattaaacatcgccggctgcatatcggcgaaggcccctatgagtgttcagaatgtggaaagttgttcacatacaggtcacggtttttccagcaccagcgggttcacaccggtgtgcgcagtcatgagtgccacgagtgcgggaagttgttctcacggaagttcgacctcatagttcatgagcgtgtgcatactggagagaggccgtacgaatgttctgagtgtgggaagagcttcacttgtaagtcctaccttatttctcactggaaggtccacaccggcgcgcgcccatatgaatgcggcgagtgtggaaagtcatttacccacagcagtactctgctccaacatcagcgggtacacactggtgagcggccatacgaatgcaatgagtgtggaaaattcttttcccagtctagcagcctaattaggcatcgcagaagccatacaggcgaacgcccctacgagtgttccgaatgctggaagtccttttctaaccactcgtccctggtcaaacatcgtcgggtgcataccggggaacggccttatgagtgctccgaatgcggcaagtctttctcccagtcatctaacttgacgaatcaccagcgcatccacagcggtgagagaccatatgaatgctcagactgtggcaaattttttaccttcaattctaatttgctcaagcatcagaacgtacataaaggttag

SEQ ID NO: 212072 - DNA, 1608 bp, synthetic construct
  misc_feature 1..1608: note = Description of Artificial Sequence: Synthetic coding sequence
  source 1..1608: mol_type = other DNA
atgggccccctgaccatccgggacgtgaccgtggagttcagcctggaggagtggcactgcttagacacagcccagcagaacctataccgcgatgtcatgttggaaaattacagaaacctggtgtttctgggtattgctgtctctaaaccagacctgatcacttgcctcgaacaagggaaggaaccttgcaatatgaagaggcacgagatggtcgccaagccgcccgtgatgtgttctcacattgcagaggatctatgtcctgagagagatatcaaatacttttttcagaaagtcattctcagacgatatgacaagtgtgagcacgagaatctacagctccgaaagggctgtaagtctgtggacgaatgtaaagtgtgcaaaggaggttacaacggcctcaaccagtgcctaatcacgacccagagcaagatgtaccagtgtgacaagtacgtgaaagtgttctacaaatttagcaattcggataggcataaaatacgtcatactgagaaaaagacatgtaaatgtaaagaatgtggcaaggcctttaaccagtcgtccgccttgacacggcacaagatgactcacaccggcgagaagccatataagtgcgaggaatgtggtaaagcatttaatagatcttcccacctgactcaacacaaggtgattcatacaagggaaaaaccatacaagtgcgaagagtgtggtaaggccttcaatcgttcatcccatattacccagcataagcggatccataacagggagaagccctttaaatacgacgaatgctgtaaggccttcaagtggagcagtgccctgactacgctaacgcagcataagcgcattcacactggtgagaaaccctacaaatgtgaagagtgcggaaaggctttcaaccagtcttcagcattaacaaggcataagatgatacacacaggcgaaaagccttttcagtgcgaagaatgtggaaaagcctttaacaggagctcgcacctcacccagcataagatcatacacaccaaggagaagccgtataaatgcgaggaatgcggaaaagcttttaatcgcagctctcacttaacgaagcataagcgaattcacacacgagagaaagcttacaaatgtgatgagtactgcaaagcgtttaactggtcttccgcccttaccacactgacgcagcacaaaattatccacactggcgagaagccctacaaatgtgaagagtgtggtaaagccttcaatcgctcatcttatctaattcggcataagatcattcatacaggcgaaaaaccgtataagtgtgaagagtgtggtaaagcatttaatcagagtagtcacctgactcagcacaaaattattcataccggtgaaaagccgtataagtgtgaggaatgcgggaaggctttcaaccggtcctcccatctctcacaacacaagatcatccacacaggcgaaaaaccctacaagtgcgaggagtgcggaaaacccttcaaccgattctcatatttgaccgtgcataagaggattcatgcaggtgagaaccctaataagtatgaagagtgtgggaaggcctgcaaccattccagtaatctgacaaaacacaactcttag

SEQ ID NO: 212073 - DNA, 1692 bp, synthetic construct
  misc_feature 1..1692: note = Description of Artificial Sequence: Synthetic coding sequence
  source 1..1692: mol_type = other DNA
atgggccccctgaccatccgggacgtgaccgtggagttcagcctggaagagtggcactgcctcgacaccgcacagcagaatctgtatagggatgtcatgctggagaactatcgcaacctggttttcctgggtatcgccgtgtctaaaccagacctcattacttgtcttgagcagggcaaggagccatgcaacatgaagcggcacgagatggttgccaagccacccgtcatgtgtagtcacatcgctgaagacttgtgcccagaacgggacatcaaatatttcttccagaaagtcatcctgcggaggtacgacaaatgtgagcacgagaatctccagttgaggaaaggatgtaaatccgtggacgaatgtaaagtttgtaaaggcggatacaatgggctcaatcagtgcttaatcacgacccagtccaaaatgtaccagtgcgacaagtacgttaaggtgttctacaagtttagtaatagtgacaggcacaaaatacgccacacagaaaaaaaaacttgcaagtgcaaggagtgcggaaagtctttctgcatgcttagtcaattgacaaggcacaaaaggattcacattcgagaaaacagccacaagtgcgaggagtgcggtaaggcctttaatcaaagctctgctctgactagacataagatgactcacactggcgaaaaaccttataagtgtgaggagtgcggcaaagcatttaataggtcttcacacctcactcagcacaaggtcatccacacccgagagaagccttacaagtgtgaagagtgtggcaaagcattcaatagaagctcccatataacgcagcacaaacggattcataaccgggagaaacccttcaagtacgacgagtgttgtaaagcttttaagtggagcagcgctctcactacacttacacagcataagcggatccacaccggtgaaaaaccttataagtgtgaagagtgcggcaaagctttcaaccaatctagtgccctgactagacataagatgatccacaccggtgaaaagccattccaatgtgaggagtgcgggaaagcgtttaaccgtagtagtcatctcacccagcataaaatcattcataccaaggaaaagccttataagtgcgaggaatgcggaaaggcgtttaatcggagcagccatctgactaaacataagcgtatccatactagagagaaggcctacaaatgcgacgaatactgtaaggcctttaactggagcagcgcacttacaactctgacacagcacaaaattatacacacgggggagaaaccgtataaatgcgaggaatgcggaaaggccttcaacagatcttcctacttgataagacacaaaatcatccacacaggtgagaagccttacaaatgtgaggagtgtggtaaggcgttcaaccagtcctcccacttgacacaacataagatcatacacactggagaaaaaccctacaaatgcgaggaatgtggaaaggcattcaatcgatcatcccacctgagtcagcacaagatcatccacactggtgaaaagccatacaaatgcgaggagtgtggaaaaccattcaacaggttcagttacttaacagtgcacaaaaggattcacgccggagagaatcccaataagtatgaggagtgcgggaaggcatgcaaccacagtagtaacttgactaagcacaacagctag

SEQ ID NO: 212074 - DNA, 1692 bp, synthetic construct
  misc_feature 1..1692: note = Description of Artificial Sequence: Synthetic coding sequence
  source 1..1692: mol_type = other DNA
atgggccccctgaccatccgggacgtgaccgtggagttcagcctggaggaatggcattgcctagacaccgcacagcaaaacttgtaccgggatgtcatgctggagaactataggaatttggtgtttctgggcattgccgttagcaagccggacttaatcacctgcttagagcaagggaaggagccctgtaacatgaagagacatgagatggtcgcgaagccaccggttatgtgctcccacatagccgaagatctctgcccggagagggacattaagtacttctttcagaaggtcatcctgcggcgctacgataagtgtgaacatgagaacctccagctgagaaagggatgtaaaagcgtggacgaatgtaaggtctgcaagggcggatacaatggcctgaaccagtgcctcataacgacccagagtaaaatgtaccagtgtgataaatacgtgaaagtattttacaagttctctaactctgatcggcataagatcagacatacagaaaagaaaacatgtaaatgtaaggagtgtggaaagtcattctgtatgctctcccagcttactaggcataaacggattcacatcagagagaatagtcacaagtgcgaggagtgcggcaaagcattcaatcagtcaagcgccctgactagacataagatgacacacacaggagaaaagccctacaaatgcgaggaatgcggaaaggcatttaaccgatcatcacaccttactcagcataaggttatccatacacgggaaaagccatataagtgcgaggaatgtggcaaagcatttaatcgcagctctcacatcactcagcataagaggatccacaatcgtgaaaagcctttcaagtacgacgagtgttgcaaggcattcaaatggagctctgccttgaccaccctgacccagcacaagcgcattcatactggggagaagccctacaaatgcgaggaatgtggaaaggcattcaaccagtcaagcgcccttacacgtcataaaatgattcatactggtgagaagcccttccagtgcgaagaatgcggcaaggccttcaataggagcagtcacctgacgcagcataaaatcatccacaccaaggagaagccttacaaatgtgaagaatgcgggaaggcttttaacagatcctctcacttaacaaaacataagagaattcacacaagagaaaaggcttacaaatgtgatgaatactgcaaggcctttaattggtcctccgctttaacaacactgacacagcacaaaattattcacactggcgaaaaaccctataagtgtgaagaatgcggcaaggcgttcaatcgcagcagctatctgattaggcacaaaataattcatacgggggagaaaccctataaatgcgaggaatgtgggaaggcctttaaccagagttctcacctgacgcagcacaagatcattcataccggggaaaaaccctataagtgcgaagagtgcggtaaggcatttaatcggtcctcgcacctgtctcagcacaaaattatacatacaggagagaaaccttacaagtgcgaggaatgcggcaaaccgttcaacagattcagctatctgactgtccacaagcggattcacgcaggcgaaaatccaaataagtatgaggaatgtgggaaggcctgcaatcattctagcaacttaactaagcacaactcctag

SEQ ID NO: 212075 - DNA, 1602 bp, synthetic construct
  misc_feature 1..1602: note = Description of Artificial Sequence: Synthetic coding sequence
  source 1..1602: mol_type = other DNA
atggccaccagcttccggaccgccagctgctggggcctgctgagctttaaggacatatccatggagtttacctgggacgaatggcagttgctggattcaacccagaaatatctgtaccgggatgtcattctggagaactatcataatctgatcagtgtcggctatcatggtaccaagcccgacctgatatttaaacttgagcagggagaagacccctggataataaacgccaaaatatccagacagtcctgccccgatggttgggaggagtggtaccaaaataaccaggacgagcttgagagtattgaacggtcttatgcctgtagtgtgctaggccgcctgaatctgtcaaagacgcacgatagctccagacagcgcctttacaacacgagaggcaaatctctcacccagaatagtgcacccagtcggtcatatctcagaaaaaatcctgataaattccatggatatgaggagccgtacttcctgaaacatcagagagctcacagcattgagaagaattgtgtatgtagtgagtgcgggaaagctttccggtgcaagtctcagctgattgtccatttgaggattcacacaggcgagagaccctacgagtgctccaaatgtgagcgcgctttctcagccaaatccaacctcaacgcccaccaacgggtgcatacaggtgaaaaaccctattcttgcagcgaatgcgaaaaggtattctcattcaggtcgcagctgatcgttcatcaggagatccacacaggaggcaaaccatatggctgtagtgagtgcgggaaggcctatagctggaaaagccagcttctgttgcaccagagatctcatactggcgtgaagccgtatgaatgttccgagtgcggcaaggcgttctcacttaagagcccctttgttgtgcaccagaggacgcataccggcgtgaaaccacacaaatgctcagagtgcggaaaagccttcagatccaaaagctacctgttagtgcacatcaggatgcataccggagaaaaaccctatcagtgctctgactgcggcaaggcttttaacatgaagacccagctgattgttcatcaaggcgtccacacggggaacaacccctatcagtgcggcgagtgtggtaaagccttcggaaggaaggagcagctgacagcacacttgagggcacatgcaggcgaaaaaccctatggctgctccgagtgcggaaaagccttcagttccaaatcctacctggtaattcacaggaggacgcacacaggagaacgaccctacgagtgttccctgtgcgagagagctttttgcggcaaaagtcaacttattattcaccagaggacccacagcaccgaaaagccttatgaatgtaacgaatgtgaaaaagcttacccgagaaaagccagcttacaaatccatcagaaaacccactctggggagaagccttttaaatgctctgagtgtggaaaggctttcacacagaagtccagtctttctgagcaccagcgcgtgcataccggcgaaaagccttggaagtgttctgaatgtggtaaatctttctgttggaattctgggctccgcatccacaggaagacacataaatag

SEQ ID NO: 212076 - DNA, 1542 bp, synthetic construct
  misc_feature 1..1542: note = Description of Artificial Sequence: Synthetic coding sequence
  source 1..1542: mol_type = other DNA
atggagttcacctgggacgagtggcagctgctggacagcacccagaaatacctgtaccgggatgtcatacttgagaactaccataatctaatcagtgtgggttatcacggaaccaaacctgatttgatcttcaagttagaacagggggaggatccttggataatcaacgccaagatatctagacagtcttgtcctgatggctgggaagaatggtatcaaaataatcaggacgaactagagtcaattgaaagaagctacgcgtgcagcgtactgggtcgtctgaatctgtctaaaactcacgactcgagtcggcagagactgtacaatacccgtggtaagagtctaacacagaatagcgccccaagtcgctcttaccttagaaagaaccccgataaatttcacggatatgaagagccctactttctcaagcatcagagggcccacagcattgagaagaactgtgtgtgtagtgaatgcggaaaggctttccggtgcaagtcccagcttattgttcacctcaggatacacaccggagaaagaccatatgagtgttctaaatgtgagcgggcattttctgccaaaagcaacctgaatgctcatcaacgcgtccacacgggcgaaaagccctacagctgctccgaatgcgaaaaagtattctcgtttcgctcacaactcatcgtgcatcaagagattcacactggcgggaagccgtacggctgttccgagtgtgggaaggcatactcatggaaatctcagcttctgctgcaccagaggagccataccggggttaagccctacgagtgctcagaatgcgggaaagcattctctctgaagtcacccttcgtggtgcaccagcggacccataccggtgttaaaccacataagtgctccgaatgtgggaaagctttccggtcgaagtcctacctgctggtccacattaggatgcacaccggtgagaaaccctaccaatgctccgattgcgggaaggccttcaacatgaagacccaactgatcgtgcatcaaggcgtacacaccggcaacaacccataccagtgcggagagtgtgggaaagcgtttggacgcaaggaacaactgacggcgcatctgcgggcccacgctggcgaaaagccttacggctgcagcgagtgtggaaaagccttttcttcaaagtcttatttggttattcacagaagaactcacacaggtgagcgcccttatgaatgctctctatgcgaaagggccttttgcggtaaatcccaattgattattcaccagaggacccattccacagagaagccatacgagtgcaacgaatgtgaaaaagcgtatcccaggaaagctagcttgcagatacaccagaagacacacagtggagaaaaaccatttaaatgttccgagtgcggaaaagcttttacccaaaaaagtagtttgagcgaacaccagcgggttcacacaggggagaagccctggaaatgctccgagtgtgggaagagcttttgctggaacagcggactaagaatccaccgaaagactcacaaatag

SEQ ID NO: 212077 - DNA, 1239 bp, synthetic construct
  misc_feature 1..1239: note = Description of Artificial Sequence: Synthetic coding sequence
  source 1..1239: mol_type = other DNA
atgatcggcatgctggagagcctgcagcacgagagcgacctgctgcagcacgaccaaattcataccggggaaaagccatacgaatgtaacgagtgtaggaagaccttttcgctaaagcagaatcttgtggagcacaaaaagatgcataccggggagaaatcccacgagtgcacggaatgtggcaaggtgtgcagtagagtctcctcgttgaccctccatctgagatctcacactggcaagaaagcgtataagtgcaataaatgcggaaaagctttcagccagaaggaaaacttcctttctcatcagaagcaccataccggagagaagccctatgaatgcgagaaggtgtccatccagatgcccaccatcattcgtcaccagaaaaaccatacgggaacaaagccctatgcctgtaaagagtgcggtaaggccttcaatggaaaagcatacctgaccgagcacgaaaaaatccacacgggagagaagcctttcgaatgcaatcaatgcgggcgggccttttctcaaaaacagtaccttattaaacaccagaatattcatacaggcaagaagccctttaagtgtagtgaatgcggaaaggctttttcgcaaaaggagaacctaataatccatcaaagaatacacaccggggaaaagccgtacgaatgtaaaggttgcggcaaggcctttatccagaagtctagtctaatcaggcatcagcgctcccatacaggggagaagccctacacctgtaaggagtgcggcaaggcattttcaggaaaaagtaacctcaccgagcacgagaagattcacattggcgagaaaccatataagtgtaacgaatgcggcactatttttagacagaagcaatatcttatcaaacatcataatatccacacgggtgagaaaccctacgaatgtaacaaatgtggcaaagctttctctagaatcacaagcttgattgtgcatgtgaggatccacacaggagacaagccctacgagtgcaaagtatgtgggaaggccttttgtcagtcaagcagtctcaccgtgcatatgagaagtcatacaggagaaaaaccttatggttgcaatgagtgtggtaaggcatttagccagttttccacgctggcccttcacatgcgtattcacaccggcgagaaaccatatcagtgctcagagtgtgggaaggcctttagtcaaaaaagccatcacatcaggcaccaaagaatccacacgcactag

SEQ ID NO: 212078 - DNA, 1239 bp, synthetic construct
  misc_feature 1..1239: note = Description of Artificial Sequence: Synthetic coding sequence
  source 1..1239: mol_type = other DNA
atgatcggcatgctggagagcctgcagcacgagagcgacctgctgcagcatgatcagattcataccggggaaaaaccctatgagtgcaacgagtgtcggaagacctttagcttgaagcagaacctcgtggagcacaagaagatgcacacaggggaaaaaagtcacgagtgcaccgagtgcggcaaggtctgcagtcgagtgtcttccctgactctgcaccttcggtctcacacaggaaaaaaagcctacaagtgcaataagtgcggaaaggcgttttcccagaaggagaatttcctcagccaccaaaagcatcatacgggcgaaaagccctatgagtgcgagaaggtttcaatacagatgccgacaatcattcggcatcagaaaaatcatacgggaacgaagccatacgcttgtaaagagtgtggcaaggcattcaatggaaaggcgtatctgacagaacatgaaaaaattcatactggggaaaagcccttcgagtgtaatcagtgcggccgtgccttcagccagaagcagtacctcatcaagcaccaaaatatccatactggcaagaagccatttaaatgctcagagtgcggaaaagcgttttcgcagaaggaaaacttgatcattcatcagaggatacacacaggagaaaagccctacgaatgtaagggttgtggaaaggcctttatccaaaagagtagtttgataaggcaccagcggtctcacactggcgagaagccttatacctgcaaggagtgcggtaaggccttctccggaaaaagcaacctcacagagcatgaaaagattcacattggggaaaagccttacaagtgtaacgagtgcggaacaatatttcgtcaaaagcagtacctgatcaagcatcataatatccacacaggagaaaaaccgtacgaatgtaacaagtgtggaaaggcgttctctaggattacctctctgatagtgcacgtgcgcatccatacaggggacaaaccatacgaatgcaaggtgtgtgggaaggccttctgccagtctagtagccttaccgtgcacatgcggagccataccggtgagaagccctacggatgcaatgaatgcggtaaggcattctcacaattctccactttggcgctgcacatgcgaattcatactggggagaagccctaccagtgctctgagtgtggaaaggccttttctcagaagtcacatcacatcaggcaccagcgaatccacacccactag

SEQ ID NO: 212079 - DNA, 1884 bp, synthetic construct
  misc_feature 1..1884: note = Description of Artificial Sequence: Synthetic coding sequence
  source 1..1884: mol_type = other DNA
atggccgccgccgtgctgaccgaccgggcccaggtgagcgtgaccttcgacgacgtcgcagtgaccttcaccaaagaagagtgggggcaactggacctggcccagaggaccctgtaccaagaggtgatgctagaaaactgtggactattagtgagcctcggatgtccagtgcctaaggccgaactgatttgccatttggagcatgggcaagaaccctggactcggaaggaggacttgtctcaagacacatgtcctggagataagggtaagccaaagacgacagagcccaccacttgtgagccagctctgagcgaagggatatctctccaagggcaagtgacgcaggggaacagcgtagacagccagctaggccaggccgaggatcaggacgggttatcagagatgcaagagggacattttagacccggcatcgaccctcaggaaaaatccccagggaagatgtcacctgagtgcgatggccttgggactgcggacggggtctgcagccggatcggccaagagcaagttagtccgggcgaccgagtgaggtcccataacagttgtgagtcagggaaagatcctatgattcaggaagaagagaataattttaagtgcagcgagtgcgggaaagttttcaataaaaagcacctgctagcgggacatgaaaagattcattctggcgtgaagccctacgagtgcactgaatgcgggaaaacatttattaagagcacccacctgctccaacaccatatgatccataccggcgaacggccctatgaatgcatggaatgtgggaaggcatttaaccggaagtcttatttaacacagcatcagcgcatccattcgggagaaaaaccttacaagtgcaacgagtgtgggaaagcgtttacccaccgcagtaacttcgtcctgcataaccggcgccacacaggggaaaagagctttgtgtgcacagagtgtggccaggttttcaggcatagacctggattcctaaggcattatgtggtccactctggcgagaacccctacgagtgtctcgaatgcggaaaggtgttcaagcatcggagttatcttatgtggcatcaacagacacacacaggcgagaagccttacgaatgctctgaatgtggaaaggtgttcctggaatctgcagcgctgatccaccactacgtgatccatacgggcgagaaaccgttcgaatgtctggagtgtggtaaggccttcaaccaccgttcttacttaaagaggcaccagcggattcataccggtgagaagcccttcgtgtgttctgagtgcggtaaggccttcactcactgctcaaccttcattctccacaagcgcgcacataccggggagaaaccattcgaatgtaaagaatgcggcaaagcgttttcaaataggaaagatctcatccggcatttcagtatacataccggagagaagccatatgagtgcgtggagtgtggcaaggcctttacaagaatgtctgggttaactcgacacaaacgcatacacagcggagaaaagccctacgaatgcgtggagtgtggaaaatccttttgttggagtaccaatctcattcggcatgccatcatacacactggcgaaaaaccctacaagtgctccgagtgtggaaaggcattcagcaggtcctcaagcttgacccaacatcaaagaatgcataccgggaaaaaccctattagtgttacggacgtggggaggccattcacttcagggcaaacttctgtgaccctccgggaactgctgttgggaaaagatttccttaatgttacaacagaggctaatatacttcctgaagagaccagctcaagtgcctcagatcagccttaccagagagaaacccctcaagtttcatctctgtag

SEQ ID NO: 212080 - DNA, 1884 bp, synthetic construct
  misc_feature 1..1884: note = Description of Artificial Sequence: Synthetic coding sequence
  source 1..1884: mol_type = other DNA
atggccgccgccgtgctgaccgaccgggcccaggtgagcgtgaccttcgatgacgtggctgtaacattcactaaagaggaatggggtcagctggacctggcccagcgcaccctatatcaggaggtcatgttggaaaattgcgggctgctggtgagcctgggctgcccagtgccaaaggcagagctgatctgccatcttgaacatgggcaggaaccctggacgaggaaggaagacttgtcacaggatacctgccctggggataagggaaaacctaaaactactgagcccacaacttgcgagccggcactctccgaggggatttctctacaaggacaggttactcagggcaacagtgtggactcccagctgggccaagctgaagatcaggacggtctgagtgagatgcaagagggccatttcagacccggaattgacccccaggaaaaatcacctgggaaaatgtctcccgaatgcgacggtctgggaaccgctgacggcgtgtgcagcagaattggccaggaacaggtgtcgcccggagaccgtgtacggagccacaactcttgcgagtccggcaaggatccaatgatacaggaagaagaaaataactttaaatgctctgaatgcggaaaggtattcaataagaagcacctgctggcaggtcatgagaagattcattccggagttaagccgtatgagtgcacagaatgtggaaaaacattcatcaaatcgacacacctgctacaacatcacatgattcacacgggcgagcgcccttatgagtgtatggagtgtggcaaagcatttaatagaaagtcttacctaacacagcatcagaggattcatagcggtgagaaaccctacaaatgtaatgaatgcggaaaggcctttactcataggtcaaatttcgtcttacacaataggcggcacaccggtgagaagtccttcgtgtgtacagagtgcggacaggtttttagacatagaccagggttcctccgccattacgtcgtacactccggcgaaaatccttatgaatgcctcgagtgtgggaaagtttttaaacataggtcttatcttatgtggcatcagcagacccatactggcgagaagccttatgaatgcagcgagtgcggcaaagtgttcctcgagtccgccgccctgatccaccactatgtgatccatacaggggaaaagccattcgaatgtctcgagtgtggaaaggcattcaaccaccggtcctacctgaaacggcatcaacgaattcatactggagagaaacctttcgtgtgctccgagtgcggtaaggccttcacacactgttccaccttcattcttcacaagcgggctcataccggagagaagccattcgagtgcaaggagtgcgggaaagctttcagtaacagaaaagacctaattcgccacttctccatacacacgggcgaaaagccatacgaatgtgttgaatgcggaaaggccttcacccggatgtcaggccttacgcggcataagagaattcactcgggggaaaaaccctatgaatgtgtcgagtgcggcaaaagcttttgctggagtaccaacttgatacgtcacgctatcatacacaccggggagaagccatataaatgcagcgagtgcggaaaagcattcagccggtcctcctccttgacacaacatcaacggatgcacaccgggaaaaatcctatcagtgtgacagacgtcggaaggcctttcacctccggacagacctccgtcacactaagggaattactgctgggcaaggactttctgaacgtaactactgaagctaatatactgccggaggagacctcctcatcggcctctgatcagccataccagcgggaaacaccacaggtgtccagtctgtag

SEQ ID NO: 212081 - DNA, 1650 bp, synthetic construct
  misc_feature 1..1650: note = Description of Artificial Sequence: Synthetic coding sequence
  source 1..1650: mol_type = other DNA
atgctggagaactacaagaacctggccaccgtgggctaccagctgtttaagccaagcctgatctcatggttagaacaggaggagtctagaactgtgcagcgaggcgactttcaggcgagcgagtggaaggtgcagctcaaaaccaaggagctggctctccagcaagatgtcctaggggaaccaacctccagcggcattcagatgattggatcacacaacggaggcgaagtgtccgacgtgaagcagtgcggcgatgtatcttccgagcactcctgcttgaaaacccatgtgcgcacccagaattcagagaatacctttgaatgttatctttacggagtggacttcctgaccctccataagaaaacctccacaggggaacagcgaagtgtcttctcccaatgcgggaaggcattcagtctgaaccccgatgtcgtgtgtcaacggacttgtacaggcgaaaaagcctttgactgcagcgattccggaaaaagttttataaaccactcccatctccagggccacttgcgtactcacaacggagaaagtctgcatgagtggaaagagtgcggcagagggttcattcacagtactgatctcgccgtcaggatacagacacacagaagcgaaaaaccatataaatgtaaggagtgcggcaagggattccgctatagcgcctacctgaacattcacatggggactcataccggggacaatccttacgaatgcaaggagtgcggaaaggctttcacaagaagctgccagctcacccagcacaggaaaactcatactggtgagaagccctacaaatgcaaagattgcgggcgtgccttcactgtgtccagctgcctgagtcagcacatgaagattcatgtcggggaaaagccttacgagtgtaaggaatgtggtattgcgttcacacgtagcagccagttaacagaacacttgaagacacacactgcaaaagaccccttcgagtgcaagatctgcgggaagagcttcaggaactcctcctgccttagcgatcactttaggatacatactggaattaaaccatacaagtgtaaggattgtggcaaagcatttacccagaactctgatctcacgaaacacgcccggactcactcaggagagaggccttatgagtgtaaagagtgcggtaaggcctttgcccggtcatccaggttgtcggaacatacacggacccacacaggtgaaaagccattcgagtgtgtcaagtgtggcaaagcttttgcaatcagcagcaatctttctgggcatctgagaatccatactggggagaagcccttcgagtgtctggagtgtggcaaagctttcacacatagttcctccctaaacaaccacatgcggactcacagtgcgaaaaaaccattcacgtgtatggagtgcggtaaggcattcaaatttccgacctgcgtgaacctgcacatgcgaatacacaccggagaaaaaccttacaagtgcaagcagtgcgggaagtccttttcatacagcaacagcttccaattgcacgagcgcacacacacaggggagaagccctacgagtgcaaagaatgtgggaaagcgttctcaagtagctcaagctttagaaaccacgagaggcgtcatgccgatgagcgcctgtccgcctag

SEQ ID NO: 212082 - DNA, 1650 bp, synthetic construct
  misc_feature 1..1650: note = Description of Artificial Sequence: Synthetic coding sequence
  source 1..1650: mol_type = other DNA
atgctggagaactacaagaacctggccaccgtgggctaccagctgttcaaaccgtctctcattagttggctcgagcaagaagaaagtcgaaccgtccaacgcggtgactttcaggcctccgagtggaaagtgcagctgaagaccaaggagctcgcattacaacaggacgtactgggtgaacctaccagtagtggaatccagatgataggaagtcacaatggaggagaggtttcagatgttaaacagtgcggtgatgtctcatctgaacattcttgtttgaaaacacacgtacgaacccagaattccgagaatacctttgagtgttacctatacggggtagatttcctcactctgcacaagaagacttctactggcgaacagcgatccgtattctctcagtgcgggaaagccttctcactcaatcccgacgtggtgtgtcagagaacctgcaccggcgaaaaggcgttcgactgttccgattccgggaagtcttttatcaaccatagccacctgcagggccatctgcggactcacaacggagagtctctgcacgaatggaaggaatgtggaaggggctttatacatagcacagacctggccgtgcggatacagacccataggagtgagaaaccttacaagtgtaaagagtgtggcaagggcttccggtactcggcctacctgaatattcatatggggacccacaccggagacaacccttatgagtgtaaggaatgcggaaaggctttcacacggtcctgccaacttacacagcatcgaaaaacacacaccggggagaagccatacaaatgcaaggattgtggcagagcctttaccgtatcttcctgccttagccagcacatgaagatccatgttggagaaaaaccatacgaatgcaaggagtgcggtatagcattcacccgcagctcccagctcacggagcacttgaagacacacaccgcaaaagatccctttgaatgtaaaatctgcggaaagtcgtttaggaatagttcttgcctttccgaccactttcggattcatacaggaataaagccttacaagtgcaaggactgtgggaaagcattcacacaaaacagtgacctgactaaacacgccaggacccactctggtgaacggccctacgaatgcaaagaatgtgggaaagcttttgctaggagctcaaggctcagtgagcacactcggacccacacgggcgagaagcccttcgaatgcgtaaaatgtggaaaggcatttgcgataagttccaatctgtccgggcatctccgcatacacacaggggaaaaaccgttcgagtgcctagagtgtggaaaggcatttacccatagtagttccctcaacaatcatatgagaacacatagcgctaagaaacccttcacctgcatggagtgcggaaaagcattcaagtttcccacatgcgttaacctccacatgcgcattcacacaggggaaaaaccgtacaagtgcaaacaatgtgggaaatccttctcttattctaattcgttccagctccatgaaagaactcacacaggggagaagccctacgagtgtaaggagtgcggtaaagccttctctagttcctccagctttcgtaaccatgagcggagacatgcagacgaacggctgagcgcctag

SEQ ID NO: 212083 - DNA, 1650 bp, synthetic construct
  misc_feature 1..1650: note = Description of Artificial Sequence: Synthetic coding sequence
  source 1..1650: mol_type = other DNA
atgctggagaactacaagaacctggccaccgtgggctaccagctgtttaaaccatctctcatctcatggctggagcaggaagagtctcgaacagtccagagaggcgactttcaggcgtccgagtggaaggttcagttgaagaccaaggagctggcattgcaacaagatgtgctgggagagccaacctcttcggggatccagatgatagggtcccataacgggggtgaggtctcagatgttaagcagtgtggtgacgtatcatccgagcactcctgtttgaagacgcacgtgaggacgcaaaacagtgaaaacacatttgaatgctatctctacggcgtcgatttcctgaccttgcacaagaaaacaagtaccggagaacaacgcagtgtcttttctcagtgcggaaaagcgttctctttgaaccctgacgtagtttgtcagcggacctgcacaggggagaaggcttttgactgtagcgattcgggcaagtccttcataaatcactcacacctgcaaggtcacctaaggacacacaatggtgaatccctgcatgaatggaaggaatgtgggcgcggatttatccatagtacagatctggctgtgagaatacagacacatcgaagcgaaaaaccctacaagtgcaaggagtgtggaaagggctttagatattccgcctatcttaacatccatatggggactcacacaggcgacaatccatatgagtgtaaggagtgtggtaaagccttcacacggtcatgtcaattaacacagcacagaaaaactcacaccggagagaagccctacaagtgcaaggactgtggtcgagcctttaccgtctcatcatgcctgtctcagcatatgaaaattcatgtcggagaaaagccttacgagtgtaaggagtgtggtatcgcgtttacgcgttcgagccaactaaccgaacacctcaaaacccatactgcgaaggatccattcgagtgtaagatttgcgggaaaagcttccgtaatagcagttgtctgtctgatcattttcggattcacactggcatcaaaccctacaagtgcaaggattgcggaaaggcgtttactcagaattcagatctgactaaacatgcccggacccacagtggcgaacggccctacgaatgcaaggagtgtggcaaggcgttcgctcgatcatcgcgactcagtgagcatacccgaacacacacaggagaaaagccattcgaatgcgtgaaatgcgggaaagccttcgcaattagtagtaatctcagcgggcatctccggattcacaccggtgaaaaaccattcgagtgcctcgaatgcggaaaggctttcacacactccagctctctgaataaccacatgcggacccacagcgcgaagaaaccctttacttgtatggagtgcggtaaagctttcaaattccctacttgcgtgaatctacacatgagaattcacaccggggaaaagccctacaaatgtaagcagtgcggaaaatcctttagctacagtaatagtttccagctgcacgaacggactcatacgggagagaaaccctacgagtgcaaggagtgtggcaaggccttcagcagcagttcttcttttcgaaaccatgagcgccgccacgccgatgaacggctcagtgcatag

SEQ ID NO: 212084 - DNA, 2232 bp, synthetic construct
  misc_feature 1..2232: note = Description of Artificial Sequence: Synthetic coding sequence
  source 1..2232: mol_type = other DNA
atgggcctgctgaccttccgggacgtggccgtggagttcagcctggaggaatgggaacaccttgaacctgcgcagaaaaacctgtaccaagatgttatgttggagaattaccgcaacctagtctccctaggactggtcgtgtctaagccagatctgatcacgttcctcgagcagcggaaggagccctggaatgtgaaaagcgaagaaactgttgcaattcaaccagacgtcttctcacattacaacaaagacctgctgaccgagcattgcacggaagcctcctttcagaaagtgatttctaggcgccatgggagttgcgacctggagaacctacacctacgcaaaagatggaagagagaggagtgtgaaggtcataacggctgctatgacgaaaagaccttcaagtacgatcagttcgacgaatcaagcgtggagagcctgtttcaccagcagattctaagttcatgtgcgaaaagttataatttcgatcagtataggaaggttttcacccatagttcattgctgaaccagcaagaggagatagatatatggggaaaacatcacatctacgacaagacttccgttttattccgtcaagtgagcacactcaattcatacaggaatgtatttataggcgagaagaattaccattgcaacaatagcgaaaaaaccctgaatcagtccagctcccccaaaaaccaccaggaaaactacttcctggagaagcaatacaaatgtaaggagttcgaggaggtgttcctgcagtcgatgcatggtcaggagaagcaggaacagagctacaagtgtaacaagtgcgtggaagtatgcactcagtctttgaagcacatccagcatcagacaatccatatccgggagaactcctatagttacaacaagtacgataaagacctgtctcaaagtagcaacctccgcaaacagattatacacaatgaggaaaagccgtacaaatgcgagaagtgtggtgacagtttgaaccactccctgcacctcacccaacaccagataatccctactgaagagaagccttgcaaatggaaagagtgtgggaaggtgttcaacctcaattgcagcttgtacctcacaaaacagcagcagatcgatacaggtgaaaacctgtataagtgcaaggcttgctcaaaaagttttacacgatcctcgaatctcatagtgcaccagagaatccacacaggcgaaaaaccatacaagtgtaaagagtgtggcaaagccttccggtgttcaagctacctcacaaagcataagcgcatccacacaggcgagaagccgtacaaatgtaaggagtgtgggaaggcttttaaccgttcgagttgtctcacacagcatcagactacccacaccggggaaaagctgtataaatgtaaagtatgcagtaaatcctacgctcgtagcagcaatctgatcatgcatcagagggtacatactggggaaaagccctataagtgcaaagagtgtggaaaagtgttctcccggtctagctgtctgactcagcaccggaagattcacacaggggaaaatttgtacaagtgcaaggtatgtgcaaaaccattcacatgcttctctaatctcatcgtgcacgaacgcatacacaccggcgaaaagccttataagtgcaaggagtgcggcaaagccttcccttatagctcacacctgatcaggcaccatcgcatccacactggtgaaaaaccttataaatgcaaagcttgctccaagtccttctccgattcctccggtctaactgtgcatcggcggacgcatacgggcgagaagccttatacctgtaaggaatgtggtaaagctttttcctatagctccgatgttattcagcatcgcaggattcatacgggtcagagaccatacaaatgtgaggagtgcggtaaagccttcaactataggtcatatttaactacccatcagaggagccacacaggtgagaggccttacaaatgtgaagagtgtggaaaggctttcaatagcagatcttatctgaccactcaccggagacgccacaccggcgagcgaccatataagtgtgatgaatgcggcaaggccttctcatataggtcgtatctgacaacacatcggaggtcacactccggtgagaggccatacaaatgcgaagaatgcgggaaggcctttaactcacgctcatatttgatagcccaccaacgctcccacacccgagaaaagctctag

SEQ ID NO: 212085 - DNA, 840 bp, synthetic construct
  misc_feature 1..840: note = Description of Artificial Sequence: Synthetic coding sequence
  source 1..840: mol_type = other DNA
atgggcctgctgaccttccgggacgtggccgtggagttcagcctggaagaatgggaacacttggagcctgcgcaaaagaatctttaccaggatgtgatgttggagaactacagaaatctggtgagcctaggtttggtggtgagtaaaccagatttattgacagaacattgcactgaggcctcctttcaaaaggtcattagcagacggcatggcagctgtgacctcgagaatctgcaccttagaaaaagatggaagagagaggagtgcgagggtcacaatgggtgttatgatgagaaaacatttaagtatgaccagttcgacgagtcatcagtagagtccctgttccatcagcagatcttgtcctcttgtgccaaatcgtacaattttgaccagtacagaaaagtctttactcactctagcttgctcaaccaacaggaagaaatcgacatctggggaaaacatcatatttatgacaagacctccgtgcttttcagacaggtgtctacactaaactcttacagaaacgtgttcatcggtgaaaaaaactaccactgtaacaattccgagaagactcttaatcagtcttcctcccccaagaaccaccaggaaaattatttcctggagaagcaatacaagtgtaaggaattcgaagaggtttttctccagtctatgcacggccaggagaagcaggaacagtcatacaaatgtaacaaatgcgtggaggtgtgcactcagtccctcaagcacatccagcatcagaccattcacatccgcgaaaacagttactcatataataagtatgacaaggacctctctcaaagctcgaacttgcgcaaatag

SEQ ID NO: 212086 - DNA, 2892 bp, synthetic construct
  misc_feature 1..2892: note = Description of Artificial Sequence: Synthetic coding sequence
  source 1..2892: mol_type = other DNA
atggccaccgccgccgagaccagcgccagcgagcccgaggccgagagcaaggccggtcccaaggccgatggcgaggaggatgaagtgaaggccgctagaacccgtcggaaagtgctaagcagggctgttgcagcagcaacctataagaccatggggccagcgtgggatcagcaggaagagggtgtgtctgaatccgatggcgacgaatacgcaatggcttcctccgccgaatctagtcctggcgagtacgaatgggagtatgatgaggaggaagaaaaaaatcagctggagatcgaacgcctggaagagcagttgtccattaatgtctacgattataattgccacgtagatctcatccgcctgttgcggttagaaggggagctgacaaaggtgcgcatggccaggcaaaagatgtcagagatctttcctctaaccgaggagctttggctggaatggctgcacgatgaaatctctatggcccaggacgggttggaccgggaacatgtgtatgacttatttgagaaagcagtgaaagattacatttgccctaatatatggctcgaatatggccagtactctgtggggggaattggacaaaaaggcggactcgagaaggtccgatccgtctttgaaagggccctctcctctgtaggactccacatgactaagggacttgcgctgtgggaggcttacagggagtttgaaagcgctattgtggaagccgctcggctggagaaggtgcactccctctttcggagacagctggctattcccttatatgacatggaggcaacgtttgccgagtatgaagagtggtccgaggatccaattccagaatccgttatccagaattataacaaggctcttcagcagctcgagaagtacaaaccctacgaagaagctttgctccaggcggaggccccacgtctggccgagtatcaggcctacattgatttcgagatgaagattggtgatccggccaggatccagctgatcttcgaaagagctctcgtggaaaactgcctggtgccagacctgtggatccgctactctcagtatctggataggcagcttaaggtgaaggatctcgtcttgtctgtgcataacagagctatacggaattgcccttggaccgttgctctctggtcccggtatctcctcgccatggagcggcatggggtagaccaccaggtaatatctgtgacatttgagaaggccctcaacgcaggtttcatacaggccacagattatgtggagatctggcaggcctatttagactacttaagaaggagagtagatttcaagcaagacagtagcaaagaacttgaagagctccgggcagctttcacacgggcgctcgaatatctgaaacaggaggtcgaggaaagatttaacgagtcgggagacccatcctgcgtaattatgcagaattgggcgcgcattgaagctcgtctgtgtaacaacatgcagaaggcccgggagttgtgggacagtattatgactcgcggtaacgcgaagtacgccaacatgtggctggaatattacaatctggagagggcgcatggcgatacacaacactgtcggaaggccttacatcgcgcagtgcagtgcaccagtgactaccccgagcacgtgtgtgaggtgctcctgaccatggaaagaaccgaaggctctttggaggattgggatatcgccgttcagaagactgaaacgagacttgcccgagttaatgaacagagaatgaaagcagcagaaaaagaggccgcgctagtccagcaagaggaggagaaggctgagcagcgcaagagagctcgggccgaaaagaaggctctgaagaagaaaaagaaaatccggggcccggaaaagcgcggagcggacgaggacgacgagaaagaatggggggacgacgaggaggagcagccctctaaaaggagaagggtagagaactctattcccgcggcgggagagacacagaatgtagaagtggccgctggcccagccgggaaatgcgctgctgtggacgttgagcctcctagcaaacagaaggaaaaggccgccagtctgaaaagagacatgcccaaggtcttacacgatagctccaaggacagtatcacagtgttcgtctcgaacctcccgtatagcatgcaggaacccgacactaagctgcggcctctgtttgaggcttgtggagaagtcgtgcagattcgacctatctttagtaataggggggactttaggggctattgctatgttgaattcaaggaggaaaagagtgccctgcaggcccttgaaatggatcggaagagcgtggagggtcggcctatgtttgtgagcccctgtgtggataagtcgaaaaaccccgattttaaagtcttccgatatagtacgtccttagaaaaacacaagttgtttatctccggattgccgttctcatgtaccaaagaagagctggaagaaatctgcaaagcacacgggacggtgaaggatcttaggctggtgacaaacagggcagggaaacctaaaggattggcctacgtagaatatgaaaacgaaagtcaggccagtcaggcggtgatgaaaatggacggaatgaccataaaggagaatattattaaagtggccatctccaaccccccacaaaggaaagttcccgagaagccagaaaccaggaaagcgcccggggggcccatgttactgccccagacttacggtgcccgggggaaggggcggacccagctgagccttctgcccagggctctgcagcgtcctagtgccgcagcaccccaggccgagaatgggcctgctgccgctcccgccgtagccgcccccgccgccacagaggcaccaaaaatgagcaacgctgattttgccaagctgttcttgcggaagtag

SEQ ID NO: 212087 - DNA, 1077 bp, synthetic construct
  misc_feature 1..1077: note = Description of Artificial Sequence: Synthetic coding sequence
  source 1..1077: mol_type = other DNA
atggacgccaagagcctgaccgcctggagccggaccctggtgaccttcaaggacgtattcgtcgattttacccgcgaggaatggaaactcctggatacagcgcagcagatcgtatatcgcaatgtcatgctggagaactataaaaatcttgtgtcccttgggtatcaactgacgaagcctgatgtgatcctccgcctagagaagggggaggaaccctggctggtagaacgggagatacaccaggagacacatcccgactccgagacagcctttgagataaaatccagcgtcagcagtagaagcatcttcaaggacaagcaatcttgcgacattaaaatggagggcatggccaggaatgatctgtggtacctttccctcgaggaggtgtggaaatgccgggaccagctggataaataccaagagaaccccgagaggcatttgagcattccccgagtgctgagtctcccagcacgccacactaagctcaccgtgggtatggctactcgcgtacgaaccgcttccatctgggttcctcccctccaggaaaggaatagcagctgggacaggatccggaagcttcaggggcaggaaagtattttaggacagggaaccccagggctccagcccctgcctgggacgcccagacagaaacaaaaatctcgcagaattgagaaggtgctggagtggcttttcatctcccaggaacagcctaaaataactaagagttggggaccactgtctttcatggatgtcttcgtcgatttcacatgggaggaatggcagctgctggatcctgcacagaagtgcctctaccgatcggtgatgctggaaaactattctaacctggtctcactgggctaccaacacacaaagcccgacattatttttaagctggagcagggagaagagctgtgcatggtgcaagcccaggtacctaaccagacttgccccatccttaaggccggcaagtctaaggctaaggtgctggcgggtctggtgagtggggagggcctgctttgcgcaagcaagatgactccttgctgttgcatcttgtggcgccactcacttgagaactag

SEQ ID NO: 212088 - DNA, 504 bp, synthetic construct
  misc_feature 1..504: note = Description of Artificial Sequence: Synthetic coding sequence
  source 1..504: mol_type = other DNA
atggccacccgggtgcggaccgccagcatctgggtgccccccctgcaagaacgaaatagcagctgggaccgaataagaaaactgcagggacaggaatctattcttggccagggcactcctggtttgcagccacttcccggaacccccagacaaaaacaaaaatcacgacgtatcgagaaggtcctggagtggttatttatctcacaagagcagcctaaaatcacaaaatcctgggggactaacacccctaacctgattagcagtagcagttggaacaaggaaaaaagctgtgtatggtgtcgacccaaattccagatccgacctgttcaaacacagtcaggcaaattaatgattctgtggatcggaatcagaaaaattaagacttcctgggaagtgcgccagaaagctctcaacgcgcttcacttagaaaactacgtgttcctggtgcagtcaattttccaggacaagaacctgataaacgttgcacggatggagcgtgtttag

SEQ ID NO: 212089 - DNA, 2361 bp, synthetic construct
  misc_feature 1..2361: note = Description of Artificial Sequence: Synthetic coding sequence
  source 1..2361: mol_type = other DNA
atggactggcaccaggagaacaaggacaagctgggcagcaccgccaaatccttcgaatgtacaacgtttgggaagctctgcttgctgagcacaaagtacctgtcccggcagaagccacataagtgcggaacacatggcaaatctttgaaatacatcgacttcacttcggattatgccagaaataaccccaatggcttccaggtgcatgggaaatccttctttcacagcaaacacgaacagactgtgattggcattaaatactgcgagtcaattgaatctggcaagaccgtgaataagaagtctcagttgatgtgccagcagatgtacatgggggagaagccttttggatgctcgtgctgcgagaaagctttctcatcaaagtcatacctcctagttcaccaacagacccacgcggaggaaaagccctatggatgtaatgaatgtgggaaagatttctcttctaaaagctatctgatagtgcaccagcggatccatacaggcgagaagctgcatgagtgttcggaatgccggaagacattctccttccactcccagctggttatccaccagaggatacacacgggcgaaaacccctatgagtgttgtgagtgcgggaaagtcttcagtcgcaaggaccagcttgtcagccaccagaaaacccactcaggccaaaaaccatacgtctgtaatgaatgtggcaaagcctttggcctcaagtcccaactcatcatccatgaacgtatccacacgggtgagaagccctatgagtgtaatgaatgccagaaggcttttaacactaaaagtaatctcatggtccaccaacgcacccacaccggcgaaaaaccatacgtctgctccgactgcggaaaggcgttcacattcaaaagccaattgatcgtgcaccagggcatccacacaggagtgaagccgtatggctgcattcagtgcggaaaggggttctctcttaaatctcagttgattgtgcaccaaagaagtcacacaggaatgaagccctatgtgtgtaacgagtgcgggaaagcattccgctccaaatcatatcttatcatccacacccgcacacacacaggagagaaattacatgagtgcaataattgtggcaaagctttttcattcaagtctcagctcataatacatcagaggatccacacgggagaaaatccatacgagtgtcacgagtgtggcaaggctttcagtagaaagtaccaattaattagccaccagagaacccacgcaggagaaaagccctatgaatgcacagattgcggcaaagccttcggtctcaagtcccaactcatcattcatcaaaggactcatacaggtgagaagccctttgagtgtagcgaatgtcagaaggctttcaatacaaaaagcaatttgatagttcaccagagaacccatactggggagaaaccatatagctgcaatgagtgcggcaaagctttcacgttcaagtctcagctgatcgtgcacaaaggggtgcataccggcgtcaaaccgtatggctgttcacagtgcgcaaagaccttttccctgaagagtcagcttattgtacatcagcggagccatacaggggtaaaaccatacggctgtagcgagtgcggtaaggctttccggtctaagtcatacttaattattcatatgcgcacgcacacaggcgaaaaaccccacgaatgccgcgaatgcggcaaatctttcagcttcaatagccagctcattgtgcatcagcggatacataccggggaaaacccttatgaatgctctgagtgtggtaaagcttttaaccggaaggaccaactgattagccaccagcgcactcatgcaggagagaaaccatatgggtgttccgaatgtggcaaggctttcagtagcaaatcttacctaatcattcacatgcggacacactctggcgaaaagccttatgaatgcaacgagtgcgggaaggcctttatttggaagagtttgctgattgtacacgaaagaacacacgccggcgtgaacccctataaatgttctcagtgcgagaagtctttctcaggcaaacttcggttactcgttcaccagagaatgcatactcgagaaaagccctatgaatgtagtgagtgcggaaaagcctttataaggaactcccagctgatcgtccatcagaggactcactcaggtgaaaagccttacggctgtaatgagtgcggcaaaacttttagtcaaaagagtatcctgagcgcacatcagcgtactcataccggcgaaaaaccatgcaaatgcacagagtgcgggaaggccttttgctggaaatcccaactgatcatgcatcagagaacacatgtggatgacaaacactag

SEQ ID NO: 212090 - DNA, 2844 bp, synthetic construct
  misc_feature 1..2844: note = Description of Artificial Sequence: Synthetic coding sequence
  source 1..2844: mol_type = other DNA
atggccacccgggtgcggaccgccagcatctgggtgccccccctgcaggagcggaactcctcttgggatcgaatccgtaaactgcagggacaggaaagcatcttggggcagggcaccccaggattacagcctttgcctgggactccaaggcaaaagcagaagagcaggcgcatcgagaaggtactggaatggctgttcatcagtcaggaacaaccgaaaattacgaagagttggggaccccttagctttatggacgtcttcgtggatttcacttgggaggaatggcagcttcttgaccccgctcaaaagtgcttgtaccggtctgtcatgctcgaaaactattccaatctggtgagcctgggctatcagcatacaaagcctgatatcattttcaagctggagcaaggcgaagagctgtgcatggtccaggcccaggttcccaaccagacatgtcccaatacagtttggaagatcgacgatctaatggattggcaccaggaaaataaggacaaactgggatccacggccaagagttttgaatgcacaactttcggtaaattatgtctcctgagtaccaagtatttatctcggcagaaaccacataaatgtggcacacacggtaagtcactaaaatatatcgactttaccagcgactatgccaggaacaaccccaacggcttccaggtgcacggcaaatcattctttcactcaaaacatgagcagacagtaatcgggatcaagtactgcgagagcatcgaatcaggcaaaaccgtgaacaaaaagtcccagctgatgtgccagcagatgtatatgggagagaagccattcggctgctcttgctgtgaaaaggcattttcctccaaaagttatttgctagtacaccagcagacccacgcagaagagaaaccatacgggtgcaacgaatgcggcaaggattttagcagcaaaagctacctgattgtccaccagcggatacacaccggcgaaaagctccatgagtgttcagaatgccgcaaaacttttagcttccattctcagctggtgattcatcagcgaatacacacaggcgaaaacccttatgagtgttgtgagtgcggcaaggttttctctagaaaggaccagctggtgtcacatcagaagacacattctggccagaaaccttacgtatgcaatgaatgtggcaaagctttcggactgaagtcacagttgattatccacgagcgaattcatactggtgagaagccatatgagtgtaacgaatgccagaaagcttttaatacaaagtcaaacctgatggtgcaccagaggacacatactggcgagaagccatatgtttgttcggactgtggaaaagctttcacattcaagtctcagctcatcgtacatcagggtattcacactggcgtgaagccttatgggtgtatccagtgtgggaagggcttctccttgaaatcccagctcatcgtccaccaacggtcccacacgggcatgaaaccctacgtgtgtaacgagtgtggcaaggctttccgctcaaagtcctacctcatcatccacacgagaacgcacaccggcgaaaagctacacgagtgtaataactgcggcaaggcctttagctttaaatcgcagctgattatccatcagcggatccacacgggcgagaacccgtatgagtgtcatgaatgtgggaaagctttttcccgaaagtatcagctcatctcacatcagagaactcacgccggagagaaaccttatgaatgcacggactgcggaaaagcatttggactaaaatcacagttgattatccatcaaagaacacacacaggagagaagccctttgaatgttctgaatgccagaaagcctttaatactaaaagtaaccttattgtccaccagaggactcacactggagaaaagccatactcatgtaacgagtgtggcaaagcgtttacattcaagtcgcaattaatcgtgcacaaaggagtgcataccggcgtgaagccctacggctgttctcagtgcgccaaaacattttcactgaagtcccaactcatcgtgcaccagagatcacacacaggcgtgaaaccctatgggtgcagcgagtgtgggaaggcctttcgcagcaaaagctacttgataatccatatgcggacccacactggcgaaaagcctcacgagtgtagggaatgcggaaaatcgttctcctttaactcgcaactcatcgttcaccaacgtatacataccggagagaacccgtacgaatgttccgagtgtggcaaggctttcaaccggaaggatcagctgatttcccaccagagaacccatgcaggagaaaaaccctacgggtgctctgagtgtggaaaagcattttcgagcaaaagttatctgatcatacatatgaggacccatagcggagagaagccctacgaatgcaatgagtgcgggaaagccttcatttggaagagcttgttgattgtccacgaacgcacccatgctggcgtgaatccgtacaaatgctcacagtgtgagaagtcctttagtggcaagctcaggctgctggtccatcaacggatgcatactcgagaaaaaccttatgagtgctctgaatgcggcaaggctttcattagaaactcccaactgatcgtgcatcagcgaacgcacagtggtgaaaaaccatacgggtgtaatgagtgtggcaaaaccttcagtcagaagtctatcctgtcagcccaccagcggacacacacgggggaaaagccttgcaaatgcactgaatgcggcaaggcattctgctggaaatctcagctgattatgcaccaacggacacacgtagacgataagcactag

SEQ ID NO: 212091 - DNA, 2193 bp, synthetic construct
  misc_feature 1..2193: note = Description of Artificial Sequence: Synthetic coding sequence
  source 1..2193: mol_type = other DNA
atggactggcaccaggagaacaaggacaagctgggcagcaccgccaaatcatttgagtgcacaacttttggcaagctgtgtcttctaagcacaaaatatctctcccgccagaagccacataagtgtggaactcatggtaagagtctaaaatatatcgattttacctctgactacgcccggaacaatcctaatgggtttcaggttcatgggaaaagctttttccacagcaagcatgaacaaaccgtcataggaattaagtactgcgagagcattgagtctgggaaaactgtcaataagaagtctcaactgatgtgccagcagatgtatatgggtgaaaagccatttggatgctcatgctgtgaaaaggctttctcgagcaaaagttatctgttggtgcatcagcagacccatgccgaagagaagccctacggctgcaacgagtgcggaaaggatttctctagcaagtcttatcttatcgttcaccagcgcattcacaccggtgagaagctgcacgagtgcagcgaatgtcgtaaaactttctcattccatagccagctggtgattcaccaacggatacatactggtgagaacccatacgagtgctgcgaatgcggtaaagtgttttcccggaaggatcagctcgtatctcaccagaagacacattctgggcaaaagccttacgtttgcaatgagtgcggaaaagcattcggtcttaagtcccagttaattatacatgaacgcatccacacgggtgaaaaaccctacgaatgtaacgagtgccagaaggccttcaacaccaaaagtaacctgatggtgcaccagcgcacccatactggtgaaaaaccttacgtgtgcagtgactgtggaaaggccttcacttttaagtctcagctgatcgtgcaccaaggaattcatacaggcgtgaagccttacggttgtattcagtgcggtaagggattctcactgaaatcccagctgatcgttcaccagaggtcccacacaggtatgaaaccctacgtctgcaatgagtgtggtaaggcattcagatctaagtcctatcttatcattcatactaggacccatactggcgaaaaattgcatgaatgcaacaattgtggaaaggccttctcattcaagtcacaactcatcatccaccagcgcatccatacaggggagaatccctacgaatgtcatgagtgcgggaaagctttctccagaaagtatcagttgatctcacatcagcgcacgcatgcgggtgaaaagccctatgagtgtacagactgcggaaaggccttcggcctgaagagccagcttatcatccaccaaagaacacacacgggggagaaaccattcgagtgctcagagtgtcagaaggcctttaacacgaaaagtaatctcattgtgcaccagcggactcacactggcgagaagccctacagttgcaacgagtgcgggaaggccttcaccttcaagtcacagctaatcgtgcacaaaggcgtgcacacaggcgtgaaaccatacgggtgcagccagtgtgcaaaaaccttttccctcaaatctcagctgatagtacatcaacggtcccatactggggtcaaaccttatggctgcagtgagtgtggcaaggccttccgcagtaagtcatacctcataatacatatgcggacccacactggcgagaaaccgcatgaatgcagggaatgtggcaagagctttagttttaactctcagctgatcgtccaccaacggatccataccggcgaaaacccatacgagtgcagcgaatgcggcaaagcttttaatcgtaaggatcagcttattagtcaccagcgaacgcacgctggcgaaaagccatatggatgttcagagtgcgggaaggctttcagcagcaaaagctacctgattattcacatgcggacgcactccggggagaagccatacgagtgcaatgagtgcggcaaggcatttatctggaagtcactgctgattgtacacgaacgaacacacgctggcgtcaatccctacaagtgcagccaatgtgagaagtccttcagcgggaaactgaggctgcttgtacatcagcgaatgcatacacgtgagaaaccttacgaatgtacagaatgcgggaaagctttctgctggaagtcacaactgatcatgcaccagcgcacccatgtcgatgacaagcactag

SEQ ID NO: 212092 - DNA, 303 bp, synthetic construct
  misc_feature 1..303: note = Description of Artificial Sequence: Synthetic coding sequence
  source 1..303: mol_type = other DNA
atggccacccgggtgcggaccgccagcatctggggcaccaacaccccaaatctgatcagtagcagttcatggaacaaggaaaaatcctgcgtgtggtgtcgacctaaatttcagataagacctgtgcagacacagtctggcaagctgatgattctgtggattggcatccgaaaaattaaaaccagctgggaagtgcgacagaaagctctaaatgcgttgcacctggagaactatgtcttcctggtgcagtcaattttccaggacaagaatctgataaacgtggctcgcatggagcgcgtgtag

SEQ ID NO: 212093 - DNA, 381 bp, synthetic construct
  misc_feature 1..381: note = Description of Artificial Sequence: Synthetic coding sequence
  source 1..381: mol_type = other DNA
atggccacccgggtgcggaccgccagcatctggggccccctgagcttcatggacgtgtttgtggattttacatgggaagaatggcagttgttagacccggctcaaaaatgcctgtacaggtctgtgatgctggagaattatagtaatctggtatctcttggctaccagcacaccaagcctgacattatctttaagctagagcaaggcgaggaactgtgtatggttcaggcacaagtgccgaatcagacatgtcctattctgaaggcaggcaaatctaaggcaaaggttctggccggcctcgtctctggcgagggccttttgtgtgcctcaaagatgaccccctgttgctgcatcttgtggcgtcactctcttgaaaactag

SEQ ID NO: 212094 - DNA, 207 bp, synthetic construct
  misc_feature 1..207: note = Description of Artificial Sequence: Synthetic coding sequence
  source 1..207: mol_type = other DNA
atggccacccgggtgcggaccgccagcatctggacccagagcggcaagctcatgatcctgtggattggcatcagaaagattaagaccagctgggaggtgaggcagaaggctttgaacgcacttcatctggaaaactacgtgttcttggttcaatctattttccaagacaagaatctcataaatgtcgcccggatggaacgagtgtag

SEQ ID NO: 212095 - DNA, 504 bp, synthetic construct
  misc_feature 1..504: note = Description of Artificial Sequence: Synthetic coding sequence
  source 1..504: mol_type = other DNA
atggccacccgggtgcggaccgccagcatctgggtgccccccctgcaagagaggaatagttcatgggatagaattagaaaactgcagggccaggaaagtatcctgggtcagggcactcctggcctacaacctttgccgggaacaccaaggcagaaacagaaatctcggcgtatcgaaaaggtgctagaatggctcttcattagccaggagcagcccaagattactaagtcgtggggcacgaacactccaaacctgataagttcatctagttggaacaaggagaagagctgtgtgtggtgtaggccaaaattccagatccgccctgtgcaaacccagagtgggaaactcatgattttatggatcggtatacgcaaaataaagaccagctgggaagtgcgacagaaagcccttaacgcccttcatctggagaactacgtgtttctggtccagtctatcttccaggataaaaacctcattaatgtggcgcggatggaaagagtctag

SEQ ID NO: 212096 - DNA, 381 bp, synthetic construct
  misc_feature 1..381: note = Description of Artificial Sequence: Synthetic coding sequence
  source 1..381: mol_type = other DNA
atggccacccgggtgcggaccgccagcatctggggccccctgagctttatggacgtcttcgtggacttcacatgggaggagtggcaattgctggaccctgcacagaagtgtctgtacaggagtgtgatgcttgaaaactactcgaacctggtttcactggggtatcagcacaccaaaccagacattatttttaagctcgaacaaggggaggagctttgcatggtgcaggcgcaggttcccaaccagacttgtcctattctgaaggcaggaaaatctaaggcaaaagtcctagcaggtctggttagcggggagggattgttgtgtgcttcgaaaatgaccccctgctgttgcattttgtggcgccattcgcttgaaaactag

SEQ ID NO: 212097 - DNA, 1959 bp, synthetic construct
  misc_feature 1..1959: note = Description of Artificial Sequence: Synthetic coding sequence
  source 1..1959: mol_type = other DNA
atggccagccggctgcccaccgcctggagctgcgagcccgtgaccttcgaagacgtgacgctgggatttacccctgaggagtgggggctgctggatctgaaacagaagagcctgtaccgtgaagttatgctagagaactatcgcaacttagtctctgtggaacaccagctcagcaagcctgacgtcgtcagtcagctcgaagaggcggaagacttctggcctgttgaacgtggcatccctcaggatacaatacccgagtatcccgaactccagctggatccaaaactcgaccctctgcctgcggaaagcccactgatgaatatcgaagtggttgaagtgttaacactgaatcaagaagtagccggcccacgcaacgcacaaattcaggctctttatgccgaagacggttcacttagcgccgatgctccaagtgagcaggtgcagcaacagggcaagcacccaggagatcccgaggctgcccgccagcggttcaggcagtttcgctacaaagatatgacaggccctcgggagctggaccagctgcgtgagctttgtcatcaatggctacagcccaaggccaggtcaaaagagcaaattctggagctgctcgtgttggagcaattcctcggggcactgcccgtaaaactgaggacatgggtcgaatctcagcatcccgaaaactgtcaggaagtggtggctctggtagaaggagttacatggatgagcgaagaagaagttctgcctgccggccagccagcggaaggtaccacatgttgcctggaagtgaccgcccagcaagaagagaagcaggaggatgccgctatttgcccagtaacggttctgcccgaagagccagtgacattccaggatgtcgccgtcgatttcagcagggaggaatggggcttgctgggaccaacccagaggacggagtatcgtgatgttatgctggagacattcggccaccttgtgtcggtcggatgggaaaccaccctggagaacaaggaactggcacctaatagcgatatccccgaggaggagccggctcctagcttaaaagtgcaggaaagtagtcgcgattgtgctctatcatccaccctggaagacaccctccagggcggcgtccaagaggtccaggacacagtgctcaagcagatggaatccgcgcaggaaaaggacttaccgcaaaagaagcatttcgacaatcgcgagagccaggcaaactcaggtgcactcgacaccaaccaagtgagcctgcagaaaatcgacaaccctgagagccaggccaattcgggcgcgctggacactaaccaggtgctgctgcataagattccccctaggaaaagactcaggaagcgcgattctcaggtgaaaagcatgaagcacaattctagagtcaaaatccatcagaagtcctgtgagcgccagaaagcaaaggagggcaacggctgtagaaagacattcagcaggtcaaccaagcagattacctttataaggatccataaagggtcccaggtttgccggtgtagtgaatgtggcaagatcttcaggaatcccaggtacttctccgtacacaaaaaaatccacactggagaacgcccttacgtgtgtcaggattgtggaaagggtttcgtccaatcgtccagcttgactcagcatcagcgggtccatagtggtgagaggcctttcgagtgtcaggagtgtggtcggacatttaatgataggagcgccatctctcagcatctgagaactcacactggtgccaagccatacaagtgccaggattgcggcaaagcttttagacagagcagtcatctaattcgacaccagcggacccatacaggggaacgcccatacgcatgtaataagtgcggaaaggcgtttactcaatcaagccatctgattgggcatcaaaggacccacaacagaaccaaaagaaaaaagaagcaaccgacctcctag

SEQ ID NO: 212098 - DNA, 1863 bp, synthetic construct
  misc_feature 1..1863: note = Description of Artificial Sequence: Synthetic coding sequence
  source 1..1863: mol_type = other DNA
atggccagccggctgcccaccgcctggagctgcgagcccgtgacctttgaagatgtaaccctgggctttacacccgaggaatggggtctgctggacctgaagcagaaatccctttaccgggaagttatgctggagaattatagaaaccttgtctctgtggaatacccagagctccagttggatccaaagctggatcccttgccagcagagagccctctgatgaatatcgaggtggttgaggtgctaactttgaatcaggaagtagctggtcccaggaacgcccagattcaagccttgtatgcagaggacggcagccttagcgccgatgccccttcagagcaagtccagcagcaaggcaaacaccctggcgaccccgaagccgcaagacagagatttagacaattcagatacaaggatatgaccgggccacgggagctcgatcagctgagagaattgtgccatcaatggctacaacccaaagccagaagcaaggagcagatattagagcttttggtgttagagcagtttctcggcgcactgccagtgaaactgaggacatgggtggaaagccagcaccccgaaaactgtcaagaagttgttgctctcgtcgaaggcgtgacttggatgagtgaggaagaggtcctcccagccggccagcccgctgagggaactacctgctgcttggaagtgactgcgcagcaggaggagaagcaggaggatgcagccatatgtcccgtcaccgtcctacccgaggagccagtcacctttcaggacgttgctgtggactttagcagagaggaatggggcctgctgggacccacccaaaggaccgaatacagggacgtgatgttggagacatttgggcaccttgtatccgtaggatgggaaacaactctggaaaataaagagctcgctccaaacagtgatatccccgaagaggagcccgcacctagcctcaaggtgcaggagtcgtcacgggactgtgcactgagttccacgctcgaggatacgctacaaggtggggtacaggaggtgcaagacacagtacttaaacagatggaatctgctcaagagaaggacttaccgcagaagaaacacttcgacaatcgcgagagccaggccaattcaggagccctggacactaaccaggtgtcactgcaaaaaattgacaaccccgagtctcaagctaactcaggcgccttagacacgaatcaggttctgctccataagatcccgccccgcaagcgcctgaggaaaagagactcacaggtgaagagtatgaagcacaattcgcgagtcaaaattcatcagaaaagctgcgaacggcagaaggctaaggaaggtaacggctgccggaaaaccttctcccgatctactaaacagataacctttattaggatccataagggatcccaagtatgccgctgtagtgagtgtggtaagatctttagaaatccacggtatttctctgtgcacaagaagattcacacaggcgagagaccctatgtctgccaggactgtggtaaaggcttcgtccagagttcctcccttacccagcaccagagagtgcattcaggggaaagaccctttgagtgtcaggaatgtggaagaaccttcaatgacagatcagccatcagtcaacacctgagaacccacaccggagccaaaccgtataagtgtcaagattgtggaaaggcattcaggcagagctcccatctgattcgacaccaacgcacccatacaggagaacgaccatacgcatgtaacaagtgcggcaaagcctttacgcagtcttcgcacctgatagggcatcaacgtacacataatagaaccaagcgcaaaaagaaacaacccaccagctag

SEQ ID NO: 212099 - DNA, 1644 bp, synthetic construct
  misc_feature 1..1644: note = Description of Artificial Sequence: Synthetic coding sequence
  source 1..1644: mol_type = other DNA
atgaacatcgaggtggtggaggtgctgaccctgaaccaggaggtggcaggccccagaaacgctcagatacaggcgttgtacgcagaagatggatcgctgagcgcagacgccccatcagagcaggtgcagcagcaggggaagcacccaggcgatccagaggccgcacggcaacgattccggcagttccgatacaaggacatgactggaccacgggagctagaccagctgcgtgaactttgtcatcagtggctgcagccgaaagcccgctccaaagaacagattttggaactgctggtgctggagcagttcctaggcgcgctgcctgtgaagttaaggacttgggttgagagccaacatcccgagaattgccaggaagtcgtcgctcttgtggagggggtgacgtggatgtcagaggaggaagtcctgccagccggccaaccagccgagggcacaacctgttgtttagaagtgactgcccaacaggaggagaaacaggaggatgccgccatttgcccggtgactgttttgccagaagaacccgttactttccaggatgtcgccgtcgatttctccagagaagaatggggcttacttgggcccacacagcgaactgaataccgcgatgtcatgctggagacgttcggacatctggtgagcgtcgggtgggagacaaccctcgagaacaaggagctggccccaaacagcgatattccagaagaggaacccgccccatcccttaaagtgcaggaatccagccgtgattgcgctctcagcagcaccctagaggacacgctacagggaggagtacaagaggtacaagatacggtcttaaaacagatggagagcgcccaggaaaaggacctgccacagaagaagcacttcgacaatcgcgagtctcaggccaatagcggcgctttggatacaaatcaagtgtcccttcagaagatagacaaccccgagtcgcaagccaatagcggagcactggacacgaaccaggtgctccttcataaaatccctccaaggaagcgtctcagaaagcgcgatagtcaggtcaagtcaatgaagcacaacagtagggtgaagattcatcagaaatcatgtgagagacaaaaagcgaaggaaggaaatggatgtcgcaagacattttcacgatcaacaaagcagattactttcattaggattcacaaaggcagccaggtttgccgatgttcagaatgtgggaaaattttcaggaacccccgctacttctccgtgcataaaaagatccacaccggtgaaaggccttacgtttgtcaggattgcggcaaaggcttcgtgcagagttcaagtctaacccagcaccagcgggtgcactcaggggaaaggcccttcgaatgccaagagtgtggccgaaccttcaacgaccgctccgcaatatcccaacatttaagaacccataccggagctaagccatataagtgtcaggactgcggtaaggctttccgccagtcttcacacctgattcgccatcagcgcacgcatacaggagagcggccttatgcctgtaataaatgcggtaaggcatttactcagagcagtcacctaattgggcaccaacgaactcacaatagaacaaagaggaagaaaaaacagccgacttcttag

SEQ ID NO: 212100 - DNA, 1353 bp, synthetic construct
  misc_feature 1..1353: note = Description of Artificial Sequence: Synthetic coding sequence
  source 1..1353: mol_type = other DNA
atggccgccagcaagacccagggcgccgtggcccggatgcaggaggacagagatgggtcctgttccacggtaggcggtgtaggttacggcgattccaaagactgcattctcgaaccactgtcccttcctgaatcccctggaggcaccacgacactggagggatccccttccgtcccctgcatcttttgcgaggagcactttcccgtagccgaacaggataagctgctgaaacacatgataatcgaacacaaaatcgtgatcgcagatgtcaagttagttgccgacttccagagatatattctgtattggcgcaagcgcttcactgaacagccaattaccgatttctgcagtgtgattcgaatcaactctacagctccctttgaagagcaggagaattatttcctgttgtgtgacgtgctgccagaagacagaattctgcgagaggaacttcagaaacagaggctacgggagatcttggagcagcaacaacaggagcgaaacgacacgaatttccacggggtctgcatgttctgtaatgaggagtttcttggaaatcggtcagtgatactaaaccatatggctcgagagcacgcctttaacattggactgccagataatattgtaaattgtaatgagttcctttgtaccctgcaaaagaagctggataaccttcaatgtttatattgcgaaaagacctttcgggacaagaatacccttaaggatcatatgcgtaagaaacagcaccgaaagattaatccaaagaatagggagtacgataggttctatgtgattaattatttagaactggggaagagttgggaggaggtgcaactcgaggatgaccgcgaattactggaccaccaagaggatgattggtccgattgggaagagcacccagcttctgcggtctgtttattctgcgaaaaacaggcggaaacaattgagaaactttatgttcacatggaagatgctcacgaattcgacctgctaaagataaagtctgaacttggactcaacttctaccagcaggtgaaactggtaaacttcatacggcgccaagtgcaccagtgcagatgttacggctgccatgtgaagtttaagtcaaaggctgacttacgaacacacatggaagagactaagcatacaagtctgctgccagaccgcaagacctgggaccagttggaatactactttcctacttatgagaatgacacactcctgtgcaccttgtccgatagcgagtccgacttaaccgcccaggaacaaaatgagaatgttcctatcattagcgaagacacttcaaaattgtatgccttgaagcaatcttctatccttaaccagctcctgctctag

SEQ ID NO: 212101 - DNA, 873 bp, synthetic construct
  misc_feature 1..873: note = Description of Artificial Sequence: Synthetic coding sequence
  source 1..873: mol_type = other DNA
atggccgccagcaagacccagggcgccgtggcccggatgcaggaggaccgtgacggcagttgcagcaccgtcggtggcgtgggctacggtgatagcaaagactgcattctggagcccctcagtctgcctgaatcgccaggcggaaccacaacactggaaggatccccaagcgtgccttgcatcttctgcgaggagcacttccccgtagctgaacaggacaagttacttaaacacatgattatcgagcacaagatcgttatagctgacgttaaattggtggccgatttccagcggtacattctttactggagaaaaaggtttacggagcaacccatcacggatttctgttcagtaatcaggattaattccacagccccttttgaagaacaggagaactactttctattgtgtgatgtgctcccggaagaccggatcctgcgggaggagctgcaaaagcagcgcttacgagagatacttgagcagcagcagcaggaaaggaacgacactaatttccacggcgtctgtatgttttgcaatgaggaattcctgggaaatcgctcggtgatactgaaccacatggcaagggaacacgcatttaatatcgggctccccgacaacatcgttaattgtaatgaatttctttgcaccctgcagaagaagcttgacaacctgcaatgcctgtactgtgagaaaactttcagagacaaaaacaccctgaaggatcacatgcgcaagaagcagcatcgcaagatcaatccaaagaatagagagtacgaccggttctacgtaatcaactatctggtgcgcctgagtttccacaacctcaagttcgactgtagtacagctaacaagatttttctgagaaccaattag

SEQ ID NO: 212102 - DNA, 1428 bp, synthetic construct
  misc_feature 1..1428: note = Description of Artificial Sequence: Synthetic coding sequence
  source 1..1428: mol_type = other DNA
atgagccggcggaaggccggcagcgccccccggcgggtggagcccgcgccagctgccaacccagacgacgagatggaaatgcaggatttggttattgagctcaaaccagaacctgacgcccagccccagcaagccccgaggcttggccccttcagccccaaagaggtgagcagcgctgggagatttgggggcgagccacaccacagtcccgggcctatgcctgccggagcagctcttctggccctgggtccaaggaacccatggacgctctggactcctctgaccccaaactacccggaccggcagccctggacagataaacacccggatctcttgacatgtgggcggtgcctgcagaccttccccttagaggccattaccgcattcatggaccataaaaaactgggttgtcagctcttcaggggcccttctcgagggcaaggtagcgagagagaagagctgaaggcgctcagttgtctgagatgcggcaaacagtttactgtggcttggaagctgttgcgccatgcccagtgggatcacggactgtctatttaccagacggagtcagaggctccggaagctcctttgctgggactggctgaagtggctgccgcagtctctgccgttgtcgggccagcagctgaagcgaaatctccaagagcctccggtagcgggctgacccgccgctccccaacttgtcccgtctgtaagaagaccttgtcaagcttcagcaacctaaaggtacatatgcgttcccatactggggaacgaccgtacgcttgtgaccagtgtccctacgcctgtgcccaaagtagtaagctcaacaggcacaagaagacacatcgtcaggttccaccacaatcaccactgatggcggatacaagccaggagcaggcctctgctgcccctcctgagcctgctgtgcacgcagcagctccgacatcaacactgccctgttctgggggagagggcgccggcgccgcagcaacagcaggggtgcaggagcctggagcccccgggtctggagcgcaagcgggccctggtggagacacctggggggctattactaccgaacagcggaccgatccagctaactcacagaaggctagccctaaaaaaatgcccaaatctggaggcaagtctcgtggtccagggggtagttgcgaattctgtggaaaacatttcacgaactcatccaacctgaccgtgcacaggcggtcccatactggcgaacgtccctacacgtgcgagttttgtaattatgcctgtgcgcagagcagtaaattaaatcggcacagaaggatgcacggaatgactcccggctctactcgctttgagtgtccgcattgtcacgtgccctttggactgcgtgctacgctggataagcaccttaggcagaaacacccagaggccgcaggggaggcgtag

SEQ ID NO: 212103 - DNA, 1356 bp, synthetic construct
  misc_feature 1..1356: note = Description of Artificial Sequence: Synthetic coding sequence
  source 1..1356: mol_type = other DNA
atggagatgcaggacctggtgatcgagctgaagcccgagcccgacgctcagccccagcaagcccctaggttgggtccttttagccctaaggaagtgtcttctgcaggtcgcttcggcggtgaaccgcaccactctcctgggccaatgcctgcaggggctgccctgctggcactggggcctagaaacccttggactctgtggaccccactgacccctaattatccagaccggcaaccttggactgataaacatccagacctgctgacctgtggtcgttgcctgcagactttcccattggaggccattacagcatttatggaccataaaaagcttggctgccagctgttcaggggtcccagcagagggcaaggctccgagcgtgaagaactcaaggccttatcttgccttcgctgtggcaaacagttcaccgtagcatggaagctgctcagacacgcccagtgggatcacggcttaagcatctaccagacagaaagcgaggctcctgaggcccccctgcttggactggcagaagttgcggcagccgtgtcagcagtcgtcgggcctgctgccgaggcaaagagtccgagggcgtcaggaagcggcttaacacggcggagccccacgtgtcctgtgtgtaaaaagaccctgtcttccttcagtaatcttaaggtgcacatgagaagtcacactggggagcgcccatatgcgtgtgatcaatgcccatacgcctgtgcacaatcttctaagttgaataggcataaaaaaacgcacaggcaggtccccccacagtcacctctgatggctgacacctcgcaagagcaggcatctgctgcccctcccgaaccagctgttcatgccgctgctccaaccagcactctcccatgttcaggcggggaaggagcaggcgcagcggcaacagctggtgttcaagagccaggcgctccagggtcaggagcccaggccgggccgggtggggatacctggggcgccattacgacagaacagcggacagatccagccaacagccaaaaggcaagtccaaagaagatgcctaaatcaggcggcaaatctcgcggcccaggcggtagctgcgaattttgcgggaaacacttcaccaatagttcaaacctgactgtccatcggagatcccacacgggtgaacgaccatacacatgtgagttctgcaactacgcatgtgcccagtctagcaagctcaataggcatcgaagaatgcatgggatgacgccagggtcaacaaggtttgaatgcccacactgtcatgtgccctttggcctgagagctacattggacaagcacctgcgccagaaacatcccgaagctgcgggggaggcttag

SEQ ID NO: 212104 - DNA, 1341 bp, synthetic construct
  misc_feature 1..1341: note = Description of Artificial Sequence: Synthetic coding sequence
  source 1..1341: mol_type = other DNA
atggagacccaggccgacctggtgagccaggagccccaggccctgctggattcggcacttccatcaaaagttccagcattttctgacaaggatagcttaggcgacgagatgctggctgcagccctgctgaaggccaagagccaagaacttgtgactttcgaggacgtggccgtttattttattcgtaaggagtggaagcgcctggaaccagcacagcgggatctgtacagagatgtaatgctggagaattatggtaatgtgttcagcctggatcgagaaaccaggactgagaatgaccaagagatcagcgaagatactcgctctcacggcgtgttactgggaaggttccagaaagatatctctcagggactcaagtttaaggaagcctacgagagagaagtgtcccttaaaagaccattaggaaacagcccaggtgagagactcaatcgtaagatgcctgactttggccaggtgactgttgaggagaaactgacaccacgcggagagcgatcggagaaatataacgacttcggcaactctttcactgttaactcaaacctaatcagtcaccaacggctccccgtgggagatcgcccgcacaagtgcgatgagtgctctaagtcctttaatagaacgtcagacctgatacagcatcaaaggattcacacgggggagaaaccctacgaatgtaatgagtgtgggaaagccttctctcagtctagccacctgatccagcatcagcgcatacatacaggagaaaaaccttatgaatgcagcgattgtggcaaaactttctcttgctccagtgccctgattttacacaggcgcattcacactggtgaaaagccatacgaatgcaatgaatgtggtaaaactttttcttggagttccaccctgacccatcaccagcgcatacatacaggagagaaaccttatgcttgtaatgaatgcggaaaggccttcagccgcagcagtaccctcatccaccaccagcggattcacactggtgaaaagccctacgaatgcaacgaatgcggtaaggcattctctcagtcttcacacctttatcagcatcagagaatccatacgggcgagaagccctacgaatgcatggaatgtggggggaaattcacttacagctcggggctgattcagcatcagcggatccatactggcgagaatccatacgaatgtagcgaatgtggaaaggcatttcggtatagctccgccctggttaggcatcaacgcattcacactggtgagaaaccactgaatggcatcggcatgtccaagagcagtcttcgcgtgaccacagagcttaacatcagggagagtacttag

SEQ ID NO: 212105 - DNA, 1341 bp, synthetic construct
  misc_feature 1..1341: note = Description of Artificial Sequence: Synthetic coding sequence
  source 1..1341: mol_type = other DNA
atggagacccaggccgacctggtgagccaggagccccaggccctgctcgactcagctctgccaagcaaggtgccagcctttagcgataaggactcgctgggcgatgagatgcttgcagctgccttgctaaaagccaagtcccaggagctagtgacttttgaggacgtggccgtttatttcatccgcaaggaatggaagcgactggagcccgcccaacgcgacctttatagagacgtcatgctcgaaaactatggcaacgtattctctctggatcgcgaaactagaactgagaacgatcaggagatttcagaagacactagatctcacggagtccttctcggtcggtttcagaaagacatctcccaaggcctgaaattcaaggaagcgtacgagagagaagtgagtctgaagcgcccactagggaactcccccggcgagcgccttaacaggaagatgcccgacttcggacaggtcacggttgaagaaaagcttactccccggggagaaagatctgagaagtacaatgacttcggcaattcattcacagtaaactccaaccttatctcccaccagaggctgcccgtgggcgacaggcctcataaatgtgatgagtgttctaagtccttcaaccgcaccagtgacctgatccagcaccaacggatccacaccggggaaaagccttacgagtgcaatgaatgtggcaaggcattctctcagtctagtcacctgatccagcaccaaaggatccatacaggggaaaaaccctatgaatgttctgactgcggaaaaaccttctcctgcagcagtgccctgattctgcacaggcggattcacaccggagagaagccatacgaatgcaacgagtgcggaaagacattctcatggtccagtaccctcacccatcaccagcgcatacatacgggagagaagccctatgcttgtaatgaatgcgggaaggctttctcacggagcagtaccttgatccaccatcagcggatacataccggggaaaaaccctacgagtgcaatgagtgtggcaaggcttttagccaaagcagccacctttatcagcatcaaagaattcacacaggagaaaagccttacgagtgtatggaatgcggcggaaagttcacttactccagcgggctgatccaacatcaaaggatccataccggggagaacccttacgagtgtagcgagtgcggtaaggcattccgctactcatccgctctcgtgaggcaccagagaatccataccggtgaaaagccactcaacggtattggcatgtccaagagctccttgagggtgaccacagaattgaatatacgcgaatctacctag

SEQ ID NO: 212106 - DNA, 396 bp, synthetic construct
  misc_feature 1..396: note = Description of Artificial Sequence: Synthetic coding sequence
  source 1..396: mol_type = other DNA
atggagacccaggccgacctggtgagccaggagccccaggccctgctggattcagccctgccgagtaaagtgccagccttcagtgacaaggatagtctcggtgatgaaatgctagcagccgccttgctgaaagctaagtcacaggagctggtgacattcgaggatgtggccgtgtactttatcaggaaggaatggaagcggctcgaacccgctcagcgggatctgtaccgcgatgtaatgctcgagaattatggtaatgtgttcagcctggactggatacatgtgtgcttaaccactcagaaggtgatgttagcctggctgactggtaccttgagcgtcgctaagggactgtgcagtagtgagctcgcctcagtagaaccacccgatacattttag

SEQ ID NO: 212107 - DNA, 315 bp, synthetic construct
  misc_feature 1..315: note = Description of Artificial Sequence: Synthetic coding sequence
  source 1..315: mol_type = other DNA
atggagacccaggccgacctggtgagccaggagccccaggccctgctcgacagcgccctgcccagcaaggtgcccgcgttttccgacaaggattctctgggagatgaaatgctagcagcagcgcttctgaaggccaaatcacaggaactggtgacctttgaagatgttgcagtatacttcatccgcaaagagtggaagcgactagaacctgcccagcgcgatttatatagagacgtcatgctggaaaattacggtaatgtgttctcactcgatagggagaccaggacagagaatgatcaggaaataagtgaatag

SEQ ID NO: 212108 - DNA, 1341 bp, synthetic construct
  misc_feature 1..1341: note = Description of Artificial Sequence: Synthetic coding sequence
  source 1..1341: mol_type = other DNA
atggagacccaggccgacctggtgagccaggagccccaggccctgctggacagtgccctgccctctaaagtgccggccttttcagataaggacagtctaggagatgaaatgctggcggcagctcttctaaaggcgaaaagccaggagttagtgaccttcgaggatgtggcagtctattttattcggaaagagtggaagcggttggagcctgctcaacgggacttgtatcgcgacgtgatgctagaaaattatggaaatgttttctctctcgatagggagactaggactgaaaatgaccaagagatcagtgaggatacccggtctcacggggtgttgcttggccgattccaaaaggacatttcacagggtctcaagttcaaagaggcatacgaacgcgaagttagcctaaagcggccattgggtaactccccaggagagagattgaatcggaaaatgcccgacttcggccaggtgaccgtcgaggagaagctcactccgcgaggagagcgaagcgagaaatacaatgattttggcaattcatttacagtcaacagtaatctgatctctcaccaaaggctccccgttggcgaccgacctcataagtgtgatgaatgctctaagtcgtttaaccgcacttccgatcttatccagcaccagagaattcacaccggcgaaaaaccctacgagtgcaacgagtgtggtaaggccttctcccagagctctcacctcatccagcatcagagaattcacacaggtgagaagccctacgagtgttcagattgcggaaaaacgttctcttgtagctcagcactgatcttacatcgacgcattcataccggcgaaaagccttacgagtgtaatgaatgcggaaagacttttagctggtcgagtacattgacacaccatcagcgaatccacacaggcgaaaagccttacgcttgcaacgagtgcggaaaagccttttccaggagcagcactttgatccatcaccagcgaatacataccggggagaaaccttatgaatgtaatgaatgtgggaaagcattttcccagtcctctcacctgtaccagcatcagaggatacacacaggagagaagccctatgagtgcatggagtgtgggggcaaatttacttatagcagtgggctcatccagcatcaacgcatacacactggggaaaacccttacgagtgcagcgagtgtggcaaagcttttcgctattcctccgcactcgtccgacatcagcgaattcatacaggagaaaaaccccttaacggaatcgggatgtcaaaatcctccctgagagtgacgactgaactcaatatccgggaatcgacctag

SEQ ID NO: 212109 - DNA, 558 bp, synthetic construct
  misc_feature 1..558: note = Description of Artificial Sequence: Synthetic coding sequence
  source 1..558: mol_type = other DNA
atggagacccaggccgacctggtgagccaggagccccaggccctgctggatagtgctttacccagcaaggtgccagctttctccgataaggactctctgggggatgagatgttagctgcagcccttctgaaggccaagagccaggaattagttacttttgaggacgttgccgtgtatttcataaggaaggagtggaaaagattagagccggcgcagcgcgatctgtaccgcgacgtgatgcttgagaactatggtaacgtattcagcctagaccgcgaaacgcgtactgaaaatgaccaggaaatttcagaggacacacggagccatggagtgctcctgggtcgtttccagaaggatatctcacaggggctcaaattcaaggaagcctacgaacgcgaagtcagtctcaagcgtcccctcggcaatagtcccggcgaacgcctgaaccgcaagatgccagatttcggacaggtaactgtcgaggagaaacttaccccccggggggaaaggtccgaaaagtacaatgacttcggcaactcattcaccgttaattcatag

SEQ ID NO: 212110 - DNA, 558 bp, synthetic construct
  misc_feature 1..558: note = Description of Artificial Sequence: Synthetic coding sequence
  source 1..558: mol_type = other DNA
atggagacccaggccgacctggtgagccaggagccccaggccctgctggactcagcgctgcccagcaaggtgcccgcctttagtgataaggattccttgggtgatgaaatgcttgctgctgccctccttaaggctaagagccaagagcttgtaacctttgaagatgtggccgtttacttcataaggaaagagtggaaacgtttggagcccgctcagcgcgacttataccgggatgtgatgctggagaattacggtaacgtattctctctcgatagggaaacccgcaccgagaatgatcaagagatctcagaggacacgcggtctcacggtgtactgttgggtagatttcagaaagacattagccagggcctcaagttcaaagaggcctacgagcgtgaggtgagcctgaagagaccattgggtaattcacctggcgaacgactgaatcgcaaaatgccagattttggacaggttaccgtggaggagaaactgacaccacgcggggagcggtccgaaaaatataatgactttggaaacagcttcactgtgaacagctag

SEQ ID NO: 212111 - DNA, 1509 bp, synthetic construct
  misc_feature 1..1509: note = Description of Artificial Sequence: Synthetic coding sequence
  source 1..1509: mol_type = other DNA
atgggcaccgagaacaaggaggtgatccccaaggaggagatcagcgaagagtccgagccacacggatcattattggagaagttccctaaggttgtataccaggggcatgaattcggggccggctgcgaggaggacatgctagaaggacactctcgcgaatccatggaggaagtaatcgagcagatgagcccacaggagcgggactttccaagtggcctaatgatattcaaaaaatcgccaagctccgaaaaggatcgtgaaaacaacgagtccgagcgcggctgcagtccatcgcccaatctggtgacgcaccagggagatacgactgagggagtcagcgcgtttgccacaagtggtcagaatttcctcgagatcttagagtctaataaaactcagcgcagttccgtcggagagaagccgcacacttgcaaggagtgcggcaaagcctttaaccaaaactcccatctgattcaacacatgcgggtgcatagcggtgagaagcctttcgagtgtaaggaatgtgggaagacttttggtacaaacagcagtctccgtagacacttaagaatacacgctggggaaaaaccgtttgcctgtaatgagtgtgggaaggccttcattcaatcttctcatctgatccaccatcacagaatccacaccggagagaggccctataagtgcgaggagtgtggtaaggcattctctcagaacagcgctctgatactgcaccaacggatacacaccggagagaagccttatgaatgtaatgagtgtggaaaaacttttagggtctcctcccagctaatccagcaccaaagaattcacacagaggagaggtatcatgagtgtaatgagtgcggtaaggcatttaaacactcctcagggcttatccgccatcagaagatccatacaggcgagaagccgtatctgtgcaatgagtgtggaaaaggctttggacagtcctcagagttgatccgacatcaaagaatccacacaggggataaaccgtatgaatgtaacgaatgtggaaagacattcggacagaacagcgagatcattaggcacatcaggatccacacaggggagaagccctatgtatgcaaagagtgcggcaaggcttttcggggaaacagcgaactactgcgccacgagcggatccacacaggcgagaagccatacgagtgctttgagtgtggcaaggcatttcgacggacaagtcatctcattgttcatcaacgcatacacacaggagagaaaccacaccaatgcaacgaatgtgctcgcaccttctgggataattctgagttgttgctgcatcagaagattcatatcggagagaaaccgtatgagtgcagcgagtgtgagaaaacgtttagccagcatagccagttaataattcaccagaggattcacaccggcgagaagccatacgaatgtcaagagtgtcaaaagacattttctcgcagctcccatttgcttcgacatcagagcgtgcactgtatggagtag

SEQ ID NO: 212112 - DNA, 1815 bp, synthetic construct
  misc_feature 1..1815: note = Description of Artificial Sequence: Synthetic coding sequence
  source 1..1815: mol_type = other DNA
atgatgaagagccagggcctggtgagcttcaaggacgtggccgtggacttcactcaggaggaatggcaacagctggacccttcccaaaggacactttatagggatgtgatgctggagaactattcacacctagtgagcatggggtatcccgtgtccaaacctgatgtgatttcaaagcttgagcagggtgaggagccctggattatcaagggtgacatttccaactggatttacccggatgagtaccaagccgacggaaggcaggatcgcaaatcaaacctgcataacagccagagctgcatcctcgggaccgtttcctttcaccacaagatcctcaaaggtgtcacaagggacggatccctgtgttccatactcaaagtgtgccagggtgatggtcagttgcagcggtttctcgaaaaccaagacaagttatttaggcaggtaacatttgtcaacagcaaaaccgtgactgaagcttccggacacaaatataatcctctgggcaaaattttccaggaatgcattgaaactgatatctcgatccagagattccacaaatacgacgcattcaagaagaacctgaagcctaatatcgacctgccctcttgttacaaatctaattcccgcaaaaaaccagatcagtcctttggcggcgggaagagtagtagccagtctgaacctaactccaacctggaaaagatccacaatggtgtcattcccttcgacgataatcaatgcggtaatgtgttccgcaatactcagagtctcattcagtatcaaaatgtcgagacgaaagagaagtcttgtgtgtgcgttacctgtggcaaggcatttgctaaaaagtcgcagcttatcgtgcaccagcggattcatacagggaagaaaccttacgactgtggcgcatgcggaaaagccttctcagaaaaatttcacctggtagttcatcagaggactcatacaggcgaaaaaccctatgattgtagtgagtgcgggaaggccttttcccagaagagtagtctcatcattcaccagcgggtgcacacgggtgagaaaccctacgagtgcagcgaatgcgggaaggcatttagtcagaagtctcctctgataatacaccagcgcatccacacgggggagaaaccctacgagtgtagagaatgcggtaaagcgttttctcaaaaatcacagctgataatacatcacagagcccacaccggagaaaagccatacgaatgcaccgaatgtgggaaagcattttgcgaaaagagccatttaatcatccacaagcgcatccacactggtgagaagccttataagtgcgctcaatgcgaagaagccttcagtcggaaaaccgagctgataacccaccagctggttcacactggagagaagccttacgaatgtaccgagtgtgggaagaccttctcccgtaagtcccagctgattatccaccagcgaacgcatacgggcgagaaaccatacaagtgctccgagtgcgggaaggccttctgtcagaaaagccacctaattggacaccagagaatccacacaggcgaaaaaccttacatctgtacagagtgtggcaaagcttttagccaaaagtcccacttgccaggccaccaaagaatccacacaggtgagaagccctacatttgcgccgaatgcggtaaagccttttctcagaagagcgaccttgtgcttcaccagcgaatccataccggcgaacgcccgtaccaatgcgccatatgcggtaaagcctttatacagaagtcacaactgacagtgcatcaacgcatccatacagtagtcaagtcctag

SEQ ID NO: 212113 - DNA, 1815 bp, synthetic construct
  misc_feature 1..1815: note = Description of Artificial Sequence: Synthetic coding sequence
  source 1..1815: mol_type = other DNA
atgatgaagagccagggcctggtgagcttcaaggacgtggccgtggactttacccaggaggagtggcagcagttagacccatcgcaacgaacactctatcgcgacgtcatgttggaaaattacagccatctggtgagcatgggatatccggtctccaaacccgacgtcatatccaagctggaacaaggtgaagaaccttggataattaaaggtgacatctctaactggatctatccagatgagtaccaggcagacggtcggcagggtaaaaagtcaaacctgcataatagccagtcttgtatcctgggcactgtcagctttcaccacaagattctgaagggtgttacacgagacggaagcctctgtagtatcctgaaggtgtgccagggcgacggacagctgcagcgatttttggagaatcaagataagctgttcaggcaagtcacctttgtgaatagtaagactgtcacggaagccagtgggcataaatataaccctctcgggaaaatcttccaggaatgtattgagactgatatctccattcagcgcttccacaagtacgatgcctttaagaaaaatcttaagcccaacattgatctgcccagctgctacaagtcgaatagtagaaaaaagcccgaccagagcttcggaggcggcaaatcctcctcgcagtctgagccaaatagcaatctggaaaagatccataacggcgtcattccctttgatgataaccagtgcggaaatgttttccgcaatacccagagtctcattcaatatcagaacgtggagacaaaagagaagtcctgtgtctgtgtaacgtgcggtaaggctttcgcgaagaagagtcagctaattgtccaccagaggatccataccggcaagaagccatacgattgcggcgcctgtggcaaggccttcagcgagaagtttcatctggttgtgcatcagcgcacccacacaggcgagaagccctatgactgcagcgaatgcggaaaggctttctcacaaaagtccagcttaatcatccaccagagagtgcacacgggcgagaaaccctatgaatgcagcgagtgcggtaaagccttttcccagaagagtccactgatcattcaccagcggatccatactggcgaaaaaccatatgaatgtcgggagtgtgggaaggctttcagccagaagagtcagctgatcatccaccaccgggcacatacgggcgaaaagccctacgaatgcactgagtgtggcaaggctttttgtgagaagtctcatctgattattcataaacgcattcacacgggcgaaaaaccttacaaatgtgcccagtgtgaggaagcatttagtcgcaaaacagagctcatcactcaccagttggtgcacactggggaaaagccatacgaatgcacggaatgcggtaaaacctttagtaggaagtcccagctgattatacatcaacggacacacaccggcgagaaaccatacaagtgttccgagtgcggaaaagctttttgccagaagagtcacttgatcggacatcagcgcatccacactggcgagaagccctatatttgcaccgaatgcgggaaggcattttctcaaaagtcacacctgccaggtcaccagcgaattcacacgggcgaaaaaccatacatctgcgctgaatgcgggaaggccttctcacaaaagagcgatctggtgctccaccagagaattcacaccggtgagcgcccttaccagtgcgcaatatgtggcaaagcttttatccagaaaagccaactgacagtgcatcagcggattcataccgtagtgaaaagttag

SEQ ID NO: 212114 - DNA, 1707 bp, synthetic construct
  misc_feature 1..1707: note = Description of Artificial Sequence: Synthetic coding sequence
  source 1..1707: mol_type = other DNA
atgctggagaactacagccacctggtgagcatgggctaccccgtgtccaaacctgacgtcatttcaaagttagagcaaggtgaagagccctggattattaaaggcgacatctccaactggatctatccagatgagtatcaggcagatggccggcaggaccgaaagtcaaacctccataatagtcagtcgtgcattctgggcaccgttagctttcatcacaagattttgaagggcgtcacaagggatgggagtttatgtagcattctcaaggtgtgccaaggcgacggccagctgcagcgcttcctggagaatcaggataaacttttccgtcaggttaccttcgttaactcgaaaacagtgactgaggcttcaggccacaagtacaatccattaggcaagatattccaagagtgcatcgagacggacattagcatccaaagatttcataaatacgacgcgtttaagaaaaaccttaaaccgaatatcgaccttccctcttgttataaaagtaacagtaggaagaagcccgatcagtcttttggcggcggcaagagcagcagccagtccgagccaaatagtaacctggagaaaatccacaatggtgtcattccctttgacgataatcagtgtgggaacgtcttccggaatacccaatctctgatccagtatcaaaacgtggaaacaaaggaaaagagctgcgtctgtgtgacctgtggcaaggcatttgccaagaaaagccagctgatcgttcaccagaggatccacacaggtaagaagccatatgactgcggcgcctgtgggaaagccttttcggagaaattccacctcgtggtacaccaacggacacatactggggagaagccttatgattgttcagagtgtggtaaggctttcagccagaagtcaagcctgataatacaccagagggtccacaccggggaaaagccctacgaatgcagcgaatgtggcaaagcttttagccaaaaatcccctctaataattcaccaacgtattcacaccggtgaaaaaccctatgaatgcagggagtgtggtaaagcattcagtcagaagtcccagctgatcattcaccacagggcacacacaggcgaaaagccctatgaatgtacggagtgcggcaaagctttctgcgagaagtcacacctgataatacacaagaggatccacactggagaaaaaccatataagtgcgcgcagtgtgaggaagcattctctcggaaaaccgagctgattacgcatcagcttgtgcatactggcgagaagccctacgagtgtaccgagtgtggcaagacattcagtaggaaaagtcagctcatcattcaccagcgcacccataccggggagaagccctataaatgcagcgagtgcgggaaggcgttctgtcagaagagccatcttatcggacaccagcggatccatacgggggagaagccttacatctgtacagaatgcgggaaggctttttcccagaagagtcacctccccggacaccagcgaatacacaccggcgagaaaccctatatctgcgcagagtgcgggaaagcgttctcccagaagagcgacttggtattgcatcagaggattcatacaggagaaaggccatatcagtgtgctatctgtggcaaggctttcatccagaagagccagcttactgtccatcagcgcatacatacagttgtgaagtcttag

SEQ ID NO: 212115 - DNA, 1863 bp, synthetic construct
  misc_feature 1..1863: note = Description of Artificial Sequence: Synthetic coding sequence
  source 1..1863: mol_type = other DNA
atggtgcccgccgagaccagcagcagcggcctgctggaggagcagaaaatgatgaagtcacagggtctcgtgagcttcaaggacgtggccgtagattttacccaggaggagtggcagcagctggacccgagtcagagaacactgtatcgagacgtgatgctcgagaactactctcatctggtgtccatgggatatcccgtctccaaaccagatgtcatctcaaaactcgagcagggggaagagccatggattattaagggtgatatttccaattggatatacccggacgagtaccaggcagatgggaggcaggacagaaagagtaacctgcataatagccaatcctgcattctaggaaccgtctcatttcaccacaagattctgaagggcgtcaccagggacggcagcctgtgcagtattttgaaggtctgccagggtgacgggcaacttcaacgtttcctcgaaaaccaggacaagctgttcagacaggtgacgtttgttaactcaaagacagtcactgaggcctcaggtcacaagtacaatcctctcggtaagatttttcaagaatgcattgagaccgacatctctatacagcggttccacaagtatgacgcctttaaaaaaaaccttaaaccaaacatcgacctgcccagctgctacaaatccaacagccgtaagaagcccgatcagtcttttgggggcgggaagtctagcagtcaaagtgagccgaatagtaacctcgaaaaaatacataacggcgtcataccgttcgacgacaatcagtgtggcaacgtgtttaggaacacacaaagtttgatccaatatcagaacgtcgaaacgaaggagaaatcatgcgtgtgcgtgacatgtggtaaggcctttgcaaaaaaatcacagcttatcgtacatcagcggatccataccgggaaaaaaccgtacgattgtggagcttgcggtaaggctttttcagagaaattccatctcgtggtgcatcagaggactcatacgggcgagaaaccgtacgactgcagtgagtgcggaaaggccttcagtcagaagagtagtcttattatccatcagagagttcataccggagaaaagccatacgagtgtagcgagtgcgggaaagccttctcccagaaaagccccctgatcatacaccagaggattcacacaggggagaaaccatacgagtgccgcgagtgcggtaaagctttttcccagaagtcccaattgattatacaccatcgcgcccatacaggtgaaaagccgtacgagtgcaccgagtgcggcaaggctttttgtgagaagagtcaccttattattcacaaaaggattcacacaggggaaaagccatacaagtgtgcacaatgcgaagaggccttttccagaaagacagagttgattacccaccagctcgtgcacacaggtgaaaaaccctacgagtgcacagagtgcgggaaaacgttcagtaggaagtcacagcttattatccatcaacgcacacacactggagaaaagccgtacaagtgctctgagtgcgggaaggctttctgccagaaaagtcacttgattggccaccagcgaatccacaccggtgaaaagccttacatttgcacagaatgcggcaaagctttcagtcagaagagtcacctgccaggacaccagaggattcacacaggggagaagccttacatatgtgcagagtgcggcaaagcctttagccagaagtctgatttggttctccaccagaggatacataccggggaaagaccatatcagtgcgccatttgcggcaaagctttcattcagaagagtcagctgaccgtgcaccagcgaattcacaccgttgtaaagtcctag

SEQ ID NO: 212116 - DNA, 1980 bp, synthetic construct
  misc_feature 1..1980: note = Description of Artificial Sequence: Synthetic coding sequence
  source 1..1980: mol_type = other DNA
atggccgccgccgtgctgatggaccgggtgcagagctgcgtgaccttcgaagacgtgttcgtttatttctccagagaagagtgggagctgctggaggaagcacagagatttctgtacagggatgtgatgctcgaaaacttcgcattggtggccacactggggttttggtgtgaggccgagcatgaagcacccagcgaacagagtgtttcggtagaaggtgtctcccaggtgcggacagccgagtctggactgttccagaaagcccacccctgcgagatgtgtgatcccctgctcaaagacatcctgcacctcgccgaacatcagggatcacatctcacgcagaaactgtgtacacgcggtctgtgccggcgcagattttccttcagtgccaacttttaccagcaccaaaaacagcacaatggcgagaattgcttcagaggcgatgatgggggcgcctcttttgtgaaaagctgcacagtccacatgttaggccgaagctttacttgtcgtgaagaagggatggatttaccagattcatcagggcttttccagcaccagaccacatacaacagggtatccccatgcagacgcaccgaatgtatggagtcttttccgcacagctcatcccttagacagcaccagggtgactatgacggccaaatgctgttctcctgtggagacgagggtaaggccttccttgatacattcacgctcctggatagtcagatgacccacgccgaagtgagacccttccggtgcctaccttgcggcaacgtatttaaagagaagagtgctctgatcaaccacaggaaaattcatagtggagagatcagccacgtctgtaaggagtgtggcaaggcttttatacacctgcatcatctcaaaatgcaccagaaattccacaccggtaagcgacactatacttgctcagagtgtggtaaagccttttccaggaaggacactcttgtgcagcaccagcgcgttcacaccggggaacgctcctacgactgcagcgagtgcggtaaagcctactctcggtcatcccacctcgtccagcaccagcggatccacacaggcgagaggccttataagtgtaataaatgcgggaaagctttcagtaggaaagataccctggtgcagcatcagcgctttcacaccggcgaacgtccatacgaatgctcggaatgcggcaagttcttcagccagagcagccaccttattgagcactggagaattcacacaggagcgcggccatacgaatgcatcgaatgcggaaagttttttagccacaattcatcccttatcaagcaccggcgggtacataccggcgccagaagctacgtgtgttctaagtgcgggaaagcctttggctgcaaagacaccctagtccaacaccaaattatccacactggagcacggccttacgaatgttccgagtgtggaaaagcttttagtcgcaaggataccctggtgcagcaccagaagatccatactggggaaaggccttacgaatgcggcgaatgcggaaagtttttcagccactcatcaaatctgattgtacaccagcgaattcataccggcgctaagccttatgagtgcaacgagtgcggaaagtgcttctctcacaacagctccctgattctccatcagagggttcacaccggtgcccggccttacgtgtgcagtgagtgcggtaaggcctatatcagctcatcccatctcgtccagcataaaaaagtgcataccggtgccagaccttacgagtgttcagagtgtggcaagtttttcagtcgcaacagtggcctcatcctgcaccaaagagtgcacaccggtgagaagccttacgtatgtagcgagtgtggcaaggcatactctaggtctagtcatctggtaaggcatcaaaaggctcataccggggagcgggcacacgagtgcaacagctttggggggccattggcagccagtctgaaactggtatag

SEQ ID NO: 212117 - DNA, 1980 bp, synthetic construct
  misc_feature 1..1980: note = Description of Artificial Sequence: Synthetic coding sequence
  source 1..1980: mol_type = other DNA
atggccgccgccgtgctgatggaccgggtgcagagctgcgtgacctttgaagacgtatttgtatatttttccagggaggagtgggagctcctggaagaagcccagaggttcctgtatcgcgacgttatgctggaaaatttcgcactagtggctacgctcgggttctggtgtgaggccgagcacgaggccccttccgagcagtcagtgagcgttgaaggcgttagccaagtacggaccgcggaaagtggcctgttccagaaagcacacccatgcgagatgtgtgatcctctgctgaaagacatcctgcatctcgccgaacatcagggcagccacctaacacaaaagttatgtacaagaggattgtgcaggaggcgcttctcgttctcagccaacttttaccaacaccagaaacagcataatggggaaaactgcttccgcggcgatgacggcggcgcctctttcgtgaagtcttgcaccgttcacatgcttggccgctctttcacatgtcgcgaggaggggatggatctacccgacagctccggcttattccaacatcagactacatacaacagggtgagtccctgccggcgtaccgaatgcatggagagcttcccccatagctcttcactgcgccagcatcaaggggattatgacgggcagatgctctttagttgtggggatgaggggaaggcattccttgacaccttcaccttactggattcacagatgacgcatgctgaagtgcggcctttcaggtgccttccctgtggcaacgttttcaaggaaaaatccgctctcatcaaccaccggaagatccattctggcgaaatctcccacgtttgtaaggagtgcggcaaagctttcatacacctgcatcatctgaaaatgcaccagaaattccacaccggaaaacggcactatacttgcagcgagtgcggaaaagcgttctcccggaaagatacactggtgcagcaccagcgggtgcatactggggagagatcctatgactgctcggagtgcggaaaggcttattcaagatcatctcatctagtgcagcaccagaggatacacacgggggagcgtccctacaagtgcaacaaatgcggcaaagcctttagccgcaaggacaccctggtacagcaccagagatttcacactggagagcggccgtacgaatgctccgagtgtggcaagttttttagtcaaagttctcacttgattgaacactggcgaatccatactggtgcccgaccctatgagtgcattgaatgcggtaagttcttttctcacaactcttctctcatcaagcaccgcagagtgcacactggagctaggagttatgtgtgtagcaagtgtgggaaggcatttggatgtaaggatacccttgtgcagcaccagatcatccataccggcgcccgaccctatgaatgtagtgagtgtggcaaggcatttagtcggaaagacactctggtgcaacatcaaaagatccacactggagagagaccctacgagtgcggcgagtgtggtaagtttttctcacacagcagtaacctgattgttcatcagcgtatccacacgggtgctaaaccgtatgagtgcaatgaatgtggaaaatgtttctcccacaatagtagtttgattctgcatcagagagtacataccggtgcccggccctacgtgtgcagtgagtgcgggaaggcctatattagttccagtcacttggtgcagcataagaaggtgcatacgggcgcccgtccctacgagtgcagcgagtgcggaaagttcttctctagaaattctgggctgatcctgcatcagcgagtccatacgggcgagaagccctacgtctgctcagagtgtggaaaggcctattctaggtcgtcccaccttgtgcggcaccagaaagctcatacaggggagagggcgcacgagtgtaatagcttcgggggtcccctagcagcttctctgaaactagtctag

SEQ ID NO: 212118 - DNA, 2121 bp, synthetic construct
  misc_feature 1..2121: note = Description of Artificial Sequence: Synthetic coding sequence
  source 1..2121: mol_type = other DNA
atggccgccgccgtgctgatggaccgggtgcagagctgcgtgacctttgaggatgtgttcgtgtacttcagcagagaggaatgggagcttttggaagaggctcagcgcttcctgtatagagacgtcatgttggagaatttcgcattagttgctacactggccttcattttccccgtgccctgttcctgcgccgtggggggtggaaggaagccatgggtaccagatagagcagatattactgccgctacagtaaaagagacttatcgggggcacgggcccgccgagtgggagcttgaagaaggattttggtgcgaggccgaacacgaggcaccctccgaacagtccgtgtccgtcgagggagtgtcccaagtacggacggccgaaagcggactgtttcagaaggcgcacccttgcgagatgtgcgacccacttttgaaggatattctgcacttggctgagcaccaggggagtcaccttacacagaaactgtgcacaagaggcctgtgcaggcgaaggttctccttctctgcaaatttttatcagcaccagaaacagcataacggagagaattgtttcagaggagacgatggcggagccagtttcgtgaaatcctgtacagtgcatatgctgggtaggtcattcacttgccgggaagaaggtatggatttacctgactctagtgggctcttccaacaccaaaccacatacaatcgtgtctctccgtgcaggaggactgaatgtatggaaagcttcccccattcgagttcactgaggcagcaccaaggcgactacgacgggcaaatgctgttttcttgcggcgacgaggggaaagcctttttagacactttcaccttactggactcgcaaatgacacatgccgaggtgcggccctttcggtgtctgccttgtggcaatgtttttaaggagaaaagtgctcttataaatcatcgaaagatccattcgggcgaaatcagtcatgtgtgcaaggaatgtggaaaggccttcatccacctgcaccatttgaaaatgcaccagaaattccataccgggaagcgacactatacctgttctgaatgtggcaaagcttttagtcgcaaggacactttggtgcagcatcagagagtgcacacaggtgagcgcagctacgactgctcagaatgcgggaaagcttatagccgcagttctcacctggtccaacatcagagaattcataccggcgaacgcccctacaaatgtaacaaatgcggcaaggctttttctagaaaagacactctagtgcagcaccaaagattccataccggggaacgcccttacgagtgcagcgagtgcgggaaatttttcagtcagagcagccatctgattgagcattggcgcattcataccggagctaggccatacgagtgcattgagtgtggtaagttcttctctcataacagctcattgattaagcacagaagagtacacacaggggctcgtagctatgtctgtagtaaatgtggtaaagcttttggatgtaaggacaccctcgtgcagcaccagataatacacaccggggctaggccttacgaatgctctgaatgcggtaaggctttcagcagaaaagatacgctcgtacaacatcagaaaatccataccggtgagcggccatacgaatgtggtgagtgcggcaaattcttcagccactcaagcaacctcattgtccaccaacgcattcatacaggagctaaaccctacgagtgcaatgagtgcggcaagtgtttttcacacaactcctccctaattctccatcagcgcgtccacactggggctcggccttatgtgtgctccgaatgtggaaaggcttacatctcgagttcccacctagtgcagcacaaaaaggtccacacgggcgccagaccatacgagtgttccgagtgtggaaagttttttagtcgtaattcaggcctcatactgcaccaacgggtgcacacaggcgagaaaccctatgtttgttctgaatgcggaaaggcttacagcagaagctcccacctggtccggcatcagaaagcccacactggggaacgcgctcatgaatgcaacagctttggtggcccattagcagcatccctgaaactggtgtag

SEQ ID NO: 212119 - DNA, 1788 bp, synthetic construct
  misc_feature 1..1788: note = Description of Artificial Sequence: Synthetic coding sequence
  source 1..1788: mol_type = other DNA
atggccgccctgagccccaccttcgccaccagcacccaggacagcacctgccttcaggattctgagttcccagtatcgtctaaagaccattcatgtccccagaacctggatttatttgtgtgctccggattggaaccccacacacctagcgtaggttctcaagagtcagtgaccttccaggatgtggctgtggacttcactgaaaaagagtggcctttgctggactctagccagcggaagttgtacaaagacgtgatgctggagaactatagcaacctgacatctttaggctaccaggtcggaaaaccatccctgattagtcacctggagcaagaagaggaacctagaacagaggagagaggcgctcaccagggcgcctgcgcagattgggagacacccagtaaaacgaagtggtcactgctgatggaggacatattcgggaaggagaccccgtctggggtgacaatggaaagagccggcctcggcgagaagagcacagagtatgctcatctttttgaggtgtttggcatggaccctcaccttacacagcccatggggagacacgccggaaagcgtccttatcaccggcgggactatggcgttgcttttaaagggagaccgcacctgacacaacacatgagtatgtacgatggccgtaagatgcacgagtgtcaccagtgccagaaagcatttactaccagcgcttccctcacccgccatcggaggatccatactggcgaaaaaccgtacgagtgtagtgattgtgggaaggccttcaacgacccctcagctcttcgcagtcacgcccgcacccaccttaaggagaagccattcgattgttctcaatgcggcaatgccttcaggacactttctgccctcaagatccacatgagagtgcataccggcgagagaccttataagtgcgatcagtgcggcaaggcctatggacggagttgccatctgattgcacacaagagaactcacactggcgaaagaccttacgagtgccacgattgtggtaaagcctttcagcatccgtctcacttaaaggaacatgtgaggaaccacaccggcgagaagccttacgcctgtacacagtgcggcaaagcattccggtggaagagcaactttaatctgcataagaaaaaccacatggtagaaaaaacctatgagtgcaaagaatgtgggaagagctttggcgaccttgtgtctcggcgaaagcacatgagaatccacattgtcaagaagcctgttgaatgcaggcaatgcggcaaaactttccgcaatcagagcatattgaagacacatatgaacagccacactggcgagaaaccttatggatgtgatctttgtggaaaggctttcagcgcctctagtaacctgacagcgcatcgaaagatccatacccaggaaagaaggtatgaatgtgctgcctgtggaaaagtgttcggggattacctatcacgaaggcgccacatgagtgtacacctcgtaaaaaagcgggtagagtgccgccagtgcggaaaggcttttcgtaatcagagcacgctcaagacacacatgaggagccataccggggagaagccttacgaatgcgatcattgtggtaaagcattctccattgggtcgaatctgaacgtccaccgacgcatccacaccggagaaaagccgtacgagtgtctggtgtgtgggaaggcattttcagaccactcttctttgcggtctcacgtaaaaacccacaggggcgagaagctgttcgtgtcctctgtgtggaagcggctccagtag

SEQ ID NO: 212120 - DNA, 1692 bp, synthetic construct
  misc_feature 1..1692: note = Description of Artificial Sequence: Synthetic coding sequence
  source 1..1692: mol_type = other DNA
atggccgccctgagccccaccttcgccaccagcacccaggacagcacttgtctccaagattctgagttcccggtgtcaagtaaagatcactcatgtccccagaacctggacctattcgtgtgcagtggcctggagccccacaccccttctgtgggatcacaggaatcagtgacgttccaggatgttgccgtggacttcactgagaaggaatggcctctgctggacagttcacagcggaagttatataaggatgttatgctcgagaattacagtaatcttacttccctcgattgggagactccaagtaagacaaagtggtccctcctaatggaagatatttttgggaaagagaccccgtccggagtaaccatggagcgcgcaggcttaggcgagaagtctacagaatacgcccacctgttcgaagtcttcgggatggatccccacctgacgcagcctatgggaaggcatgccggcaagagaccttaccaccgaagggactatggggttgccttcaagggaagaccacatctgacccaacacatgtctatgtatgatggccgcaaaatgcatgaatgccaccagtgtcagaaagctttcaccacgagcgcctctctgacgcggcaccgacgcatccacacaggagagaagccatatgaatgtagtgactgcgggaaggcctttaatgaccctagcgcattgcgttcccacgcccggacccatctgaaggagaaacctttcgactgctcccagtgcggaaacgccttccgaactctcagtgctctgaaaatccacatgcgagtccacacaggcgagcgtccatataagtgtgaccagtgcggaaaggcttatggacgatcctgccacctgatcgcacacaaacggactcacactggagagagaccatatgaatgccacgactgcgggaaggcctttcagcaccccagtcacctgaaggaacatgtgcggaaccacacgggcgaaaaaccatacgcttgcacccaatgtggaaaggcctttagatggaagagcaactttaaccttcataaaaagaatcatatggtcgaaaaaacttatgagtgtaaggagtgcggtaaatcattcggggatttagtgtcccggaggaaacacatgcgtatccacattgttaaaaagcctgtagagtgtcgtcagtgtgggaaaacgtttaggaaccagagcatcttaaaaacacacatgaacagtcacaccggtgagaaaccatatggatgtgatctatgtggcaaggcgttctcagcttcaagtaacctcacggctcataggaagattcacacccaggagcggagatatgagtgcgccgcgtgtggcaaggtatttggagactacttatctagaagaagacacatgtcggtgcacctggtgaagaagcgggtggaatgtcggcagtgtggcaaggccttcagaaatcagtctacccttaagacacatatgcgctcacacaccggggaaaaaccatatgagtgcgaccattgcggcaaggccttttctatcggctccaacctgaatgtgcacagacgcatccatacgggtgagaaaccttatgaatgcttggtgtgtggaaaggcattcagcgaccactcttccctcaggtcccatgtaaagacacaccgcggtgagaagttgtttgtgagtagtgtgtggaaacgacttcaatag

SEQ ID NO: 212121 - DNA, 369 bp, synthetic construct
  misc_feature 1..369: note = Description of Artificial Sequence: Synthetic coding sequence
  source 1..369: mol_type = other DNA
atgaacttcagcagccaccggcggcggctgcccagcccccccctgccaagatcttactcacagagcagcacaagcacgcaggactccacttgcctgcaggattctgaattccctgtgagctctaaggaccactcttgccctcagaacctagacttgtttgtgtgtagcggattggagccccatacccctagcgtgggatcgcaggagtctgtgacctttcaagacgtggctgtggattttaccgagaaggaatggcccctgctggacagttctcagcgcaaattatacaaggacgtgatgctggaaaactatagcaaccttacgtcgctgggcaaggcaagcgcaataagcccactcatccacccatag

SEQ ID NO: 212122 - DNA, 822 bp, synthetic construct
  misc_feature 1..822: note = Description of Artificial Sequence: Synthetic coding sequence
  source 1..822: mol_type = other DNA
atgttcggcttccccaccgccaccctgctggactgccacggccggtacgcccaaaacgtggccttcttcaacgttatgaccgaggcacaccacaagtacgatcactctgaggctaccggcagctcttcatgggacatccagaactcattccgaagagaaaagctagagcagaaatcacctgacagcaaaactctacaggaggattcaccaggcgtcagacagcgcgtgtacgagtgccaggagtgtgggaagtcgttccggcagaagggctctttgaccctccacgagaggatacacactggccagaagccatttgagtgcacccattgcggaaagagcttccgggccaaaggcaatcttgttacacaccaacgcatccacactggggagaagccttatcagtgcaaagagtgcggtaagtcgttttctcagcgcggctccttggcagtacatgagcggctccataccggtcagaaaccttacgaatgtgccatatgccagaggtcatttcggaaccaatcaaacttggcagtccatagacgagtccattctggcgagaaaccgtaccgctgcgatcagtgtggcaaggcgttcagtcaaaagggttccctgatcgtacatatcagagtgcacaccggtctgaagccctatgcatgtacccagtgccgaaaaagttttcacacacgcgggaactgtattcttcatgggaagatccataccggagagactccttacctgtgcggccaatgcggcaagtccttcactcagcgtggatctcttgccgtacatcaaaggtcctgctcccagcgtctcaccttatag

SEQ ID NO: 212123 - DNA, 822 bp, synthetic construct
  misc_feature 1..822: note = Description of Artificial Sequence: Synthetic coding sequence
  source 1..822: mol_type = other DNA
atgttcggcttccccaccgccaccctgctggactgccacggccggtacgcacaaaatgttgctttctttaacgtgatgacggaggctcatcataagtacgatcacagtgaggcaaccggtagctcttcctgggacattcagaatagttttaggcgcgagaaactggagcagaaatcaccagactcaaaaaccctccaggaagattcacctggcgtacgccagagggtgtacgagtgccaagagtgtggcaagtcctttcgtcagaagggcagcctgaccctgcacgagcgaattcacactgggcagaagccctttgagtgcacccattgcggcaagtcctttagggccaagggcaaccttgtgacgcatcagcggatccacacaggagagaaaccttaccaatgtaaagagtgcggtaagagttttagccagcgaggatccctcgctgtacacgagaggctgcacaccggacagaaaccctacgagtgtgctatctgccagcgcagtttcagaaaccaatcaaaccttgccgttcatcggagagttcactctggggaaaagccataccgctgcgaccagtgcggcaaagcattttcacagaagggaagcctcatagtgcatatccgtgttcacactggtcttaagccatacgcctgcacccagtgcagaaagagctttcatacccggggcaattgcattttgcatgggaagatacacactggtgaaaccccttatctctgtggccagtgtggcaagagtttcacacagaggggctctctcgccgttcaccagagaagttgtagccaaagactgactctctag

SEQ ID NO: 212124 - DNA, 1530 bp, synthetic construct
  misc_feature 1..1530: note = Description of Artificial Sequence: Synthetic coding sequence
  source 1..1530: mol_type = other DNA
atggccctgagccagggcctgctgaccttccgggacgtggccatcgaattctcacaggaagagtggaaatgtctggacccagcccagagaacgctatatagagacgtgatgcttgagaattatcggaacctggtgagtctcgatatctcaagtaaatgtatgatgaataccctttcttccacaggccagggcaacaccgaggtcattcacactggtaccctgcagaggcaggcgtcttaccacatcggcgcattctgctcacaggagattgaaaaggacattcacgactttgttttccaatggcaggaggacgaaacaaacgaccacgaagcccccatgacagaaataaagaagctcactagctcaacggatcgctacgaccagcgacacgcaggcaacaaaccaatcaaaggccagttggagagtcggttccatctgcacctcagaaggcatcgtaggatacacacgggcgagaaaccttacaagtgcgaggaatgtgagaaggtgttttcctgtaaaagtcatctcgagatccatcggatcattcacacgggcgagaagccctacaaatgtaaagtttgcgataaggcctttaaacatgatagccatctggctaaacacacgcggattcaccgaggggataaacactacacttgtaacgaatgtggtaaggtcttcgatcagaaagccactctggcctgccatcatagatcccacacaggggaaaaaccttacaagtgcaacgagtgtggaaaaaccttcagccagacctcacaccttgtgtaccaccaccgattacacacaggggagaagccttacaagtgtaacgagtgtggtaaaactttcgcaaggaatagcgtgctggttatccataaggcagtgcacaccgcagagaagccttataagtgtaacgagtgcggtaaggtcttcaaacaaagagcaacgctcgctggccatcgccgcgtgcacaccggcgaaaagccttaccggtgtgaggagtgcgataaggtcttcagcaggaagtcacatctggagcgccatcgccgaattcacacaggggaaaaaccctacaagtgtaaagtgtgcgacaaggcttttcgaagcgatagtcgcctggccgagcaccaacgagtgcacaccggagagaggccttacacgtgcaatgagtgcgggaaagttttctcaacgaaagcctatttggcatgtcaccagaaactgcacaccggagagaaactgtacgagtgcgaagagtgtgataaagtatacattcgaaagtctcatctagagcgccaccggagaatccataccggagagaagccccacaagtgcggggactgtggaaaggcatttaatagtccatcccacctcattagacaccagaggatacacactggccagaaatcgtataagtgtcaccaatgcggcaaggtattctctctgaggtctctgctggcggagcatcagaagattcccttcggggataactgcttcaagtgtaatgaatactcaaagccttcctctatcaactag

SEQ ID NO: 212125 - DNA, 1530 bp, synthetic construct
  misc_feature 1..1530: note = Description of Artificial Sequence: Synthetic coding sequence
  source 1..1530: mol_type = other DNA
atggccctgagccagggcctgctgaccttccgggacgtggccatcgagttcagccaggaagagtggaagtgcctagatccagctcagcgcaccctgtaccgggacgtgatgttggagaattaccgtaatctggtttctttggatattagcagcaagtgcatgatgaatacacttagtagtacagggcagggaaatactgaggtgattcatactggtaccctgcagagacaggcgtcataccacattggagctttctgttctcaggaaatagagaaggacatccacgattttgtgtttcagtggcaagaggacgaaaccaacgatcatgaggcccctatgacagaaattaaaaagctcacaagctctaccgatagatacgaccaaaggcatgcaggcaataagcctataaagggccagctagaatcaagatttcacctgcacttaaggcgtcaccgcagaatccacactggggaaaaaccctataagtgtgaggagtgtgagaaagttttttcatgcaagtcccacctagagattcatcgtatcatacacactggggagaaaccttacaagtgcaaggtctgtgataaagcctttaaacatgacagccacttggccaaacacactaggatccatagaggagacaaacactatacatgcaacgagtgcgggaaggtcttcgatcaaaaggccaccctggcgtgccaccacagaagccacaccggggaaaagccctacaagtgtaacgaatgcgggaagacattctcccaaacgtcccatctcgtgtatcaccaccgcttacataccggtgagaaaccctacaagtgcaatgagtgcggcaagacctttgcacgaaatagtgtattggtgattcataaggctgtgcatacagccgaaaaaccctacaaatgtaatgaatgtggcaaagtgtttaaacaacgggccaccctagccggtcatcggcgtgtgcacacaggagaaaaaccctacaggtgtgaagagtgtgacaaggttttctctcgaaaatcccatttagaaaggcacaggcgcatccacactggcgagaagccatataagtgtaaggtttgcgataaggccttccggtccgatagcagattggccgagcatcaaagagtgcacactggggagcggccttatacatgcaatgaatgtgggaaagtttttagcaccaaggcgtacctggcatgtcaccaaaaactacataccggcgaaaagctctacgaatgcgaggagtgtgacaaggtgtatattaggaaaagtcatcttgaaagacacagacgtatacacaccggggaaaagccacataaatgtggagactgtgggaaagcttttaactcaccttcccacctcatcaggcaccagaggatacacactggccagaaaagttataaatgtcaccaatgtggtaaagtattcagcctgcgctctctgctcgccgaacatcagaagatccctttcggagacaactgcttcaaatgcaacgagtactcgaaacctagcagcattaattag

SEQ ID NO: 212126 - DNA, 1209 bp, synthetic construct
  misc_feature 1..1209: note = Description of Artificial Sequence: Synthetic coding sequence
  source 1..1209: mol_type = other DNA
atgtacaccagcgaggagaagtgcaaccagcggacccagaagcggaagatttacaatgtgtgcccccgcaaggggaagaagatttttattcacatgcacgagattatacagatagatggccatatatatcagtgcctcgaatgtaagcagaatttctgcgagaacttggcactgatcatgtgcgagagaactcacaccggggaaaagccttacaaatgtgatatgtgtgagaagacattcgtccagagctctgatctcaccagccatcagcgcattcacaattatgagaagccttataagtgctctaaatgcgagaaatccttctggcatcacctggcactcagcggccaccagcggacccatgcaggtaagaagttctacacatgcgacatttgtggtaaaaatttcggacagagcagtgatctcctcgtgcatcaacgctctcacactggagaaaaaccatacttatgcagtgagtgcgataagtgttttagccgtagcaccaatctcattcgccaccggcgaacccataccggtgagaagccgtttaagtgcctagagtgcgaaaaggcgttctccggcaagtccgacctgatctcccaccagcggactcatacgggcgaacggccatataagtgcaataaatgtgaaaaaagctatcggcatagatcagccttcatcgtacacaagcgggtccatacgggcgagaaaccatacaaatgtggagcttgtgagaaatgcttcggccagaagtctgatctgatagttcatcagagggtgcacacgggcgaaaaaccatataagtgcctggaatgcatgcggtctttcactcggagcgccaatctgatccgccatcaggcaactcatacccacactttcaagtgcttggaatatgagaagagctttaattgtagctccgacctgatagtgcatcagcgcatacacatggaggagaaaccgcaccaatggtccgcttgtgaaagtgggttcctacttggcatggacttcgtcgcccagcagaaaatgcgcacacagaccgaagaactccattataagtacacagtgtgcgataagtcttttcatcagagtagtgccctcctgcagcatcagacagtccatatcggcgaaaagcctttcgtgtgcaatgtctccgagaaggggctggaattgagcccaccccatgcatccgaggcttctcagatgtcctag

SEQ ID NO: 212127 - DNA, 1209 bp, synthetic construct
  misc_feature 1..1209: note = Description of Artificial Sequence: Synthetic coding sequence
  source 1..1209: mol_type = other DNA
atgtacaccagcgaggagaagtgcaaccagcggacccagaagcggaaaatatacaatgtatgtccacgaaaagggaaaaaaatttttatccatatgcacgaaatcatccagatcgacgggcatatctatcagtgcctagaatgcaaacagaacttctgtgaaaatctggctcttattatgtgcgaaagaacccacaccggcgagaaaccttataagtgcgacatgtgcgaaaaaactttcgtgcaatcttcagatctgactagccatcagcgaatccataattatgaaaagccatacaaatgttctaagtgcgagaaatctttttggcaccacctggcactgtccgggcatcaacgcactcatgcagggaagaagttttacacatgtgatatttgcgggaagaacttcggccagtccagtgacctgttggtgcaccagaggtcccacaccggcgagaagccttatctttgttccgaatgtgacaaatgcttttccagatctactaacctgattcgtcataggaggacccacacaggggagaaaccatttaagtgcctcgaatgcgaaaaagcttttagtgggaagagcgacctcattagtcatcaacgtactcatactggcgaaaggccctataaatgtaataaatgtgaaaagtcttatagacatcgaagtgctttcattgttcataaacgtgtccacacgggggaaaagccctacaagtgcggggcttgcgaaaaatgtttcggacagaagagtgacctcattgtccatcagcgggtgcacacaggcgaaaaaccttacaaatgtctcgaatgtatgaggtccttcacccgcagtgccaatctcattcgccatcaggccactcatacccatacattcaagtgtctcgagtatgagaagtccttcaattgttcaagcgatttaattgtccaccagcggatccacatggaggaaaagccccatcagtggtccgcctgcgagtcgggattcctgcttggcatggactttgttgcacagcaaaaaatgcggacacagaccgaagagcttcactacaaatatacggtgtgtgacaaaagtttccaccagtcttctgccctgctgcaacatcagacagtacacatcggcgagaaacctttcgtgtgtaatgttagcgagaagggattagaattaagccctcctcatgcatcagaagccagccagatgtcgtag

SEQ ID NO: 212128 - DNA, 81 bp, synthetic construct
  misc_feature 1..81: note = Description of Artificial Sequence: Synthetic coding sequence
  source 1..81: mol_type = other DNA
atgtacaccagcgaggagaagtgcaaccagcggacccagaagcggaagatctataatgtctgcccaagaaaaggtaagtag

SEQ ID NO: 212129 - DNA, 1221 bp, synthetic construct
  misc_feature 1..1221: note = Description of Artificial Sequence: Synthetic coding sequence
  source 1..1221: mol_type = other DNA
atggccagcaccgaggagcagtacgacctgaagatcgtgaaggtggaggaggacccaatctgggatcaagaaactcatctccgcggcaacaacttcagcggccaagaagcgagtcgccagctgttccggcaattttgttatcaggaaacccctggccctagggaggccctgagtcgcctaagagaactgtgccatcagtggctgcgtccggaaattcatactaaggaacaaatcctggaactcctcgtgctggaacagttcctcaccatactgcccgaagagctacaggcctgggttagagagcatcatcctgaatcgggagaggaggccgtggcagtggtggaagaccttgagcaggagttgagcgagcctggcaaccaagctcctgatcatgagcacgggcattctgaagtgctgctggaagacgtggaacacctcaaagttaagcaagagcctacagacatccagctgcagccgatggtcacacagctgcgttacgaatctttctgtttacaccaattccaggagcaggatggcgagtctattcccgagaatcaggaactggcctcgaagcaggaaatactgaaagagatggaacaccttggggactctaagttgcaacgcgatgtgagcctggacagcaagtatcgtgagacttgtaaaagggacagcaaggcagaaaagcagcaggcccacagcacaggcgagcgccgccacagatgcaacgaatgcgggaaaagctttacaaagtctagtgttctgatcgagcaccagaggattcacacaggcgaaaagccttatgaatgcgaagaatgcggcaaggctttttctcgacggtcctcgctcaatgagcatcgcagaagccacaccggggagaagccatatcaatgtaaagagtgcggcaaggcgtttagtgcctctaatggcctgactcgccaccggcgaattcacacaggcgaaaagccctacgaatgcaaggtgtgcggcaaagcatttctattatctagctgccttgtgcagcaccagagaatccacacaggcgaaaagcgataccagtgccgggagtgtggcaaagctttcatccagaatgccggcctgttccagcacctgagagtacacactggcgagaagccctatcagtgcagccagtgtagcaaactgttcagcaagagaactttgctgaaaaagcaccagaagatccatacaggggagcggccctag

SEQ ID NO: 212130 - DNA, 1221 bp, synthetic construct
  misc_feature 1..1221: note = Description of Artificial Sequence: Synthetic coding sequence
  source 1..1221: mol_type = other DNA
atggccagcaccgaggagcagtacgacctgaagatcgtgaaggtggaagaagaccctatttgggaccaggaaacacacctgcgcggcaacaacttctcgggccaggaggcatcaagacagctgtttcgacaattttgttaccaggagacgcctggaccaagagaggccctgtccagattacgcgagctctgtcaccagtggctgcgccctgagattcatactaaagaacagatccttgagcttctcgtgctcgaacagtttctgactatcttgccggaagagctgcaagcctgggtcagggagcaccaccccgaatctggcgaagaggcggtggccgtcgtggaggacctggaacaggaactgagtgagccaggcaaccaggcaccggatcatgagcatggtcatagcgaagttttactggaggacgtcgaacatctgaaagtgaaacaagaaccgactgatatccagctgcagccaatggtgacccagttgcggtacgagtctttctgtctgcatcagtttcaagagcaggatggtgagtcaattccagagaatcaggagctggcatccaagcaggaaatcctgaaagagatggagcatctcggagatagtaaactgcagcgcgacgtgtctctagattcaaagtacagggaaacatgcaaaagagattcgaaagccgagaagcagcaggcccattcaaccggggaacgcagacacaggtgtaacgaatgtggcaaatctttcactaagtcctctgtgctgattgaacatcagagaatacacacaggcgagaaaccatatgaatgcgaagaatgtggtaaggcttttagtcggcggagttccctgaacgaacatagaaggtcacacaccggggaaaagccatatcagtgcaaagagtgcggaaaggcattctccgcatcaaatggattgactcgacacagacggattcacacgggggagaaaccgtacgagtgtaaggtatgtggaaaggcttttcttctgagctcttgtctagttcaacaccagcgcattcacacaggagagaagcgatatcagtgtcgggagtgcggaaaggccttcattcagaacgccgggctcttccagcacctcagggttcacacaggcgagaaaccttatcaatgtagtcaatgctccaaactgttcagcaagaggaccctgttaaaaaaacaccagaagatccataccggtgagcgaccgtag

SEQ ID NO: 212131 - DNA, 1221 bp, synthetic construct
  misc_feature 1..1221: note = Description of Artificial Sequence: Synthetic coding sequence
  source 1..1221: mol_type = other DNA
atggccagcaccgaggagcagtacgacctgaagatcgtgaaggtggaggaggatcctatatgggatcaagaaacacacttaaggggaaacaattttagcggccaggaggccagtcgccagctgttccggcaattttgctatcaggagacgcccggccccagagaggctctgtctaggctccgcgagctatgccatcagtggcttagacccgagatccacaccaaggagcagatcctggaactgctggttttggaacagtttctaacgatcctgcccgaggaactgcaggcttgggtgagggaacaccacccagaaagtggcgaggaggctgtagcggtcgtggaggacctggagcaagagctctcagaacctggcaatcaggccccagaccatgagcatggacatagtgaggtcctgctggaagatgtagaacacctgaaggtgaagcaggagcccaccgatatccaactgcagcctatggtcacacaactgaggtatgaaagcttctgcctacaccagttccaggagcaagatggtgagtccatcccagaaaatcaggaactagccagcaagcaggagatcctcaaagaaatggagcacctgggtgactctaagctgcagcgcgatgttagccttgacagcaagtacagggagacatgcaaacgagattctaaggccgagaagcagcaagcacactccaccggcgagcggcggcacagatgtaacgagtgtggcaaatcattcactaagagttctgttctgattgagcaccagcgcatccatacaggggaaaaaccctatgagtgcgaggagtgtggaaaagcattttccagacggagtagccttaatgaacatcggcgtagccacacaggggagaaaccttaccaatgtaaggagtgtgggaaagcgttctcggctagcaatggcctcactaggcatcggaggatccataccggagaaaaaccgtatgagtgcaaggtctgcggaaaggccttcttgttgtcgagctgtcttgtccagcatcagaggatccacactggggaaaagaggtaccagtgcagggagtgtggtaaggcattcattcaaaacgccggcctttttcagcatttgagggtgcacactggggaaaaaccgtatcagtgcagtcagtgtagtaagctgttctctaaaagaaccctgctcaagaagcaccagaagatccatactggtgagcgaccttag

SEQ ID NO: 212132 - DNA, 324 bp, synthetic construct
  misc_feature 1..324: note = Description of Artificial Sequence: Synthetic coding sequence
  source 1..324: mol_type = other DNA
atggccagcaccgaggagcagtacgacctgaagatcgtgaaggtggaggaggatcctatatgggaccaggagacccacttgagaggcaacaatttttctggacaggaggcgagcagacagctgttcaggcagttctgttaccaggaaacccctggaccccgggaggccctgtcacggctccgcgaattgtgccatcagtggctgaggccagagatccatactaaggagcaaattctggagctattagttttagaacaatttctcaccatccttcccgaggagcttcaggcctgggtgagagaacaccatcccgagtcagggtag

SEQ ID NO: 212133 - DNA, 237 bp, synthetic construct
  misc_feature 1..237: note = Description of Artificial Sequence: Synthetic coding sequence
  source 1..237: mol_type = other DNA
atggccagcaccgaggagcagtacgacctgaagatcgtgaaggtggaggaggacccaatctgggaccaggagactcatcttcgaggcaataacttttcgggtcaggaggcaagtaggcaactgtttcgccagttctgttatcaggaaacaccgggtccccgagaagcactctctcgcctgagagaactctgccatcagtggctgcgcccagagatccacacgaaggagcagatctag

SEQ ID NO: 212134 - DNA, 1221 bp, synthetic construct
  misc_feature 1..1221: note = Description of Artificial Sequence: Synthetic coding sequence
  source 1..1221: mol_type = other DNA
atggccagcaccgaggagcagtacgacctgaagatcgtgaaggtggaggaggatccaatctgggatcaagagacccatctccgcggtaacaatttctccggccaggaggccagcaggcagctgttcaggcagttttgttaccaggaaacccctggccccagggaggccctgagcaggctcagagagctgtgccaccaatggctgaggccagaaatccatacgaaggagcagatcctggaattactcgtactcgagcagtttctgaccatcctgcctgaagagctacaggcgtgggtgcgagaacaccacccggagagtggagaggaggccgttgcagtggtagaagatttggagcaggaattgtccgaacccggcaaccaggcccccgaccacgagcatgggcactctgaggtattgctggaggacgtggagcatctgaaagtcaagcaggagccaaccgatattcaattgcagccaatggtcactcagctgcgatacgaatccttctgcctgcaccagtttcaggagcaggacggcgaaagcattccggagaatcaggaattagctagcaagcaagaaatactgaaggaaatggaacacctaggtgacagcaagcttcagcgagacgtgagtctcgattccaaatacagggagacttgcaaacgcgatagtaaagcagagaaacagcaagcccactctactggggagagaagacacaggtgtaacgagtgcggaaagtcctttactaaaagttctgttctgatcgagcaccagaggattcacacgggagagaaaccctatgagtgtgaggagtgtggcaaagccttctcacgacggtcttccttgaatgagcacaggcggtctcacacaggcgaaaagccttaccagtgtaaggaatgtgggaaggccttttccgcttcaaatggcctgactaggcacaggcgaatccatacaggtgagaaaccatatgagtgcaaggtctgcggcaaggcattcctgttgtcctcctgtctggtgcagcatcagagaatacacacaggggagaagagataccagtgcagagaatgcggaaaagcctttatacaaaatgctggcctcttccagcacctgcgggtacacaccggtgaaaagccttatcagtgcagtcagtgcagcaagctgttcagcaaacgcactctgttgaaaaaacatcagaagatacatactggggagagaccgtag

SEQ ID NO: 212135 - DNA, 54 bp, synthetic construct
  misc_feature 1..54: note = Description of Artificial Sequence: Synthetic coding sequence
  source 1..54: mol_type = other DNA
atggccagcaccgaggagcagtacgacctgaagatcgtgaaggtggaagagtag

SEQ ID NO: 212136 - DNA, 468 bp, synthetic construct
  misc_feature 1..468: note = Description of Artificial Sequence: Synthetic coding sequence
  source 1..468: mol_type = other DNA
atggccagcaccgaggagcagtacgacctgaagatcgtgaaggtggaggaagaccctatctgggaccaagagacacatctgagagggaacaacttctcaggtcaggaagcctccagacaattattccgccagttttgttatcaagagacaccgggccccagagaagccttgtcaagactgcgagagctctgtcaccagtggctgagacccgaaatccacacaaaagagcagattctggagctactggtgttggaacagtttctgaccatcctacctgaagagttgcaggcatgggtaagggaacatcatcccgaaagcggagaagaggctgtggctgtcgttgaagacctggaacaagagctatccgagccgggaaaccaggctcccgaccacgaacatggtcactccgaagtgctgcttgaagacgttgagcatcttaaggtcaaacaggagccaacagatatctag

SEQ ID NO: 212137 - DNA, 75 bp, synthetic construct; identical to SEQ ID NO: 105943
  misc_feature 1..75: note = Description of Artificial Sequence: Synthetic coding sequence
  source 1..75: mol_type = other DNA

SEQ ID NO: 212138 - DNA, 312 bp, synthetic construct
  misc_feature 1..312: note = Description of Artificial Sequence: Synthetic coding sequence
  source 1..312: mol_type = other DNA
atggccagcaccgaggagcagtacgacctgaagatcgtgaaggtggaagaggacccaatctgggaccaggagacccacctgcgcggaaacaacttctccggacaggaagcgagccggcaactcttccgacaattctgctaccaggaaacacccggccctcgagaagctctttctaggttgcgcgaactgtgccatcaatggttacggcccgaaattcataccaaggagcaaattctggagcttcttgtgttggagcagttcctcaccattctgcctgaagagctccaggcttgggtgcgggaacatcactag

SEQ ID NO: 212139 - DNA, 447 bp, synthetic construct
  misc_feature 1..447: note = Description of Artificial Sequence: Synthetic coding sequence
  source 1..447: mol_type = other DNA
atggccagcaccgaggagcagtacgacctgaagatcgtgaaggtggaagaagatccgatttgggaccaggaaacacaccttcgcggtaataacttcagcggacaggaggcatctcggcagctgttccgtcaattctgttaccaagagacccctggtcctagggaagcactgtctagactgagagagctgtgtcatcaatggttgagacctgagattcacactaaggagcagatccttgagctcctggtgctcgaacagttcctaaccatcctgcccgaggagttacaggcatgggtgagagaacaccatcccgagtcgggtgaggaagccgttgcagttgtggaggatctggagcaagagctgtctgagccaggaaatcaggcgcccgaccacgaacacggtcactctgaagtcttactcgaggatgttgaacatctcaaagtttag

SEQ ID NO: 212140 - DNA, 654 bp, synthetic construct
  misc_feature 1..654: note = Description of Artificial Sequence: Synthetic coding sequence
  source 1..654: mol_type = other DNA
atggccagcaccgaggagcagtacgacctgaagatcgtgaaggtggaagaagatccgatatgggatcaggagactcaccttcggggaaataacttctccggccaggaggcctctcggcaattgttcaggcagttttgttaccaggagacaccaggcccccgagaggccctgtcccgccttagagagctgtgccaccagtggctgagacccgagatccacacaaaggagcaaatcctggaattgctggtcctggaacagttcctgaccattttaccagaagagctgcaagcctgggtcagggaacatcaccccgagtcaggtgaagaagctgtggccgtcgttgaggatttagagcaggagctgagcgagcccggtaatcaggcaccagatcacgaacacggccactcagaggtactactggaggacgtggaacatctgaaagtgaagcaggagcctactgacatacaactgcagcccatggtcacacagctacgctacgagagtttttgtctccatcagttccaggaacaggacggcgaaagtatccctgaaaatcaggagctagcctcaaagcaggagattctaaaggagatggagcatctgggtgatagcaagctgcagcgcgacgtgtccctagactcaaaatacagatag

SEQ ID NO: 212141 - DNA, 963 bp, synthetic construct
  misc_feature 1..963: note = Description of Artificial Sequence: Synthetic coding sequence
  source 1..963: mol_type = other DNA
atgcccaagaagaagaccggcgcccggaagaaggccgagaaccggcgggaaagggagaagcagttacgcgcatcccgttcaaccatagatctggccaagcatccctgtaatgcctccatggagtgcgataaatgtcagcggaggcaaaaaaatagagctttctgttatttctgtaattctgtgcagaaattacctatttgtgcacaatgcgggaaaactaaatgcatgatgaaaagcagtgactgtgtcataaaacacgctggcgtttacagcactgggctcgcaatggtaggggccatctgtgacttctgcgaggcatgggtctgccacggaaggaagtgtctatcaactcatgcgtgcgcctgcccgctcaccgacgccgaatgcgtggagtgcgaacgaggagtgtgggatcatggaggccgtatcttttcttgctccttctgtcataactttctgtgcgaagacgaccagtttgagcatcaggccagctgtcaggtgctggaggctgagacatttaagtgtgtttcttgtaaccgactcggacagcacagctgcctcaggtgcaaggcatgcttttgcgacgatcatactcgatctaaggtattcaagcaagagaagggcaagcaacctccatgccctaaatgtggccacgagacccaggagaccaaggatctgtctatgagcacccggtccctgaagttcgggaggcagacaggaggggaggagggggacggggcctccggctacgacgcttactggaagaacctgagctcagacaagtatggggacacgtcttatcatgatgaggaggaggatgagtacgaggctgaagatgacgaagaagaggaagacgagggccgtaaagattccgacactgagagtagtgacctgtttacaaatctgaacttaggtagaacatacgcttctggctatgctcactatgaagagcaagagaactag

SEQ ID NO: 212142 - DNA, 783 bp, synthetic construct
  misc_feature 1..783: note = Description of Artificial Sequence: Synthetic coding sequence
  source 1..783: mol_type = other DNA
atgccccagtggaacgtgaccagcgtgcggggcaagaccaagtgcatgatgaaatctagcgactgtgttattaagcacgccggggtgtactctacagggctcgctatggtgggcgctatttgcgacttttgtgaggcctgggtttgtcacggtaggaagtgcctgtccacccacgcatgcgcctgtcccctgacagatgctgaatgcgtggagtgcgagcggggggtgtgggatcacggagggcgtatcttctcctgttcattctgtcataatttcctgtgcgaagacgaccagtttgagcaccaggctagctgccaggtcttagaggctgagacgtttaagtgcgtgtcctgcaatagactcggccaacacagctgtttacggtgtaaggcctgcttttgtgatgatcatactaggagtaaagtctttaagcaggagaaaggtaagcaacccccctgtccgaagtgcgggcacgaaacccaagaaactaaggacctgtcaatgtccacacggagcttaaagttcggccgacaaacagggggtgaagaaggggacggtgccagcggctacgatgcgtactggaagaacctgagcagcgacaaatatggggacaccagctatcatgacgaagaagaggacgagtacgaagccgaagatgatgaagaggaggaggacgaagggagaaaggactcagacactgaaagtagtgatctgttcaccaatctcaatctaggcaggacatatgcttcaggatacgctcattatgaggaacaggaaaactag

SEQ ID NO: 212143 - DNA, 423 bp, synthetic construct
  misc_feature 1..423: note = Description of Artificial Sequence: Synthetic coding sequence
  source 1..423: mol_type = other DNA
atgcccaagaagaagaccggcgcccggaagaaggccgagaaccggagagagagagagaagcagctgcgtgcaagcaggtcaactattgacctggcgaaacatccttgtaacgcgagtatggagtgcgacaagtgccagaggcgccagaagaaccgagcattctgctacttttgcaactcagtgcagaaactgccaatctgcgcccagtgtggaaaaacaaaatgcatgatgaagagcagcgattgcgtcatcaagcacgccggcgtctactccaccggtctcgccatggtgggggcaatttgtgacttttgcgaggcctgggtgtgccacggtcggaagtgtctttccactcatgcctgcgcttgtcctctgacagatgccgaatgcgtggaatgcgagcggggagtctgggaccacggctag

SEQ ID NO: 212144 - DNA, 462 bp, synthetic construct
  misc_feature 1..462: note = Description of Artificial Sequence: Synthetic coding sequence
  source 1..462: mol_type = other DNA
atgcccaagaagaagaccggcgcccggaagaaggccgagaaccggcgcgaaagagaaaagcagctccgcgccagccgctccaccattgacctcgccaagcacccttgcaatgcttccatggaatgtgacaagtgtcagcggcggcaaaagaatagagccttctgctacttctgcaattccgtgcagaagcttcccatctgcgcccagtgcggcaagactaaatgtatgatgaaaagcagtgattgtgtgatcaagcacgccggcgtgtatagcactggcctggcaatggtgggagcgatatgtgacttttgcgaggcctgggtgtgccatggtcgaaagtgcctatccactcacgcttgcgcttgtccactcacagatgcagagtgtgttgaatgcgaacggggagtatgggatcacgggggccggatcttcagttgttctttctgtcacaatttcctgtag

SEQ ID NO: 212145 - DNA, 690 bp, synthetic construct
  misc_feature 1..690: note = Description of Artificial Sequence: Synthetic coding sequence
  source 1..690: mol_type = other DNA
atgcccaagaagaagaccggcgcccggaagaaggccgagaaccggcgggagcgagaaaaacagctgcgcgcttcaagaagtacaatcgacctggccaaacacccttgcaacgcttcaatggaatgcgacaaatgccagcggaggcaaaaaaatcgggctttctgctacttctgtaactccgtacagaaactccctatttgtgcacaatgtggcaaaacaaagtgtatgatgaagtctagtgactgcgtcattaagcatgccggcgtgtactcgactggccttgccatggtcggcgccatctgcgatttttgcgaagcctgggtctgtcacggaagaaagtgcctgagcacgcacgcttgtgcatgtcctctgaccgacgccgagtgtgtggagtgtgagagaggcgtatgggatcacgggggcagaatcttctcgtgtagtttttgccacaacttcctgtgcgaggatgaccagttcgaacaccaggcatcctgccaggttctagaggccgaaacttttaaatgtgtgagctgtaatagattgggtcagcacagttgtctccggtgcaaagcctgtttttgtgatgatcacactcgttccaaggtcttcaagcaagagaaaggtaagcagccgccatgtccgaaatgtgggcatgaaacccaggagaccaaggatctgagtatgtcctag

SEQ ID NO: 212146 - DNA, 1392 bp, synthetic construct
  misc_feature 1..1392: note = Description of Artificial Sequence: Synthetic coding sequence
  source 1..1392: mol_type = other DNA
atggcccagggcctggtgaccttcgccgacgtggccatcgacttctctcaagaagaatgggcctgcctgaactccgctcagagggatctttactgggatgtcatgttggagaactactctaacctcgtcagcctcgaccttgagagcgcctacgagaacaaatctctcccaactgagaaaaatattcacgaaataagagcatcaaaacgcaattcagaccgtcggtccaagagtctcggccggaactggatttgcgagggtactcttgagcgaccccagagatctaggggccggtacgtgaatcaaatgataataaactacgttaagcggcccgccacgcgcgaggggacgccaccccgcactcaccagagacaccataaagagaattcgttcgaatgcaaagactgtggaaaggctttttctcggggataccaattgagtcagcaccagaagatccatactggagagaaaccctacgaatgcaaggagtgcaaaaaggcattcaggtgggggaaccagcttacacagcaccagaagattcatacgggcgagaagccctacgaatgtaaagactgcggcaaagcttttagatggggctcatccctggttattcataaacgtatccacacgggagagaagccctacgagtgcaaggattgcggaaaggccttcagacggggggacgagttgacccagcatcagcggttccatactggggagaaagactacgaatgtaaagattgtgggaagaccttctcacgcgtatataagctcattcaacacaagcgcatccatagtggggagaaaccctatgagtgtaaggactgcgggaaggcattcatttgcggtagtagtctgatccaacacaaacggattcatacgggtgaaaagccttacgaatgccaggagtgcggaaaagctttcactcgtgtcaattacctgacccaacatcagaagatccacactggtgagaaaccacatgaatgtaaagaatgtgggaaagcattccgttgggggagtagcttagtgaagcatgaacgcatccacaccggcgaaaagccttataaatgtacggagtgcgggaaggcgttcaactgcgggtaccacttgacacagcacgagcggatccacaccggagagaccccctacaagtgtaaggaatgtggcaaggcgtttatttacgggtctagcttggtgaaacacgaaagaatccacactggagttaagccatacggctgtacagagtgtggaaagtctttttcgcacggacatcaattaacccagcatcagaagacccattctggggcaaaaagttacgaatgtaaggagtgtggcaaggcatgcaatcatttgaaccacctcagagagcaccaacgcattcacaacagttag

SEQ ID NO: 212147 - DNA, 1392 bp, synthetic construct
  misc_feature 1..1392: note = Description of Artificial Sequence: Synthetic coding sequence
  source 1..1392: mol_type = other DNA
atggcccagggcctggtgaccttcgccgacgtggccatcgacttctcgcaggaagagtgggcctgcctgaactcagctcagcgagatctctattgggatgtgatgctggagaattattcgaatctggtaagcctcgacttagagagtgcttacgaaaataagtctctgcccaccgaaaaaaacatccacgagattcgcgcctctaagcgaaacagcgaccgtcgaagcaagagcctgggtcggaattggatctgtgagggcaccttagaacgtccgcagaggagtaggggacggtatgtaaatcaaatgatcattaactacgtgaagcgccccgctacgcgcgaggggacacctccgcggactcatcagcgccatcataaagaaaattccttcgaatgcaaggactgcggtaaggctttcagccgcggctatcagctcagtcagcaccagaagatccataccggcgaaaagccgtatgagtgcaaggagtgcaagaaggcctttaggtgggggaaccagctaacacaacatcaaaagattcacaccggggagaaaccttatgaatgtaaagactgcggtaaagccttcaggtggggttcttctctcgtcatccacaaacgaatccacacaggagaaaaaccatatgaatgtaaagattgtggtaaggcttttagaaggggtgacgaactcactcagcatcaacgttttcatacaggtgagaaggattacgagtgtaaagattgtggcaaaaccttttcaagagtctacaaactcatacagcacaaacggatccacagcggagagaagccatatgagtgcaaagactgtggcaaagcatttatctgcggcagcagcttaatccaacataagcgaatacacaccggggaaaaaccctacgagtgccaggaatgtgggaaggctttcacccgagttaattatctgacgcaacatcagaagattcacaccggcgagaaacctcatgagtgtaaggaatgtggcaaggcgtttaggtggggctcatcattagtgaaacacgaaagaattcatacaggggaaaagccctacaaatgcacagaatgtggtaaagcctttaactgtggctaccacttaacccagcacgaaaggatacatacgggcgagaccccttataaatgcaaagagtgcggaaaggccttcatctacgggtcaagcttggtgaagcatgagcgtatccacactggcgtaaagccttacggatgtaccgagtgtggtaaatcatttagccacggccaccagctcacccagcatcagaagacgcatagcggagcaaagtcgtacgagtgtaaggaatgcgggaaggcctgtaaccacttgaaccaccttcgggagcaccagagaatccacaactcatag

SEQ ID NO: 212148 - DNA, 1392 bp, synthetic construct
  misc_feature 1..1392: note = Description of Artificial Sequence: Synthetic coding sequence
  source 1..1392: mol_type = other DNA
atggcccagggcctggtgaccttcgccgacgtggccatcgacttctcccaggaagagtgggcctgcctgaacagcgctcaacgggatctctattgggatgtgatgctggaaaactattcaaatcttgtcagcttggatctggagagcgcttatgaaaataagagcctacctaccgaaaagaatattcacgagataagggcgagtaagcgaaattccgatagacgatcaaaaagcctggggcgtaactggatttgtgaagggacactcgagaggccacagaggagtcggggcagatatgtgaaccagatgataatcaattacgtgaagcgcccagctacgcgtgaggggacaccaccccgcacgcaccagagacaccacaaggagaactcgttcgaatgcaaggactgtggcaaagcgttctcccgcgggtaccagctgagccagcaccagaagatccataccggggagaagccttatgaatgcaaggagtgcaaaaaggccttcagatggggcaatcagctgactcaacatcaaaagatccacacaggggaaaagccctatgagtgcaaagattgcggcaaggcttttaggtgggggtcgtcactggtgatccataagagaatccacaccggagaaaagccatacgaatgcaaggactgcggcaaagcatttcggcgcggagacgaattgacacagcaccagaggtttcacacaggtgagaaggactacgagtgtaaggactgcggtaaaactttctcaagggtctataagttgatccaacataaacgaattcactcgggggagaagccatacgagtgtaaggactgtgggaaggccttcatttgcggcagttccctaatccagcacaaacgcattcacaccggcgagaagccctatgaatgccaagaatgtgggaaggcgttcactcgggtcaattatcttacacagcatcagaaaattcacactggggagaagccgcatgagtgcaaggaatgtggcaaggctttccgatgggggtcaagcctcgtgaagcacgagcggattcacaccggggagaaaccatacaaatgcactgagtgcggaaaggccttcaattgtggatatcatcttacacagcatgagaggattcacaccggcgagacaccctacaaatgtaaagaatgtggaaaggcctttatttatggaagttctttggtgaaacacgaaagaattcacacgggagtgaaaccttatggatgtacagagtgtggtaagagcttttctcatggccatcaattaacccagcatcagaaaactcacagcggggccaagtcttacgaatgcaaagaatgtggaaaagcatgcaatcacctaaatcacttaagagaacatcagaggatccataattcctag

SEQ ID NO: 212149 - DNA, 192 bp, synthetic construct
  misc_feature 1..192: note = Description of Artificial Sequence: Synthetic coding sequence
  source 1..192: mol_type = other DNA
atggcccagggcctggtgaccttcgccgacgtggccatcgacttctcccaggaggagtgggcctgtttgaacagcgcccagagggacctttactgggatgtgatgctcgaaaattactctaatctcgtcagcctggacctcgagtcagcttacgagaataaatccctgcctacagagaaaaatattcactag

SEQ ID NO: 212150 - DNA, 258 bp, synthetic construct
  misc_feature 1..258: note = Description of Artificial Sequence: Synthetic coding sequence
  source 1..258: mol_type = other DNA
atggcccagggcctggtgaccttcgccgacgtggccatcgacttctcgcaggaggagtgggcctgcttgaattcagcccagagagatctatactgggatgtgatgcttgaaaattactcaaacttggtgtctctcgatctggagtcggcttacgagaacaagtcattacctaccgagaaaaacatacatgaaatccgcgcctcaaagagaaacagcgaccgcagaagcaagagccttgggcgcaactggatatgctag

SEQ ID NO: 212151 - DNA, 201 bp, synthetic construct
  misc_feature 1..201: note = Description of Artificial Sequence: Synthetic coding sequence
  source 1..201: mol_type = other DNA
atggcccagggcctggtgaccttcgccgacgtggccatcgacttcagccaggaggagtgggcctgtctcaattctgctcagcgcgacctctactgggatgtcatgctcgagaactatagcaaccttgtgagcctggatttagagtcagcatatgagaataagtcgcttcccaccgaaaagaatattcatgaaattaggtag

SEQ ID NO: 212152 - DNA, 195 bp, synthetic construct
  misc_feature 1..195: note = Description of Artificial Sequence: Synthetic coding sequence
  source 1..195: mol_type = other DNA
atggcccagggcctggtgaccttcgccgacgtggccatcgacttctcacaggaggagtgggcgtgtctgaatagtgcccagagagatctctattgggacgtcatgctcgaaaattactccaatttagtgagcctggatctggagtcagcttatgagaataagtctctgcccaccgagaaaaatatacacgaatag

SEQ ID NO: 212153 - DNA, 534 bp, synthetic construct
  misc_feature 1..534: note = Description of Artificial Sequence: Synthetic coding sequence
  source 1..534: mol_type = other DNA
atggcccagggcctggtgaccttcgccgacgtggccatcgacttcagccaagaggagtgggcctgcttaaactccgcccagagggacctctactgggacgtcatgctggaaaattatagcaaccttgtgtccctcgatctggagtctgcctatgaaaacaaatctctcccgactgagaaaaacatccatgaaatcagggctagtaagcggaactccgacaggcgaagcaagagtctcggacggaactggatctgcgagggtacactggagcgaccacagagatcgcggggacgctacgtgaatcagatgatcattaactacgtgaaacgccctgccacccgggagggtactcctcctaggacacaccagcgtcatcacaaggagaattctttcgagtgcaaggattgtgggaaggccttttctaggggctaccaactaagtcagcatcaaaagatacatacaggagaaaaaccatatgagtgcaaggagtgtaagaaagcatttcgttggggcaaccaactcacacaacactag

SEQ ID NO: 212154 - DNA, 264 bp, synthetic construct
  misc_feature 1..264: note = Description of Artificial Sequence: Synthetic coding sequence
  source 1..264: mol_type = other DNA
atggcccagggcctggtgaccttcgccgacgtggccatcgacttcagtcaggaggagtgggcctgtctgaattccgcccagagagacctttattgggacgttatgttggagaattacagcaatcttgtctcattggatctggaatccgcctacgagaataaaagcctgcctaccgagaaaaatatccacgaaatcagagcaagcaagcgcaatagcgatcgtcgcagtaagtctctcgggcgtaattggatctgtgagggttag

SEQ ID NO: 212155 - DNA, 144 bp, synthetic construct
  misc_feature 1..144: note = Description of Artificial Sequence: Synthetic coding sequence
  source 1..144: mol_type = other DNA
atggcccagggcctggtgaccttcgccgacgtggccatcgacttcagccaggaagaatgggcctgtctgaattccgcacagcgcgatttgtattgggatgttatgcttgagaactactcaaatctggtgtccttggacctgtag

SEQ ID NO: 212156 - DNA, 1392 bp, synthetic construct
  misc_feature 1..1392: note = Description of Artificial Sequence: Synthetic coding sequence
  source 1..1392: mol_type = other DNA
atggcccagggcctggtgaccttcgccgacgtggccatcgacttctcgcaggaagaatgggcttgcctgaacagtgctcagcgtgacctctactgggacgttatgctggaaaactattccaaccttgtgtctctcgacctcgagtccgcatatgagaataaaagcctccctacagaaaagaacatccacgaaattagagcaagcaaaaggaactctgaccggcgttccaagagcctaggacgcaactggatttgtgaaggtacactggagagaccacagcgctccaggggccgatatgtcaaccagatgatcatcaattacgtgaagcggccagccaccagagaaggtacacccccccgaactcaccagcggcaccacaaagagaattcatttgaatgtaaggactgcgggaaggccttcagcaggggatatcagctctcacagcatcaaaaaattcataccggagagaagccatacgagtgcaaagaatgtaaaaaggccttccggtgggggaatcagttaacgcagcaccagaaaatccacaccggggagaaaccttacgagtgcaaggactgtggaaaagcgtttagatggggctctagtctggtcattcacaaaaggatacatactggcgagaaaccctatgaatgtaaagactgcggaaaggcttttagaagaggtgacgagctgactcagcaccagcggttccacacgggggagaaagactacgagtgtaaagactgtgggaagacctttagtcgcgtgtataagctgatccaacataaacgaattcattcaggtgagaaaccctatgagtgcaaggactgcggcaaggcattcatttgcggttcaagtctgatccagcacaagaggattcacacaggcgagaagccatatgagtgccaggagtgcgggaaggccttcacgagggtgaattaccttactcagcaccagaagattcacacaggcgaaaaaccacatgagtgtaaagagtgcggtaaagcttttcggtggggttctagccttgtcaagcatgaaaggattcatactggcgagaaaccctataaatgcaccgagtgtggtaaggcctttaattgtggttaccacctgacccagcatgagcgaatccacaccggcgagacaccttataaatgtaaagaatgtggtaaagcattcatatacgggtcaagcctcgtgaaacatgagcggatacacaccggtgtgaagccctatggctgtaccgagtgcggtaagtcctttagtcatggtcatcagctcactcaacatcagaagacacattcaggtgctaaaagttatgaatgcaaagagtgtggcaaggcatgtaaccatctaaatcacctgagagagcaccagaggattcacaacagctag

SEQ ID NO: 212157 - DNA, 318 bp, synthetic construct
  misc_feature 1..318: note = Description of Artificial Sequence: Synthetic coding sequence
  source 1..318: mol_type = other DNA
atggcccagggcctggtgaccttcgccgacgtggccatcgacttctctcaggaagagtgggcatgcctgaattccgcccagcgcgatctctactgggacgttatgttagagaattactcaaatctagtgagtttggacctggaatccgcctacgagaataagtcattgccaaccgaaaaaaatatccacgaaattcgcgcttccaagagaaactccgaccggagaagtaagtccttaggacggaactggatatgcgagggcacacttgagaggcctcaacgcagtaggggtcgttacgtgaaccagatgatcatctag

SEQ ID NO: 212158 - DNA, 1392 bp, synthetic construct
  misc_feature 1..1392: note = Description of Artificial Sequence: Synthetic coding sequence
  source 1..1392: mol_type = other DNA
atggcccagggcctggtgaccttcgccgacgtggccatcgacttcagccaggaggaatgggcgtgtctaaatagcgcacagcgggatctctattgggacgtgatgctggagaactacagtaacctggtgagcctggacttagaatctgcttatgaaaacaagagtctgccaacggagaaaaatatccacgaaatccgcgctagcaagcgcaatagcgatcggcgatccaagtctcttggccggaactggatctgtgagggcacactggagcgcccccagcggtctcgcgggaggtacgtgaatcagatgatcatcaactacgtgaaacgacctgctacccgagaggggacaccacctaggacacaccagaggcaccataaggagaattcatttgagtgtaaggactgtgggaaggccttttcaagaggatatcagctatcgcagcaccagaagatccacactggggagaagccatatgaatgcaaggagtgtaagaaagcctttaggtggggtaatcagctcacccagcaccagaaaattcacaccggagagaagccttacgagtgcaaagattgcgggaaagcttttcggtggggcagctccctcgtcatccataaacggattcacacaggcgagaaaccatacgaatgcaaagattgcggcaaggctttccgccggggcgatgaattaacacagcaccagcgcttccacactggagaaaaagattacgaatgcaaagattgtgggaagaccttcagccgggtgtataagttgatccaacacaaacgcatccactctggagaaaagccttatgaatgtaaagattgtggaaaggcgtttatttgtggttcctctctgatacaacacaaaaggattcacaccggcgagaaaccatacgagtgtcaggagtgcggaaaggctttcactcgagtgaattacttaacccagcatcaaaagatccacaccggtgaaaaaccgcatgagtgtaaggagtgcggtaaggcgttccggtggggcagcagcttggtgaagcacgagaggattcacactggtgagaaaccctacaagtgcactgaatgcgggaaggcctttaattgcggctatcatcttacccaacacgaaagaatccacacgggcgagacaccctacaaatgcaaggagtgtggcaaggccttcatttatggttcctcccttgtaaagcatgagagaattcacaccggtgtcaagccctacggttgtactgagtgcggcaagtcattctctcacgggcaccagttgacacagcaccagaaaacacactctggtgccaaatcttacgaatgtaaggaatgtggaaaagcatgcaaccaccttaatcacctgcgagaacaccagaggatccacaattcttag

SEQ ID NO: 212159 - DNA, 1392 bp, synthetic construct
  misc_feature 1..1392: note = Description of Artificial Sequence: Synthetic coding sequence
  source 1..1392: mol_type = other DNA
atggcccagggcctggtgaccttcgccgacgtggccatcgacttcagccaagaagagtgggcctgcctgaatagcgcccagagggacttatactgggacgtgatgctggagaattacagcaacctggtaagcctagacctggagagtgcctacgagaacaaaagtctacctaccgagaaaaacatccacgagatccgagcgtccaagcgaaatagcgaccggcgatcaaagtcgttggggcgaaattggatttgtgagggaactctagaacgcccgcagcgcagcagggggaggtatgtgaaccagatgatcattaactatgtgaagagaccagccacccgagagggcacccctcctagaactcaccagcggcaccacaaagagaattccttcgaatgcaaggactgcggaaaggcttttagccggggctatcagctgtcccagcatcagaagattcacactggagaaaaaccctatgagtgtaaagaatgcaaaaaggcctttcgatggggaaaccagctcacgcagcaccagaagatccacacgggggagaaaccatatgagtgcaaggattgtggcaaggcattccggtggggtagttctctggtgatacacaagcgcatccacactggcgaaaagccttacgaatgtaaggactgtggaaaggcctttagacggggtgatgaactgacgcaacaccagcggttccacacgggcgaaaaagactatgaatgcaaggactgtggcaaaacattttcaagggtgtacaagctgatccagcacaaacgcatccatagtggcgaaaaaccctatgaatgtaaagattgcggcaaggcattcatttgcggctccagcttaattcagcacaagagaatccacaccggtgagaaaccctacgaatgccaggagtgtgggaaggccttcacaagggtgaactacctgacacagcatcagaagattcacactggcgagaagccgcatgagtgtaaggagtgtgggaaagcattcagatgggggtcctcactcgtgaaacacgaacggattcataccggagaaaagccttacaaatgcaccgagtgcggaaaggccttcaactgtggctaccacctcactcagcacgaacggatccacaccggcgagaccccttacaagtgcaaagaatgtggtaaagcttttatttacgggagctccttggtcaagcatgaacgcattcacaccggcgtgaaaccatacggctgcacagagtgtggaaagtcattctcacacgggcaccaactgactcagcatcagaaaacacactccggagcaaaaagctacgagtgcaaagagtgcgggaaggcatgtaaccacctgaaccatctccgggaacaccagagaatccataacagttag

SEQ ID NO: 212160 - DNA, 297 bp, synthetic construct
  misc_feature 1..297: note = Description of Artificial Sequence: Synthetic coding sequence
  source 1..297: mol_type = other DNA
atggcccagggcctggtgaccttcgccgacgtggccatcgacttctcgcaggaggagtgggcttgtctgaattctgctcagcgcgacctgtattgggacgtgatgcttgagaactatagcaatctggtttccctggatctcgaatccgcgtacgagaataaaagtctgcctaccgagaagaatattcacgagatcagagcctctaaacgaaactccgaccgacggagcaagtccttagggagaaattggatttgtgaaggtactctggagcggccacagaggtcccggggcagatag

SEQ ID NO: 212161 - DNA, 1392 bp, synthetic construct
  misc_feature 1..1392: note = Description of Artificial Sequence: Synthetic coding sequence
  source 1..1392: mol_type = other DNA
atggcccagggcctggtgaccttcgccgacgtggccatcgacttcagccaagaagaatgggcttgtctgaactcagcccagcgcgacctgtactgggatgtgatgctagaaaactacagcaacctcgtgtcccttgatttagagtcagcctacgagaacaagagtctgcccaccgagaagaatatccatgagataagggcatcaaagagaaattccgacagacgcagtaagtcccttgggagaaactggatctgcgaaggcaccttggagcgcccccagagatctcgcggacggtacgtcaaccaaatgatcataaattatgtgaagcggccagcgactcgagagggtaccccccctaggacgcaccagaggcaccataaagagaattcgttcgagtgtaaggattgtggaaaggccttctcaaggggttatcagctctcacagcaccaaaaaatacatacgggcgaaaagccgtatgaatgcaaagaatgcaagaaagcatttagatgggggaatcagctcacccagcaccagaagatccatacaggcgagaaaccctatgagtgtaaagactgtgggaaggcctttagatggggtagtagcttagttattcacaagcgtatccacacgggggaaaagccctacgaatgcaaggactgcgggaaggccttccgcagaggagacgagctcacacaacaccagcgttttcacaccggagagaaagactacgagtgtaaggactgcgggaagaccttctcgcgcgtgtataagttaattcagcacaagaggattcatagcggagaaaagccctatgagtgcaaggactgtggaaaagcgttcatctgcggttcatcactgatacagcacaagcgaatccacacaggagagaaaccgtatgaatgccaagaatgcggtaaggcctttacacgcgtgaactacctgacgcagcaccagaaaatacatactggtgaaaaacctcacgaatgtaaggaatgtggtaaggcatttcggtgggggtcttccttggtgaagcatgaacgcattcataccggcgaaaagccatataagtgcaccgagtgcggaaaagcatttaactgcgggtatcatctgactcaacatgagcgaattcacacaggagagactccttataagtgtaaagagtgcggcaaggccttcatctacggttcgagcttggtcaagcatgagcgaattcacactggggtaaaaccctacggatgtacggaatgtggcaagtccttttcccatgggcaccagctcacacaacaccagaagacacatagtggtgctaagagctatgaatgtaaagagtgcgggaaggcttgtaatcatctgaatcaccttcgggagcaccaacggatccacaactcatag

SEQ ID NO: 212162 - DNA, 504 bp, synthetic construct
  misc_feature 1..504: note = Description of Artificial Sequence: Synthetic coding sequence
  source 1..504: mol_type = other DNA
atggcccagggcctggtgaccttcgccgacgtggccatcgacttctcccaagaggaatgggcctgcctgaactcagcccagcgagatctgtactgggatgtcatgcttgaaaactatagcaatttagtgtctttagacctggaatcagcatatgagaacaaatcactgccaaccgagaaaaacatccatgagatccgggcatctaaacggaactctgaccgcagaagcaaatcgctcggtcgcaactggatttgcgagggaacattagaacgcccccaacggagccgcgggcgatatgtgaaccagatgataataaattacgtgaagaggccggctacgcgcgaagggacccctcctagaactcaccagcggcatcataaggaaaattcctttgaatgtaaggattgtgggaaggccttcagcagaggctaccagctgtcacagcatcagaaaatccacactggtgaaaaaccttatgagtgtaaggaatgtaagaaagcgtag

SEQ ID NO: 212163 - DNA, 303 bp, synthetic construct
  misc_feature 1..303: note = Description of Artificial Sequence: Synthetic coding sequence
  source 1..303: mol_type = other DNA
atggcccagggcctggtgaccttcgccgacgtggccatcgacttcagccaggaggaatgggcttgcttgaattcggcacaacgcgacctgtattgggatgtcatgctggaaaattacagcaacctggtatcactggacctggagagtgcctacgagaataaaagcctacccactgaaaagaatattcatgagatccgggcttcgaaacgcaactctgaccggcgaagcaagagtttgggcagaaattggatttgcgagggtactttagaaagacctcagcggagcagaggacgatacgtgtag

SEQ ID NO: 212164 - DNA, 1998 bp, synthetic construct
  misc_feature 1..1998: note = Description of Artificial Sequence: Synthetic coding sequence
  source 1..1998: mol_type = other DNA
atggagagcgtgaccttcgaggacgtggccgtggagttcatccaggagtgggccctgctggactcagcccggcgcagtttatgcaagtatagaatgttagaccagtgtcgcacgctcgccagcagaggtactcccccttgcaaaccttcttgtgtttcccagctcggacagagagctgagcccaaagcgacagagcgagggatacttagggcaaccggggttgcatgggagagtcagttaaaaccagaggaacttccttccatgcaagacctgctggaggaagcctcttcacgcgacatgcagatgggaccaggtctgtttctacgaatgcagctcgtgccttctatcgaggaacgcgagacgcccctaacacgcgaagatcggccagcacttcaagagccaccatggagtcttggctgcactgggttgaaggctgcaatgcagattcagagagtggtcatcccagtaccaacccttggccacaggaatccctgggtagctagagacagcgccgtgcccgcacgagacccggcttggctacaggaagacaaagtagaggaggaagctatggctccaggcctaccaaccgcttgcagccaggaaccagtaacatttgccgatgtagcagtggtgttcactcctgaggagtgggttttcttagatagcacgcagagatcactgtacagagatgtgatgctcgagaattacaggaatctggcctcagtggcggaccagctctgcaaacccaatgcactgagctacctagaagagcggggagaacagtggaccaccgatcgcggcgtccttagcgatacctgtgcggaaccccagtgtcagcctcaagaagccatcccaagtcaagataccttcacggagattctgtctatcgacgtgaagggcgaacagcctcagcccggcgagaagttgtacaagtacaatgagttggagaagccgttcaatagcattgagcctctgtttcagtaccaacgcatccatgccggtgaggcaagttgcgaatgtcaagaaattagaaactcttttttccagagcgcccacttaattgtccctgaaaaaatcaggagtggcgacaagtcatacgcgtgtaataagtgcgaaaagagctttaggtattcctccgatttgattagacacgagaagacccacaccgctgaaaagtgctttgactgccaggaatgcggccaggccttcaaatattccagcaacctgcgtcggcatatgcgtacccataccggcgagaaacccttcgagtgttcccagtgcggtaaaacattcactaggaattttaacctgattctgcaccagagaaatcacacaggagagaaaccctatgagtgtaaggactgcggcaaagcatttaatcaacctagcagcctccgctcacatgtgcggactcatacaggcgagaagcctttcgaatgctcacaatgtggtaaggcgttcagagagcactcaagccttaaaacacacctgagaacccacacgcgagaaaagccttacgagtgtaaccaatgtggcaaaccattccggacaagcacacatctgaatgtccacaaacgcatccacaccggcgaaaaactctatgaatgcgccacctgcggccaagtactgagccgtctcagcaccctgaaaagtcacatgaggacacatactggcgagaaaccatatgtctgccaagagtgtggacgggccttttccgaaccatcaagcctccggaagcatgccagaactcattctgggaagaaaccgtacgcatgtcaagaatgcggccgcgccttcggacagagcagccacctgatcgtccacgtcaggactcactcggccggccgaccttatcagtgtaatcagtgcgagaaagccttcaggcattcttcatcccttacagtgcataagcgtacgcacgtggggagggagaccattcggaatgggtcacttccgctgtcaatgagccacccatactgtggtcctctggcaaactag

SEQ ID NO: 212165 - DNA, 549 bp, synthetic construct
  misc_feature 1..549: note = Description of Artificial Sequence: Synthetic coding sequence
  source 1..549: mol_type = other DNA
atggagagcgtgaccttcgaggacgtggccgtggagttcatccaggagtgggccctgctcgacagtgccaggaggtcactatgtaaatatcgcatgttagaccagtgccggacactggcctcccgcggaactcctccttgcaagcctagctgcgtatcccaactggggcagagagccgagccgaaagctaccgagagaggtatcctcagagctacgggagtcgcctgggagtcccaactcaagcccgaggagctgccctccatgcaagatcttctagaagaggcatcaagccgtgatatgcaaatgggacccggcttgttcttgagaatgcagctggtgcctagcatcgaagagcgagagactcccttgacacgggaagataggccagctttacaggagccgccatggagtctgggatgcacattgccactcctgtccctgctcctgccatcatgccccgagccaccacttgtgctcctggactccagcagcgcaccagataggcatttggggagcactctggatactgaggctagaggcataccttag

SEQ ID NO: 212166 - DNA, 1671 bp, synthetic construct
  misc_feature 1..1671: note = Description of Artificial Sequence: Synthetic coding sequence
  source 1..1671: mol_type = other DNA
atgcagctggtgcccagcatcgaggagcgggagacccccctgacccgagaagatcgacccgctctgcaggaaccgccttggagtctgggatgcactggtctgaaggctgccatgcagattcagcgcgtggtgatccccgtccctactttggggcatcggaatccctgggtcgcacgtgactccgcagtgcccgcccgcgacccagcctggttgcaagaggacaaagtggaggaagaagctatggcacctggactgcctacagcttgtagccaggagccggtaaccttcgccgacgtggccgtggtgttcacgccagaagaatgggtctttctggacagcactcaacgtagtctctaccgagacgtgatgcttgaaaactataggaaccttgcttccgtggctgaccaactgtgtaagcctaatgcactatcatatctcgaggaaaggggggagcagtggacgacagaccgaggcgtcctgagcgatacttgtgccgaacctcagtgccagcctcaggaagcaatcccaagccaggatacattcacagaaatcctgagcatcgacgtcaaaggagaacagccacagcccggcgagaaactttacaagtataacgaactcgaaaaaccctttaactcaatagagccactcttccagtatcagcgaattcacgccggggaggcttcctgtgaatgtcaggagataaggaacagtttcttccaaagtgcccacctgatcgtgccagaaaaaatcaggtcaggggataagtcatacgcctgcaataagtgcgagaagtctttccggtacagctcagacctgatccggcatgaaaagactcatactgctgagaaatgcttcgattgtcaagagtgtgggcaggcctttaagtacagttccaatttaagaagacacatgaggacacatacaggcgagaagcctttcgagtgcagccagtgcggcaagacctttacaagaaacttcaatctgatacttcaccaacggaaccacactggggagaagccttacgagtgtaaagactgtggaaaggctttcaatcagccttccagccttcgatcccacgtcagaacacacactggagaaaagccattcgagtgttcccagtgtggtaaagccttcagagagcattccagtctgaaaacacacctgcggacccacacccgagagaagccttatgaatgcaatcagtgcggcaagccttttagaactagtacccacttgaacgtgcacaagaggatccacaccggcgagaaactgtacgagtgtgccacctgtggtcaggtactaagcagactgagcactctgaagagtcacatgagaactcatacgggcgagaagccttatgtgtgtcaggagtgcggcagagctttctcagagccttcgagtcttagaaaacatgcccggacccacagcggcaagaagccttatgcctgtcaggagtgcggtagggcttttggccagtcttcgcatctgatagtccacgtcagaactcattctgccgggaggccctatcagtgtaatcaatgtgagaaggccttcaggcattcttcttccttgacggtccataagaggacgcacgtcgggcgagaaaccatccgcaatggctccttgcctttaagcatgtcccatccatattgtgggccgttggcgaactag

SEQ ID NO: 212167 - DNA, 912 bp, synthetic construct
  misc_feature 1..912: note = Description of Artificial Sequence: Synthetic coding sequence
  source 1..912: mol_type = other DNA
atggagagcgtgaccttcgaggacgtggccgtggagttcatccaggagtgggcattgttggactcggcccgtcgtagcctgtgcaagtacaggatgttggaccaatgccggaccttggcttcacgcgggacaccgccttgcaaaccgtcttgtgtgtctcagctcggccagcgcgccgaaccaaaagcaacggagagaggcatactgagggccaccggggttgcttgggagtcccaacttaaacccgaggagctaccctccatgcaggaccttctcgaagaagctagctccagggacatgcagatgggaccaggactattcttaagaatgcagcttgtgcctagcatcgaggagcgggaaacccccctgactagagaggaccgtccagccctgcaggaacccccttggtctttagggtgcactgggctgaaagcagccatgcaaatccaaagggtcgtcatccctgtgcctacgctcggccaccgcaatccctgggttgcgagagacagcgctgttccagcccgtgaccccgcctggcttcaggaagataaggtcgaagaggaggccatggcccctggcctcccgacagcatgttcacaggagccggtgactttcgctgacgtggccgtggtgtttactccggaagaatgggtgtttctggatagtactcagagatcactctacagggacgtgatgctcgagaactatcgtaatttggccagtgtagccgatcagctttgtaagccaaatgctctcagctacttggaagagcgtggagaacagtggacaacggatcgaggtgtgctttccgacacttgcgccgaacctcaatgccagccccaggaggcaatcccttcccaggatacgttcactgaaatcctcagcattgacgtcaagggccctccaaattag

SEQ ID NO: 212168 - DNA, 3360 bp, synthetic construct
  misc_feature 1..3360: note = Description of Artificial Sequence: Synthetic coding sequence
  source 1..3360: mol_type = other DNA
gccgccgaggagcggggctggcggccccggcggtgccggagccagagagggacatggttacgtaagcctcggtctgaagtaccaaggccctacgcccccctctccggaagccccccaattcggtggagaaggactcggtggagggccgctgccactaggcccttggggctcgccggcccacgctcgccgctgagagcagcatgggtatgggcccctagccgggtccgccggcagcagagaaggcgggggcggcccggcgcgggcagaggcatcgacgatttggaggaagatagtgactataaccccgcagaagacgaaccaagggggcgccaactgaggttacagcgccccacaccaagcaccccgcgtccgaggaggagacctggcaggccgcgcaaactgccccgcctcgagatcagtgatcttcccgacggggtggagggggaacccctggtttccagccagtctggccagtcacccccagaacctcaggaccccgaagctccatcaagtagtggtcctgggcacctcgtggccatggggaaagtgtcccggacccctgtcgaagctggtgttagccagagcgacgcagagaacgcagctcctagttgccccgacgaacacgacacactgcctaggcggcggggaaggccatcccgcaggtttctcggcaagaaatatcgtaaatactattacaagtcacctaagcctctgttaagaccatttctttgtcgtatttgtgggtcccggttcctctctcatgaggatcttcggttccatgtcaatagccacgaggctggagacccacaactctttaagtgtctccaatgttcctatcgcagtcggagatggagctccctcaaggaacatatgtttaaccatgtggggtctaagccctacaagtgcgacgaatgctcctataccagcgtctatcgcaaggacgtgatccgtcacgcggcagtccattctagagacaggaagaagaggccagaccccactccaaaactttcgtccttcccgtgccctgtatgcggtagggtatatcccatgcagaagcgcctgacgcagcatatgaagacacattccacagagaagccacacatgtgcgataagtgtggcaagagtttcaagaaacggtatacatttaaaatgcacctgctaactcacatacaagcagttgccaaccgtaggtttaagtgtgagttctgcgagttcgtctgcgaagacaaaaaagccttgttgaatcaccagttaagccacgtctctgacaaaccattcaaatgttcgttctgtccctataggacgttcagagaagatttcttgctgagccacgtggccgttaagcacaccggcgccaagcctttcgcctgcgagtactgtcacttttctacccgccacaaaaagaacctacggttgcatgtgagatgtcgtcacgcttcctcttttgaagagtggggcagaagacatcccgaggagcctccgtcacgccggcgtcctttcttttctcttcagcaaatcgaagaactcaaacagcagcacagcgccgcccctgggcccccacccagctcaccgggcccacccgagatcccccctgaggcaacaactttccagtcctctgaggcaccatcgcttctgtgttcagataccctaggaggagcaactatcatctatcagcaaggggcagaagaatcaactgccatggccactcagaccgccctggatctcctccttaacatgtctgcccagcgtgagctcggcggtacagctctgcaggtggccgtcgttaaaagcgaggacgtggaagcagggttagcttcacccgggggacagccaagtcctgaaggtgccaccccacaggtggtgacactccacgtcgcagaacccggaggtggagccgccgctgagagccaacttggaccccccgacctgccacaaattaccctggcgcctggacccttcggtggcacagggtatagcgtgatcaccgcgccaccaatggaggagggcacatcagcaccgggcactccctacagcgaggagcctgcgggagaggccgcccaggccgttgtggtctccgacacactgaaagaggcaggcacccattatataatggccacagacggaacccagcttcaccacatcgaacttaccgccgacgggtctatctcatttccttctcccgatgctctcgcctccggcgctaaatggcccctgttacaatgcggaggtctcccgcgagacggtcccgagcctccttcccctgctaagacacactgcgtaggcgatagccagtcctctgcatcttcgcctccggcgacaagcaaagctctgggcttggctgttccacctagcccacccagcgccgctacggccgcctcgaagaagttcagttgtaaaatctgtgccgaggccttccccgggcgagcagagatggagagtcataaaagagctcatgcaggccccggtgcctttaaatgccctgactgtcctttttccgctaggcagtggcccgaagtacgggcgcacatggctcagcactccagtctgaggcctcaccaatgttcacagtgctcctttgcctcgaagaataaaaaggacctgagaaggcacatgctgacccacacaaaggaaaagccgtttgcttgtcatctgtgcggccaaaggttcaatcggaatggccacctcaaattccatatccagaggctgcacagccctgatggccgaaagtcaggcactcccaccgcccgggctcctacgcagacacccacgcagacgataattctgaacagcgatgacgagaccctggcaaccttgcacactgccttacagtcctctcacggtgtactcggccctgaaagattacagcaggccctgtcacaggaacacattatcgtagcccaggaacagacagtgacaaaccaggaagaggcggcttatatacaggaaatcacgaccgccgacggacagaccgtccagcatctagtgacgtcagacaaccaggtgcagtacattattagtcaggacggggtccagcatctgctgccccaagaatatgtggtcgtccccgagggacaccatattcaagtccaggaggggcagatcacccacatccagtatgagcagggagcacccttcctacaggaatctcagattcagtacgtaccagtgagtccgggccagcagttagtcacacaggctcagctggaggctgccgctcactcagcagtcaccgccgtggcagatgccgccatggcccaggcccagggactattcggtacagacgagactgttcccgagcacattcaacagttacagcaccagggaatcgaatacgacgttatcacactggcagacgactag

SEQ ID NO: 212169 - DNA, 4029 bp, synthetic construct
  misc_feature 1..4029: note = Description of Artificial Sequence: Synthetic coding sequence
  source 1..4029: mol_type = other DNA
atggaggagaacgaggtggagagcagcagcgacgccgcccccggcccgggccggccggaggagccatcagagagtggattgggggtgggtacaagcgaggccgtgtcagccgacagctcagatgccgccgctgcccccgggcaggcagaagccgacgatagcggcgtggggcagagctccgacaggggcagccgatcgcaggaagaagtgtcagagtcttcctcctcggccgacccactaccaaactcctaccttccagacagttccagcgtgtcacatgggcccgtcgcaggcgtcactggggggcccccagccctcgtccacagcagcgcacttccagaccctaacatgctggtttctgattgtaccgcgagttcatcagacttaggctccgccatcgacaagatcattgagagtaccattggacccgacctgatccagaactgcatcaccgtgacctcggctgaggatggcggtgcggagaccacccggtacctaattctgcaggggcccgacgatggcgcgcccatgacaagtcccatgtcatcttccaccctggcccacagtctagcggccatcgaagccctcgccgacggccctacttccacatccacttgcctggaagcccagggaggcccaagttccccagtgcaacttccaccagcctctggcgccgaagagccagaccttcagtctcttgaagccatgatggaggtggtggtcgtacagcagttcaaatgcaaaatgtgccagtacagaagcagtactaaagcaacactcttgcggcatatgcgggaaagacactttcgccccgtcgccgccgcagccgccgcggccggtaagaaaggcaggctccggaagtggtctacctctacaaagtcccaggaggaggagggaccagaggaggaggacgatgatgacattgtcgacgccggagccatcgatgatctggaggaggactcagattacaacccagcagaggatgagcccaggggccggcagcttagactgcagaggcccacgcccagcactccacggccacgacgcagacccggccggcctcggaagctgccacggctcgagatatcagatcttcccgatggggtagagggcgaacccctggtcagctcccagtcagggcagagcccgccagaacctcaggacccagaagctccctcctcctcaggccctggccatctggtggctatgggaaaagtcagccggacccctgtagaggccggcgtttcacagagtgacgcggagaatgcagcgccatcatgtcctgacgagcatgatacccttccacgccggagaggcagaccctctcgacgctttttggggaagaagtaccgtaagtattattataagagtcccaagcctttactgaggccattcctgtgtcggatctgtggttcaaggttcctgtcacatgaggaccttcggttccacgtaaactcacacgaggctggggatcctcagctgttcaagtgcctccagtgcagttaccggtcccgtcgctggagctctctcaaagagcacatgttcaatcacgttggaagcaagccatacaaatgcgacgagtgctcttacacctctgtctacaggaaggacgtcattcgtcacgccgccgtccattcacgtgaccggaaaaagcgcccagaccctactcccaaactgagctcgttcccatgcccagtgtgcgggcgtgtgtaccccatgcaaaagaggctgacgcagcatatgaaaacacattcaaccgaaaagcctcatatgtgcgacaaatgcggtaaatcttttaagaagcggtacacatttaagatgcatctgctgacccacatccaggccgtggcgaacaggagatttaagtgcgagttttgcgagtttgtctgcgaggacaaaaaggctctgttaaatcaccagctaagtcacgtttcagataagccctttaagtgcagcttttgtccctatcgcacgttcagagaagactttctcctcagtcacgtagccgttaagcataccggggcaaaaccttttgcgtgcgagtactgccacttctctactcggcacaaaaagaatctgaggctgcatgtccggtgcaggcacgccagttcattcgaagagtggggccgccgacacccggaagaaccgccaagcaggcgccggcccttcttttccctccagcagatcgaggagctgaagcaacagcacagtgccgcccccggaccaccgccatctagcccaggaccgcccgaaattccgcccgaggccaccacattccagagcagcgaagctccttccctcttgtgtagcgacacactaggcggggctaccatcatttaccaacaaggggcagaagaatccaccgccatggcgacccagaccgccctggatctgttgcttaacatgtccgcccaacgagagctgggcggaactgctcttcaagtcgctgtagttaaatctgaagatgtcgaggctggattggccagtcctggcgggcagcctagccccgaaggagccaccccacaggtggtcacccttcatgtagctgagcccggcgggggagctgccgcagaatcccaactaggaccgccagatctgcctcagatcactctggcacccggacccttcggcgggactggctattccgtcatcaccgcgccccctatggaagagggaacgtccgcccccggcaccccgtactcggaggaacccgccggagaagccgctcaagcagtggtcgtctccgacactcttaaggaggccggtacacactacattatggcaacagacggcacccagttacaccatatcgagcttaccgcggacgggtccatctcttttccaagccctgacgcattagcatccggggcaaagtggccactgctgcaatgcggcggcttgccaagagatggccctgagccacccagtcccgctaagacccactgcgttggggattcacagtctagcgcgtcatccccccccgccacctctaaggctttaggacttgcggtgccgccctctcctcctagtgctgcaaccgccgcttcaaagaagttttcctgcaagatctgtgccgaggccttccccggacgagctgagatggagtcacataagcgagcccatgccggccctggggctttcaaatgccctgattgtccattctccgcccggcagtggcccgaagtccgagctcacatggcccagcacagcagtctgaggccccaccagtgttcacagtgttcttttgcctctaagaataagaaggacctgcgaagacatatgctgacccataccaaggagaaacctttcgcctgtcatctttgcggccagaggttcaatagaaatggccatctgaagtttcatattcagagactgcactccccggatgggcgcaaatccggaacaccgactgccagggctcccacccagacacccacgcagactatcatcctcaactccgatgatgaaacccttgcaactctgcacaccgccctacagagcagtcacggcgtgctggggcctgagcgtttacagcaggccctttcccaagagcacatcatagtggcacaggaacaaaccgttactaaccaggaggaagcagcatacatccaggagataaccactgcagacggccagaccgtacagcacctggtgacgtccgacaaccaggtgcagtatataataagtcaggatggggtgcaacatctgctgccccaggaatatgtcgtcgtgccagagggtcatcacattcaggtgcaggagggccaaataacacatattcagtacgaacagggagcgccctttcttcaggagtctcagattcagtacgtgccagtgagcccaggccagcaactggtgactcaggcccagctggaggccgccgctcattctgccgtaaccgcggtggccgatgcagcgatggcacaggcgcagggcctgtttggcactgacgaaacagtgccagagcatatccaacagctgcaacatcaaggaattgaatatgacgttatcaccctggctgacgactag

SEQ ID NO: 212170 - DNA, 3564 bp, synthetic construct
  misc_feature 1..3564: note = Description of Artificial Sequence: Synthetic coding sequence
  source 1..3564: mol_type = other DNA
atggccaccagcagcatgcccgagagcgagcggaacgtggccaccaaggctagtggtgcgcccatgactagtcctatgtctagtagcactttagctcacagcctggcagccattgaggctctggccgatgggcccactagtacatctacatgcctagaagcgcagggaggtcccagtagtcccgtccaactgccgcctgcctctggggcagaggagcccgatctacagtccctcgaggctatgatggaggttgtggtcgtccagcagttcaaatgtaaaatgtgccagtataggtcaagcaccaaagctacgctgttgagacatatgcgggagcggcactttcggccggtggccgcagccgctgctgccgccggaaaaaaaggtcgtctgcgaaaatggtccacctccacaaagtcccaggaggaagaaggtcctgaggaggaggacgatgatgacatcgtggatgcaggtgccattgacgaccttgaggaagatagcgattacaatccagcagaggatgagccccgagggcggcagctgaggttacaacgtccaacaccctcaactcctcgtccccggcgccggcccggccggcctcggaaattgcctaggctggagatttccgatctgccagacggagtcgaaggagagcctttggtctcctcacagagtggccaatcccctccagagccccaggatccagaagcaccttcttccagtggaccaggccatctggttgcaatgggaaaggtcagcaggaccccggtcgaggcaggcgtgtcgcaatctgatgcagaaaatgccgctccatcatgtcctgatgagcacgatactctgcccagaagacggggtcggccgagccggcggttcctgggaaaaaagtatagaaagtattattacaaaagcccgaagccgcttctgagaccttttctgtgccgcatttgcggcagccgcttcctgtcccacgaagacctaaggtttcacgtgaatagccacgaagctggagatcctcagctgtttaaatgtctgcagtgctcttaccgctcacgccggtggtccagcctaaaggagcacatgtttaatcacgtagggtcgaaaccctacaaatgcgacgagtgctcttatacttccgtctaccggaaagatgtgatcaggcacgctgccgttcacagtcgcgatcgtaaaaagcgtcccgatcctacacctaagctgtcctcatttccttgccccgtctgcggcagagtgtaccccatgcagaagagactgacgcagcatatgaaaacccattccacagagaaacctcacatgtgcgacaaatgcggtaaatcctttaagaagcggtataccttcaaaatgcacctgctcactcatattcaagcagtggccaacaggagattcaaatgtgaattttgcgagtttgtatgcgaggacaaaaaggccctgctgaatcatcaactgtcacacgtatctgataaaccattcaagtgttccttctgtccttatcggaccttcagggaagatttcctcctgagccacgttgccgtcaaacacacgggagctaaaccctttgcctgtgaatattgccatttcagcacacggcataagaagaatctgcgcctgcatgtgcgctgcaggcacgcctcctcctttgaagaatggggtaggcggcaccccgaggagcccccatcacggcgtcgcccattcttcagtctgcagcagatcgaggaactgaaacagcagcacagcgccgctcccggcccaccacctagttcgccaggtccgcctgagattcccccggaggccaccaccttccagagcagcgaggcgccctccttactctgttcagatacactgggcggcgcaactattatatatcagcagggtgccgaagaatccacggccatggccactcagacggcactggatttattgctgaatatgtcagcccagcgtgaactgggcggcaccgccctccaagttgcagtcgtgaagtccgaggacgtggaagcaggcctggcttcaccgggagggcagccaagtccagagggcgcaacaccacaggtggtcactctgcacgttgccgagccgggtgggggcgctgccgcagagtctcaactgggaccgcccgatctgcctcagatcaccctggccccgggcccttttggtggaacaggttattccgtgattaccgcaccaccaatggaagaagggacctcagccccaggtacaccttacagcgaagagcctgccggtgaagctgcccaagcagtggtcgtgtccgacacccttaaggaagccggcactcactacatcatggctacagatggcacacagctccatcacatcgaactcaccgccgatgggtctatcagctttccctccccagacgctttagcttcgggtgcaaaatggcctcttctgcagtgcggcgggctccccagagatgggccagagccgccttcgccagccaagactcactgcgtcggagattcgcagtcttctgcttcttccccaccagctactagcaaagccttggggcttgccgttccaccctcacccccttccgctgctacggcagcttccaaaaaattttcatgcaaaatctgcgccgaggcatttcccgggcgcgcggaaatggaaagccataagagggcacacgctggtcctggggcttttaaatgtcctgactgcccctttagtgcccggcagtggccggaggtccgggcccacatggcgcagcattcctctctgcgcccccatcagtgctcacagtgctctttcgcaagcaagaacaaaaaagacctgcgaagacacatgctgactcataccaaggaaaaaccctttgcctgccacctttgtggccagcggtttaaccgtaacggccacctcaaattccatattcagaggctgcacagccccgacgggcgtaagtcagggacaccaaccgctcgcgcaccaactcagacgcccacccagactatcatccttaattccgacgatgaaaccctggccaccctgcataccgccctgcagagcagtcacggtgtattgggccctgagaggctccaacaggcgctgagccaagagcatattatagtggcacaggaacagacggttacgaaccaagaggaagcagcatatatccaggagatcaccacggctgacggtcagactgttcaacatctggtgacttctgacaaccaggtgcagtatattatcagtcaggatggggtacagcatttgctgccccaggaatacgtggtagtaccagagggacaccacattcaagttcaggagggccagattacccacatccagtatgagcaaggagctcctttcctgcaggagtctcagatacaatacgttcctgtttctccgggccagcagttggtgactcaggcccagctggaagctgccgcccatagcgctgtcacagctgttgccgatgcggccatggcgcaagctcaggggcttttcggcacagacgagacagtgcctgagcacattcaacagcttcagcaccaaggcattgaatacgacgtcattactctggctgatgactag

SEQ ID NO: 212171 - DNA, 330 bp, synthetic construct
  misc_feature 1..330: note = Description of Artificial Sequence: Synthetic coding sequence
  source 1..330: mol_type = other DNA
atgctggagaactacagcaacctggtgagcgtgggctactgcgtgcacaagccggaagtcatctttagactgcagcagggagaggaaccttggaaacaggaggaagagtttccgtcacaatccttcccggagatgggttttcatcatgtgcccgctggtctcaagttgctttccagctctgatccccccgccctagcttctcagtcaggccgtatcacagggatgtctcactcgattcctcccgtgatgggttcattcaaattcacaaccagcatatttacatgtgtggggctgttcagatttttctttttttatttgtcttggttctag

SEQ ID NO: 212172 - DNA, 417 bp, synthetic construct
  misc_feature 1..417: note = Description of Artificial Sequence: Synthetic coding sequence
  source 1..417: mol_type = other DNA
atgaacaaggtggagcagaagagccaggagagcgtgagcttcaaggatgtgacagtggggttcactcaggaagaatggcagcatctcgatcccagccagcgcgcactgtatcgcgatgtgatgctggagaactattctaatcttgtctccgtcgggtattgtgtgcacaagccagaagtgatctttcgcctccagcaaggagaagaaccatggaaacaagaagaggagttcccctcacagagctttccggaagtctggaccgccgatcacttaaaggaaaggtcccaagaaaatcaaagtaaacatctgtgggaagtcgtgtttatcaacaacgaaatgcttaccaaggagcaaggagacgtaattgggattccatttaacgtcgatgccccagaaatgctgatgccactagactag

SEQ ID NO: 212173 - DNA, 2433 bp, synthetic construct
  misc_feature 1..2433: note = Description of Artificial Sequence: Synthetic coding sequence
  source 1..2433: mol_type = other DNA
atgaacaaggtggagcagaagagccaggagagcgtgagcttcaaggatgtgaccgttggctttactcaggaagagtggcagcacctggaccctagtcagcgggctctttaccgggatgtgatgctcgagaattattcgaacctcgtttctgtggggtactgcgtccacaagcctgaagtcatattccgtctgcagcagggtgaggagccatggaagcaagaagaggaatttcctagtcagagctttccggtctggacagccgaccacttaaaagagcggtcacaggaaaaccagtccaaacatctttgggaggttgtctttatcaacaatgaaatgctcactaaagagcaaggtgatgtaatcggtatccctttcaatgttgacgtgtcctcatttccatctagaaagatgttctgtcagtgtgacagctgcggtatgagcttcaataccgtaagcgagcttgtgatttcaaaaatcaactacctgggaaaaaagagcgacgagttcaacgcgtgtgggaaactgttactgaacattaagcacgatgaaacccatactcaggaaaaaaacgaagtccttaaaaatagaaacacgctatctcatcacgaagagaccctccagcacgagaaaattcagacactggaacataactttgagtattccatttgtcaggaaaccctgctggaaaaagcggtatttaatacccagaaacgggagaatgccgaggagaacaactgcgattataatgaatttggccggacattatgcgattcctccagtttactgttccatcagatcagtccgtcaagggacaaccattacgaattcagcgactgcgaaaagttcctctgcgttaaatctacattatccaagccgcatggggtgagcatgaagcactatgattgtggggaatccggcaacaattttcgcagaaagttatgtctatcccatctgcagaagggcgacaaaggggaaaagcactttgaatgcaacgaatgcggcaaggcattctgggagaaatctcatctaaccagacatcagcgcgttcataccggacagaagcccttccagtgcaatgaatgcgaaaaggccttttgggataaaagcaacctgactaaacatcagaggtcccacactggcgagaagcccttcgaatgtaatgagtgcggaaaagcgttctctcataaaagcgctctcacactgcaccaacgtacccacacgggagagaagccttaccagtgtaatgcttgcggaaaaactttctgtcagaagagtgatctcacaaagcaccagcgaactcacactggcctgaaaccctacgaatgctacgaatgcggtaaatcctttcgcgtgacctcacatttaaaggttcatcagagaacccatactggcgagaaacccttcgagtgtctggaatgcggaaaatctttttctgaaaaaagtaatcttacccagcaccaaagaattcacattggggacaaatcgtacgagtgcaatgcctgcgggaagaccttctatcataaatctttgctgacgcgacatcaaatcatacacaccggttggaaaccctatgagtgctatgagtgtggaaaaaccttttgtctcaagagcgatcttaccgttcaccagagaactcatactgggcagaaaccattcgcctgtccagaatgcggaaagttcttctcccataaatcgactctgtctcagcactaccgaacgcatacaggagaaaagccatacgagtgccatgaatgcggaaagatcttttataataaatcctatctgactaaacacaatcggactcataccggggagaagccgtacgaatgcaatgaatgtggtaaagcattttatcagaagagccagctcacccagcaccaaaggatccacataggggaaaaaccctacaaatgtaatgaatgtggaaaggccttctgtcataaatctgccttaattgtgcaccagcggacccatacccaggaaaaaccatacaagtgcaatgagtgcgggaagtccttctgtgtgaaaagcggacttatattccatgaaagaaagcacaccggcgagaagccttacgagtgcaatgagtgcggtaaattcttccgtcacaaatccagcctgaccgtgcatcacagagcacacaccggcgaaaaaagctgccagtgtaacgagtgcggcaaaattttctatcggaaatccgagctggctcaacatcagagatctcacacaggcgagaaaccttacgagtgcaatacatgccggaaaaccttctcccagaaatccaacctgatagttcatcagcgtcgacacatcggtgaaaatctgatgaacgaaatggacataagaaacttccagccccaggtaagtttgcacaacgcttctgaatactctcattgcggcgagtcacccgacgacattcttaatgttcagtag

SEQ ID NO: 212174 - DNA, 2436 bp, synthetic construct
  misc_feature 1..2436: note = Description of Artificial Sequence: Synthetic coding sequence
  source 1..2436: mol_type = other DNA
atgaacaaggtggagcagaagagccaggagagcgtgagcttcaaggacgtgacagtgggctttacccaggaggaatggcagcacctcgacccttctcaaagggctctgtatagagacgtgatgctggagaactactcaaatctagtgtccgtgggctattgtgtgcacaaacctgaggtcatatttagactgcagcagggagaggaaccatggaagcaagaggaggagttccccagccagagttttcccgaggtgtggactgccgatcaccttaaagagcggtcccaagaaaaccaaagcaaacatctatgggaggtggtgtttataaataatgaaatgctcacaaaggaacagggtgatgtcatcggtatcccatttaacgtggatgttagctcatttccatcacgtaagatgttctgccagtgcgatagttgcgggatgtcattcaatacggtctctgagctggttatttcaaagattaactacttaggcaaaaaaagtgatgaattcaacgcgtgcggcaaattgttactgaatatcaagcacgacgagacacacactcaggaaaagaatgaagtattgaagaacaggaacactctgtcacaccatgaggaaaccctgcagcacgagaagatacaaaccctagagcataactttgagtactccatctgccaggaaacattgctcgagaaagccgtgttcaatacccagaagcgagagaacgcggaggaaaacaactgcgactacaacgagttcgggcgtaccctgtgcgactcctctagtctcctatttcatcagatcagcccctcacgtgacaatcactatgagttttccgactgcgagaaattcctttgtgtcaaatcaacacttagtaaacctcatggagtctccatgaagcactatgattgtggtgaaagcggtaataactttcgccgaaaactttgtttatcccatcttcagaaaggggataaaggggaaaaacattttgaatgtaatgagtgtggaaaagccttctgggagaaatcccatttaacaaggcatcagcgggtccacacaggacagaaaccctttcaatgcaacgaatgtgagaaagctttttgggataagtctaatctgactaaacaccaacgaagccacacaggggaaaagcccttcgagtgtaatgaatgcgggaaggcttttagccacaagagcgctttaactctgcatcaaaggacccatacgggggaaaagccttatcaatgtaatgcgtgcggcaaaaccttttgtcagaaatcagatcttactaaacaccagaggacccatacaggattaaaaccatatgagtgttatgagtgcggaaagagtttccgagtcactagtcatctgaaggttcaccagaggacccataccggagagaagccattcgagtgtcttgagtgtggtaagagtttttccgagaagtctaacctcacccaacaccaacggattcatataggtgacaagtcctacgaatgcaacgcctgtggcaagactttctaccataagtcactgcttaccagacatcagattattcacaccggctggaagccctatgagtgttatgaatgcggcaagactttctgtttgaagtccgacctgaccgtgcaccagcggacacacactggtcagaagccttttgcgtgccccgagtgtggaaagttcttttcccacaagtcaaccctgtcccagcattataggacccatacgggagagaaaccctatgaatgccatgaatgcggcaagattttctacaataaatcctatctaaccaaacataaccgcacccacacaggtgagaagccttatgaatgcaatgagtgtgggaaggcattctatcagaagtcccaattgactcagcatcagcgcattcacataggcgagaaaccttacaagtgcaacgagtgtggcaaggctttctgtcataaaagcgcattgattgtccatcaacgaacgcacacccaagagaagccatacaagtgcaacgagtgcggaaagtctttctgtgttaaaagcggcttgatcttccacgagcgcaaacacaccggagaaaaaccgtatgagtgtaatgagtgtggaaaattctttcgccataaaagctctctcaccgtacaccaccgtgctcatacaggcgagaagtcgtgtcagtgtaacgagtgcggaaaaattttctatcggaagtccgagctcgctcagcaccagcgatctcacaccggggagaagccttatgaatgcaacacgtgccggaaaaccttcagtcaaaagagcaatctgatcgtacatcagaggaggcacattggcgagaatctcatgaacgagatggatatcagaaattttcagccacaggtgagcctgcataatgcaagtgagtactcgcactgtggggagtctcctgatgacattttgaatgtccaatag

SEQ ID NO: 212175 - DNA, 2454 bp, synthetic construct
  misc_feature 1..2454: note = Description of Artificial Sequence: Synthetic coding sequence
  source 1..2454: mol_type = other DNA
atggccaacgccacccggcggggcagcggcgtggagcagaagagccaagagtctgtctctttcaaggacgtaactgtggggttcactcaggaagagtggcaacatctggatccatcgcagcgggcgctatatagggacgtgatgctcgagaactactccaatcttgtgagcgttggatattgtgtccacaagcccgaggtgatcttccgcttgcagcagggcgaggagccatggaaacaagaagaggagtttcctagtcagtccttcccggtttggacagccgaccacctgaaagaacgcagccaagaaaatcagtccaaacacctgtgggaagtggtatttatcaataatgaaatgctcacgaaggagcagggagacgttatcggtatacctttcaatgtcgatgtctcctctttcccaagccgcaagatgttctgtcagtgtgactcttgcggcatgtccttcaatacagtgtccgaactcgttatttcaaagatcaactatctgggcaagaagtctgacgaattcaacgcatgtgggaaactgcttctgaatattaagcacgatgaaactcacacccaggagaagaacgaggtacttaaaaatcgcaataccctgagtcatcacgaggaaaccttacagcatgaaaagattcaaacactcgaacacaatttcgaatacagcatctgccaggagacactgctggaaaaggccgtgttcaatacccaaaagcgtgaaaatgcagaggagaacaactgcgactacaacgagtttggcaggaccctgtgtgatagctcaagcttgctcttccaccaaatcagtccaagtcgagacaaccactatgaattctccgattgcgaaaagtttctgtgtgtgaagagcaccttatccaagccccacggcgtttctatgaagcactatgattgcggggagtcaggaaacaactttcggcggaaattatgtctgtctcacttgcagaaaggtgataaaggcgaaaagcactttgaatgtaacgaatgcggcaaagcgttttgggagaagtcgcacctgacccgacaccagcgggtccacaccggtcaaaaacccttccagtgcaatgaatgcgagaaagcgttctgggataaaagtaatctcacaaagcaccagcgcagccacactggggagaagcccttcgagtgtaacgaatgcggcaaagccttcagtcataaatccgctcttacgctgcaccaacgtacacacactggggagaagccctatcagtgtaacgcctgcgggaagacgttctgtcagaaatcggatctgacaaagcatcagcggacccataccggactgaagccctatgagtgttacgaatgcggcaagtcgttcagagtcacttcgcatctcaaggtacaccaacgcacacataccggagaaaaaccctttgagtgcctggaatgcggcaaaagcttctccgaaaagagcaacctgacccagcatcagagaatccacataggcgacaagtcctacgaatgcaacgcctgtggcaaaacattctaccacaagtccctgcttacacggcaccagattatacataccgggtggaagccctacgaatgctacgaatgtggtaagaccttttgcttaaagagtgacttgacagtccaccaacgaacccatactggtcagaagccattcgcttgcccggagtgcggtaaatttttcagccacaaaagcactctcagccagcactaccgaacacataccggcgagaaaccgtacgaatgccacgagtgcggcaaaatcttctataacaaatcttacttaaccaaacacaaccgcacacataccggagagaaaccctatgagtgtaatgaatgtggaaaggccttctatcagaaatcacaactgacccagcatcagcggatccatattggcgagaaaccttacaaatgcaacgagtgcggaaaggccttctgtcataaatccgccctcatcgtgcaccagcgcacacatacccaggagaagccgtataagtgtaacgagtgcggcaagagcttttgcgttaaatctggtcttattttccacgagcgcaaacacactggagaaaaaccatacgaatgtaatgagtgtgggaagtttttccggcacaaatccagcctgaccgtgcatcatagagcacacaccggtgaaaagtcctgccagtgtaacgaatgcggcaagattttctaccgtaagtccgagctcgcacagcatcaacggtctcacacaggcgagaagccgtacgagtgtaacacctgcagaaagactttctctcagaaatccaacctgattgttcatcaacgtagacacatcggggagaatttaatgaacgagatggacatcaggaactttcagccacaagtgagcttacacaatgcctctgagtattcgcactgtggcgaaagcccggacgacatactcaatgtccagtag

SEQ ID NO: 212176 - DNA, 2433 bp, synthetic construct
  misc_feature 1..2433: note = Description of Artificial Sequence: Synthetic coding sequence
  source 1..2433: mol_type = other DNA
atgaacaaggtggagcagaagagccaggagagcgtgagcttcaaggatgtaacagtcggttttacccaggaggaatggcagcatttagatcccagccagcgggccctgtatcgggacgttatgctcgaaaattattcaaacctggtcagcgttggatattgtgtgcacaaaccagaggtaatcttcagattgcagcagggcgaggaaccttggaagcaagaggaggaattcccatcacagtctttcccagtgtggacagcggaccatcttaaggagaggagccaagagaaccagtctaaacatctttgggaagtggtattcattaacaatgagatgctgaccaaggagcagggcgacgtgatcggcattcctttcaacgtggacgtcagcagcttcccttcccggaaaatgttctgccaatgcgactcatgcggcatgagcttcaatacagtcagcgagctggtcatcagcaagatcaattacctggggaaaaagagcgatgaatttaatgcctgcggcaagctgctgttgaacattaagcatgacgaaacccatacacaggaaaaaaacgaggtgctgaagaacaggaatacactcagccaccacgaggagacattacagcatgagaagatccagacattggagcataactttgaatactcaatctgccaagagactttactagaaaaggcagtatttaacactcagaaacgcgagaacgccgaagaaaataactgcgactataacgagtttggccgcaccttgtgcgacagttcatcactcctcttccaccaaatcagcccatctcgggacaaccattatgagtttagtgactgtgagaagttcctctgtgtgaaaagcaccctgagcaaacctcacggcgtgagtatgaaacactacgactgcggcgagtccggcaataattttcggaggaaactctgcctatcccatctgcagaagggagataaaggggaaaaacacttcgagtgcaatgaatgtggcaaggccttctgggagaaatcgcacctcactcgtcaccagcgggtgcacactggacagaagcccttccagtgtaatgaatgcgagaaggcattctgggacaagtccaatttaactaaacatcagaggagtcacactggcgagaagcctttcgaatgtaacgagtgtggcaaggcgttcagtcacaagagcgccctcactctgcatcaacgaacacacactggagagaaaccctaccagtgcaacgcatgtggcaaaaccttttgccagaaaagtgacctcaccaagcaccagagaacccacactgggttaaagccttacgaatgctacgagtgtgggaagtccttccgtgtcacaagccatcttaaggtccatcaacggactcatacaggggagaaaccgttcgagtgcctggagtgtgggaaaagtttttccgagaaaagcaacctgacacagcatcaaagaatacacatcggcgacaagtcatatgagtgcaacgcctgtggcaaaacattctatcacaagtctcttctgactcggcaccaaattatccacacaggctggaagccatacgagtgctacgagtgtggcaagaccttctgtctaaaatccgacctcactgtgcatcagaggacccataccggtcagaagcccttcgcatgccccgagtgcgggaagttcttttcccacaagagtacccttagccagcactataggacgcacaccggcgaaaagccatatgagtgccatgagtgcggaaagattttttacaataaatcctacctgactaaacacaatcgtacacatacaggcgaaaaaccgtacgagtgtaatgaatgcggaaaggccttctaccaaaagagccaactcacccaacaccaaaggattcacattggcgaaaaaccatacaagtgtaacgagtgcgggaaagccttttgtcataaatcagcactgatagtacatcagagaacccatacccaagagaagccatataagtgtaatgaatgcggcaagtcgttctgcgttaagtccggtctgatctttcacgaacgcaagcataccggggagaagccttatgagtgtaatgagtgcggtaagttcttccgccacaagagcagcctgactgtgcaccacagagctcacaccggagaaaaaagttgccagtgtaatgaatgtggaaagatcttctatcggaaaagtgagctggcacagcaccagcgctcccacacaggggagaagccctacgagtgcaacacttgtaggaagacctttagtcaaaagtccaatctgatagtccatcaacgtaggcacataggggaaaacctgatgaatgagatggacatccgaaatttccaacctcaggtttccctccacaatgcctcagaatactcccactgcggcgaaagccccgacgacatactcaatgtccagtag

SEQ ID NO: 212177 - DNA, 417 bp, synthetic construct
  misc_feature 1..417: note = Description of Artificial Sequence: Synthetic coding sequence
  source 1..417: mol_type = other DNA
atgaacaaggtggagcagaagagccaggagagcgtgagcttcaaggatgtgactgtggggttcacccaggaagaatggcagcacctagacccttctcagcgggcgctctacagggatgtgatgctggaaaattactccaacttggtaagcgtgggctactgcgtccacaaacccgaagtcatattccgcttgcagcagggagaagagccctggaagcaagaagaagaattcccctcccaatcgttccctgaggtatggacggccgatcatttaaaagagcgatctcaggagaaccaatccaaacatctgtgggaagtggtattcattaacaatgagatgttaacgaaagagcagggggatgtgataggtataccatttaatgtcgatgctcctgagatgttgatgcctctagattag

SEQ ID NO: 212178 - DNA, 2337 bp, synthetic construct
  misc_feature 1..2337: note = Description of Artificial Sequence: Synthetic coding sequence
  source 1..2337: mol_type = other DNA
atgaacaaggtggaccagaagttccagggcagcgtgagcttcaaggacgtaaccgtaggattcacccaagaagagtggcagcatctggacccgagccagcgcgccctctatcgcgacgtcatgttagagaattattcaaacttggtgtcagtcggatactgcgctcataagccggaagtcatcttccggctggagcagggcgaggagccgtggaggctcgaagaggaatttccctcacagagttttccagaggtctggacagccgaccacctgaaggagagaagtcaggagaaccagagcaaacacttatgggaagttgtgtttatcaacaacgagatgcttacaaaagagcagggcaatgtgattggaatccccttcaacatggacgttagctcgttcccatcgcgcaaaatgttctgccaatatgattcgagaggtatgtcttttaacactgtgtctgaactggtgatttcaaagatcaactatttaggcaaaaaatccgacgaatttaatgcgtgcggcaagctgcttctgaatattaagcacgacgaaacccatacaagggagaaaaatgaagtgctaaaaaatcggaatacactatcacatagagaaaatactctgcagcatgagaagattcaaactctagaccacaactttgagtacagcatttgtcaagaaacactccttgaaaaggccgtgtttaatacgcggaaacgggagaatgcggaagagaataattgcgattataacgagtttggacggacattttgtgattcgtcatccctgcttttccatcaaatccccccctctaaggactcacattacgaattcagcgattgcgagaaattcctttgcgtgaaaagcactcttagtaagcatgacggggttcctgtcaagcactacgactgtggagagagtgggaataatttccgtcgcaaactgtgtctctcacagttgcagaaaggagacaagggggagaaacacttcgaatgtaacgagtgcggaaaggcgttttgggagaagagccatcttactagacatcagcgagtacacaccggcgagaagcactttcaatgtaatcagtgtggtaaaactttctgggagaagagtaatctcacaaaacatcagcggagtcacaccggggaaaagccttttgaatgcaacgagtgcggtaaggccttcagtcataagagcgccttaacactccatcagcgtacccacaccggggaaaaaccctaccagtgtaacgcttgcgggaagactttttaccaaaagagtgacctaacgaaacaccagaggacccataccgggcaaaaaccctacgaatgttatgagtgcgggaagagtttctgtatgaactctcacttgaccgtccaccaacgcacccacaccggcgaaaaacctttcgaatgcttggagtgtgggaaaagtttctgtcagaaaagccacctgactcagcaccagcggacccacatcggggataagccctatgaatgcaatgcatgtgggaagacattctatcataaatcagtattgacacgccatcagatcatccacactggactgaaaccttacgaatgctacgagtgtggtaagacattctgtctgaaatcagacctcaccatacatcagaggacacacaccggcgaaaaaccatttgcttgtccagagtgtgggaagttcttcagccacaaaagtaccctttcccagcattataggactcacacgggcgaaaaaccgtacgaatgtcacgagtgtggcaagatcttttacaacaagtcatatttgactaagcacaatcggacccacactggagagaagccatacgaatgcaacgaatgtggaaaaacgttctgccagaagtcccagttaacccaacatcagagaatacacatcggcgaaaagccttacgaatgcaatgagtgcggtaaggctttctgccacaaaagcgctttaatcgtgcatcagcgaactcacactcaagagaagccatataagtgcaacgaatgcggcaaatccttttgtgtaaagagtggtttgattctgcatgaacgcaagcacacaggcgaaaagccttacgaatgtaatgaatgcgggaagtcattctcccacaagagctctttaacagtccaccatcgagcacacacaggcgaaaaatcctgccagtgcaacgagtgcggtaagatattctacagaaagtccgacctcgctaagcatcagcgttcccatacaggggagaaaccatacgagtgcaacacatgcagaaagaccttctcacagaagagcaatctgattgtccatcagcgcacccatataggagagaaaccctacgagtag

SEQ ID NO: 212179 - DNA, 2235 bp, synthetic construct
  misc_feature 1..2235: note = Description of Artificial Sequence: Synthetic coding sequence
  source 1..2235: mol_type = other DNA
atgaacaaggtggaccagaagttccagggcagcgtgagcttcaaggacgtgacagtaggcttcacccaagaggagtggcagcacctggatccctcccagagggctttgtatagggatgtgatgttggaaaactacagcaacctggttagcgtcggtaccgcagaccatctcaaggaacgttcacaggagaatcagtcgaagcacctgtgggaggtggtcttcataaataatgaaatgctgaccaaagagcaggggaacgtaatcggcatccccttcaatatggacgtcagtagcttcccgtctagaaagatgttctgtcagtatgattcaagaggcatgtcctttaataccgtgtctgagctggtcatttctaagattaactacttgggcaagaaaagtgatgagttcaacgcctgcgggaagttgctgttgaatattaagcatgacgagacccatactagagagaagaatgaagtcttaaagaacagaaacacattatcacatcgggagaacactctccaacatgagaagatccagacactagaccataactttgagtattctatctgccaggagaccctgcttgagaaggccgtgttcaataccaggaaaagagagaatgctgaggaaaataattgcgactataatgaatttggacgcactttctgcgatagctccagcctgttgttccatcagatccctcccagcaaggactcccactacgagttttcagactgcgaaaagttcctgtgcgtgaaatccaccctgagcaagcacgacggagtcccagtgaaacactatgattgtggcgagtctggaaataacttccgccgcaagctttgcctgtcccaactccagaagggggacaagggcgaaaagcattttgagtgcaacgagtgcggcaaagctttttgggagaagagtcatctcactcggcaccagagagtacatactggtgaaaaacattttcaatgcaatcagtgcggcaagacattttgggagaaaagcaacttgacaaaacaccaacggtcacataccggtgagaagccattcgagtgtaatgaatgtgggaaggcatttagccacaagtcagccttaacccttcatcagcggacgcacacaggagaaaagccatatcagtgcaatgcttgtggcaagaccttctatcagaagtcggaccttaccaaacaccagcgcacccacactgggcagaaaccttatgaatgctatgagtgtgggaaaagtttctgcatgaattcccaccttacagttcaccagcgcacccacacaggcgaaaaaccctttgaatgcctggagtgcggcaaaagcttttgccagaaatcacatctgacacagcaccaacgcacacacatcggtgataagccctacgagtgtaatgcctgtggaaaaacattttaccacaagtcagttctgacaaggcatcagataattcacaccggattgaaaccttacgaatgctatgagtgcggtaagaccttctgtctcaagtcggacttaacgatacatcaaaggacacacaccggagagaaaccatttgcatgccccgaatgtggcaaattcttttcccacaagtccaccctatctcagcactatcgcactcataccggggaaaaaccttatgagtgccacgaatgcggcaagatcttctacaataaatcataccttacaaagcataatcggacacacactggggagaagccatacgagtgcaacgaatgcggaaagacgttctgtcagaagtctcagctgacgcaacaccagcggatccacattggggaaaagccctacgagtgcaatgaatgtggcaaagcattttgtcataagtcggccctgatcgtccatcagcgtacccatacacaggagaagccctacaaatgcaatgaatgtggcaagtccttttgcgtgaaaagtggtcttattttacacgagcggaagcacaccggggagaaaccatacgagtgcaacgaatgcggaaagtccttctctcataaaagctcactcaccgtgcatcatcgggcacacacgggtgagaagtcctgtcaatgtaatgagtgtggaaaaattttctaccgcaaaagcgatctggccaaacatcagcggtcgcacacaggcgagaagccttacgaatgcaacacatgcagaaaaaccttcagtcaaaagagtaacctgatcgttcaccagagaacacacatcggggagaagccatacgaatag

SEQ ID NO: 212180 - DNA, 1683 bp, synthetic construct
  misc_feature 1..1683: note = Description of Artificial Sequence: Synthetic coding sequence
  source 1..1683: mol_type = other DNA
atgctgctgctgctgagcgaccagctgctgctgaccgccctgcggaagcccaacccacaggccatggccgccctgtttctgtctgcccctccccaggctgaggttactttcgaagatgtagcagtatacttatctagggaggagtggggcagactgggcccagcccagagaggtttgtacagggacgtcatgttggaaacctatggcaatttggtctcccttggagtgggtcctgccggcccaaagccgggcgtgatatcacagcttgagagaggggacgaaccgtgggtgctcgacgttcagggcacatctggaaaagaacatcttcgcgtcaacagtcctgccctgggcacccgcaccgagtataaagagttgacaagtcaagagacctttggcgaggaagatcctcagggtagcgagcctgtggaagcatgtgatcacatctcgaaatctgaaggctctttggaaaagctggtggagcagcgcgggcccagggccgtgactctcaccaacggagagtcttcccgcgaatcgggtgggaaccttagactgttgtctaggcctgtgcctgatcaaaggccccacaagtgtgacatttgcgagcagtcctttgagcagcgttcatatttgaataatcataagcgcgtccaccgatcaaaaaaaacaaatactgtgagaaattccggagagatctttagtgcaaatctcgttgtaaaggaggaccaaaaaattccaaccggaaaaaaattgcattactgctcttactgcggcaagacatttcgatacagcgcaaatctggtgaagcaccaaagactgcacactgaggaaaaaccctataaatgcgacgaatgcggaaaggcgttttctcaatcatgtgagttcatcaatcaccgtcggatgcattccggtgagataccctaccgttgcgacgagtgcggcaagacgttcactcgccggcctaacctgatgaagcaccaacggatacacactggagagaagccctataagtgcggcgagtgtgggaaacattttagtgcatactccagccttatctaccaccagaggatacataccggggaaaagccctacaagtgtaatgactgtgggaaggcgttcagcgacgggtcaatattgattcgacaccggaggacacatactggcgagaaacctttcgaatgtaaagaatgtggcaaaggcttcactcagagcagcaatctgatccagcaccagaggattcatacaggcgaaaaaccctacaagtgcaacgagtgcgaaaaggcattcatacaaaagactaagctcgtcgagcaccagcgcagccatactggggaaaaaccatatgaatgcaacgattgtggcaaggtatttagtcagagcacacatctcattcagcaccagaggattcacaccggggagaagccctataagtgctccgagtgtgggaaggctttccataacagctcaaggctaatccaccaccagcgactgcaccacggtgaaaaaccatatcggtgttctgattgtaagaaggctttttctcaatccacttaccttattcagcatcgtcgcatccataccggcgaaaaaccatacaagtgtagcgaatgtgggaaggcatttcgccacagctccaacatgtgccaacatcagcgaattcatctccgcgaagatttttctatgtag

SEQ ID NO: 212181 - DNA, 1620 bp, synthetic construct
  misc_feature 1..1620: note = Description of Artificial Sequence: Synthetic coding sequence
  source 1..1620: mol_type = other DNA
atggccgccctgttcctgagcgcccccccccaggccgaggtgaccttcgaagacgtggccgtgtacctgagcagagaagaatggggtcggctcggccccgcacagcgcggcctgtaccgcgacgtcatgctcgaaacttatggaaaccttgtcagccttggggtgggcccagctggtcccaaaccaggggtaatctcccagttggagcgcggagacgagccttgggtgctggacgtccaggggaccagcggcaaagaacacctgagagtgaactctcctgccctgggcacccgcaccgagtataaagagttaaccagccaagaaacattcggggaggaggatccacagggctctgaaccggtcgaagcctgcgaccacatatccaagtctgagggtagcctggaaaagttggtggagcagagggggcccagggcagtcactctcactaatggtgagtctagtagagagtctggagggaacttgcgacttttgagcagacctgtaccggatcagcggccgcacaagtgtgatatctgcgaacagagtttcgaacaaagaagttacctcaacaaccacaaaagggtgcatcgatccaagaagaccaataccgtccgtaattcaggggagattttcagcgcaaatcttgtagtaaaggaagaccagaagattcctacgggcaagaagctgcactactgtagctattgcggcaaaacgttccggtactccgccaacctggtgaagcatcagcgcctccacaccgaggagaaaccctacaaatgcgacgagtgcgggaaggccttctcgcagagctgcgagtttattaaccataggcgcatgcattctggcgaaatcccctatagatgcgatgagtgtgggaagaccttcacgagaaggccaaacctgatgaaacatcaacggattcacacgggggagaagccttataagtgtggggagtgcgggaagcacttttcagcatactcctctctgatttatcatcagaggatccacacaggagagaaaccatataagtgtaacgattgcgggaaggccttttctgacggctcaatcctcattaggcatcgacgcacgcacaccggagaaaagcccttcgagtgcaaggaatgcggtaaaggcttcacccagtcttcgaacctgattcagcaccagcggatccacaccggcgagaagccatataagtgcaacgagtgcgaaaaggcctttattcagaagactaagctggtagaacatcaacggagccacactggcgaaaagccctacgaatgcaatgattgcggcaaagtattcagtcaatctacccatctgattcagcatcagaggatccacaccggagagaaaccctacaagtgttccgaatgtgggaaggctttccacaactcatcccgcctgattcaccaccagagacttcaccatggcgagaagccttatagatgcagcgactgcaaaaaggcctttagccaatctacatatctaatccagcatcgaagaatccacaccggcgagaaaccctacaaatgctctgaatgtgggaaggcattcaggcatagctcgaacatgtgtcagcaccagaggattcacctccgagaagatttctctatgtag

SEQ ID NO: 212182 - DNA, 1560 bp, synthetic construct
  misc_feature 1..1560: note = Description of Artificial Sequence: Synthetic coding sequence
  source 1..1560: mol_type = other DNA
atgtacctgatccgggagagccacgccagcggcagcagcagcgtgacttcatcctgcagtctgccgagcgagagtccgacgctccgacagtggagaccctgctcatgcctgccacacccgaggccaggagtgatcagtcaattggaacgcggcgatgagccctgggtgctagacgtccaaggaactagcgggaaggaacatctccgcgttaacagccccgctctcggcacgaggaccgaatataaagaactaaccagccaggagacattcggtgaagaggatcctcaggggtcagagccggtggaggcgtgcgatcacattagtaagagtgagggcagtcttgaaaagctggttgagcaaaggggacctagagccgtaaccctgacaaacggtgagagttcccgggaatctggaggcaatctacgcctcctctcacgaccagtgccagaccagaggccacacaagtgcgatatctgtgaacagtctttcgaacaacgatcatatctgaataatcataagagggtccaccgcagcaaaaagaccaacaccgtgcgcaatagcggggagattttctctgccaatctggtcgtgaaagaggatcaaaaaatacccacaggcaagaaattacactactgctcctattgcggtaagaccttcaggtactctgccaatctggtgaagcaccaacgacttcatactgaggagaaaccttacaagtgtgacgagtgtggtaaagctttcagccaaagctgcgagtttatcaatcaccgcaggatgcattcaggtgagattccatacagatgtgacgagtgtggaaagactttcacccggagacctaacctgatgaaacaccagcgaattcacacaggcgaaaagccttataagtgcggggaatgcggaaagcacttctctgcgtattctagtctcatataccatcagagaatccatactggcgagaagccatacaaatgtaacgattgcgggaaagcattctctgatggatccattctgattaggcatagacgtactcacacgggagagaagcctttcgaatgcaaagaatgcggtaaggggttcacccaaagctccaacctgattcagcatcagcggattcatacaggagagaagccttacaaatgcaatgaatgcgagaaggcctttattcagaagactaagctcgtggagcaccaaaggagtcataccggcgagaagccttacgaatgcaatgattgtggaaaggtgttcagtcagagcacccatctgatccagcaccaacgaatccatacaggagagaaaccttataaatgtagcgagtgcggtaaggcttttcacaatagttctcggctcatccatcaccagcgcttgcaccatggggagaagccctacaggtgtagtgattgtaagaaggcttttagccagtccacttatctcatccagcaccgccgcatacataccggcgaaaagccatataagtgctccgagtgtggaaaggcctttcgccattcaagcaacatgtgccagcaccaacgaatacatctccgcgaggactttagcatgtag

SEQ ID NO: 212183 - DNA, 1584 bp, synthetic construct
  misc_feature 1..1584: note = Description of Artificial Sequence: Synthetic coding sequence
  source 1..1584: mol_type = other DNA
atgaccgccgagctgcgggaggccatggccctggccccctggggccctgtgaaagtgaagaaggaggaggaagaagaggaaaatttccccggccaagcgagttctcaacaggtccattctgagaatatcaaggtgtgggcccctgtgcagggtctccagaccggacttgacggatccgaagaggaagaaaagggtcagaacatctcgtgggatatggctgtggttctgaaagcgactcaggaggccccggccgcgtctaccctggggtcctatagtctgcccggtacactagctaagagtgaaattctcgaaacacatggtactatgaattttcttggggcagagacgaaaaatctgcagctgctcgtacctaagactgaaatctgcgaggaagccgagaagcccctgatcatctccgaacgcattcaaaaggccgacccccagggacccgagcttggggaagcttgcgagaaggggaacatgctcaaacgccagcgcatcaagcgcgaaaaaaaggatttccgtcaggtgatagtcaacgattgccacctccccgaatcattcaaagaagaagaaaaccagaaatgcaagaagagtgggggtaagtacagcctcaattcaggcgccgtgaaaaatcctaagacacagctcgggcagaagcctttcacttgttccgtgtgtggcaagggatttagccaaagcgccaacttagttgtgcatcagcgcattcatacgggtgagaagcctttcgaatgccacgagtgcgggaaagccttcatacaatcagcaaacctggtggtgcatcagcggatccatactggacagaaaccctacgtttgcagtaaatgtggcaaggccttcactcaatcatccaatctgaccgtgcaccagaaaatacacagtctagaaaagaccttcaagtgcaacgagtgtgaaaaggccttctcttattcatctcagctggcgcgtcaccagaaagtgcacatcaccgagaaatgttatgagtgtaatgagtgtgggaagacgttcactagaagttcaaatctcattgttcatcagcgtatacacactggggaaaagccattcgcatgtaacgactgtggcaaggcttttacacagtctgccaacttgatagtgcatcagcgttctcacactggggagaagccctacgaatgtaaggagtgcggaaaagcttttagttgtttcagccacctgattgtgcaccagcgcattcatactgctgagaagccttacgattgctcagaatgtggcaaggcattctcccagctctcctgtcttatagtccatcaacggattcactctggagacctgccatatgtttgcaatgaatgcgggaaggcttttacctgttccagttatctgttgatccatcaacgcattcataacggggagaaaccttacacctgcaatgaatgtggaaaggccttcaggcagcgaagcagtttaaccgtgcaccaaagaactcacacaggagagaaaccttacgaatgcgaaaagtgtggggcagcttttatcagcaattctcacttaatgcggcatcatcgtactcaccttgtggagtag

SEQ ID NO: 212184 - DNA, 405 bp, synthetic construct
  misc_feature 1..405: note = Description of Artificial Sequence: Synthetic coding sequence
  source 1..405: mol_type = other DNA
atgaccgccgagctgcgggaggccatggccctggccccctggggccctgtgaaggtgaaaaaggaggaggaggaggaggagaactttcccggccaggctagtagccagcaagttcacagcgagaatatcaaggtgtgggcccccgtgcaggggctacaaacagggctggacggcagtgaggaggaggagaagggccaaaacatctcctgggatatggccgtcgtgctgaaagcgactcaggaagcccctgcggcgagcacgctgggttcctactccttgcctggaactctggcgaagagtgaaattctggagacccacgggaccatgaatttcctcggcgccgagaccaagaatctccagctgctagtccccaagaccgagatctgcgaggaggccgagaagtag

SEQ ID NO: 212185 - DNA, 339 bp, synthetic construct
  misc_feature 1..339: note = Description of Artificial Sequence: Synthetic coding sequence
  source 1..339: mol_type = other DNA
atgaccgccgagctgcgggaggccatggccctggccccctggggccctgttaaggttaagaaggaagaggaggaagaggaaaatttcccaggccaagcaagctctcaacaggtccactcagagaacatcaaagtatgggcacctgttcagggcctccagacagggttggacgggtccgaagaggaagagaaaggacagaatataagctgggatatggccgtggtcctcaaagcaactcaggaggctcctgctgcatcaacactggggagctacagcttgccaggtactcttgccaaaagcgagatcctggagactcatggcactatgaacttcctgtag

SEQ ID NO: 212186 - DNA, 1104 bp, synthetic construct
  misc_feature 1..1104: note = Description of Artificial Sequence: Synthetic coding sequence
  source 1..1104: mol_type = other DNA
atgctgaagcggcagcggatcaagcgggagaagaaggacttccggcaggtcattgtgaatgattgtcacctacctgagtcattcaaagaggaggaaaatcagaaatgcaaaaaatccggcggaaagtacagcctgaatagtggcgcagtgaaaaaccctaagactcaactaggacagaagccctttacatgctcagtctgtgggaagggctttagccagagcgccaaccttgtcgttcatcagcgtatccacacaggagagaagccattcgagtgtcatgaatgcgggaaggcctttattcaatccgctaatctggtagttcatcaaagaatccatacgggccaaaagccatatgtttgcagcaagtgcggaaaggcattcactcagtcaagtaatctgacagtccatcaaaaaatccattcactggaaaagacatttaaatgtaacgagtgtgagaaggccttcagctactcatctcagcttgctagacaccagaaggtgcacatcacagagaaatgttacgagtgtaatgagtgcggcaagactttcacccgtagctccaatctcatagtgcaccagcgtattcacaccggcgagaagccattcgcttgcaatgactgtggcaaggcctttacacaaagcgctaatctgattgtgcaccagaggagccacaccggagaaaagccctacgagtgcaaagagtgcggcaaggctttctcttgctttagccatcttatcgtgcaccagcggatacacaccgccgagaaaccgtatgactgcagcgaatgcgggaaggccttctcccagctaagctgtctgattgtccaccagcgtatacatagtggcgatttaccctatgtctgtaatgaatgcgggaaggcttttacttgttcatcatatctcttgatccaccaacggatccacaatggtgagaaaccctacacatgcaatgaatgcggcaaagcttttagacaacgctcttcccttactgtgcaccagcggacgcataccggtgagaaaccttacgagtgtgagaagtgtggcgctgcctttatttccaactctcacctgatgcgccaccacagaactcacctggtagaatag

SEQ ID NO: 212187 - DNA, 981 bp, synthetic construct
  misc_feature 1..981: note = Description of Artificial Sequence: Synthetic coding sequence
  source 1..981: mol_type = other DNA
atggacctgaccgccatctacgagagcctgctgagcctgagccccgatgtgcctgtgcccagtgatcatgggggtacagagtcaagccccgggtggggttcctcaggaccttggtctctctcaccatccgactcatcaccatctggggttacctctcgactcccaggaaggagtacgagcttggttgagggccggtcctgcggctgggtcccccctccacctgggtttgcacccctggcaccacggctggggccggaacttagcccttctcccacttctcctacagccacaagtaccactccttcccgatacaaaaccgagctgtgccggaccttctccgagagtggtagatgtaggtacggtgccaagtgtcaatttgcccatggactcggggaacttaggcaagccaataggcatccgaaatataaaactgagctctgtcataaattctatcttcagggacgctgcccctacggaagtcgatgccatttcatccacaatcctagcgaagacctggcagccccgggacaccctcccgtgcttaggcagtccatcagcttcagcggactcccatctggtaggaggacgagtccccctcctcctggcctggcgggcccttccttgagctcttcctccttttctccgtcatctagcccaccccccccaggcgatctgcccctatcacccagcgcattcagcgccgcccccgggactcctttggccagacgtgatccgacaccagtttgttgcccttcttgccggagggcgacccccatctcagtttgggggccgcttggaggcctggtgaggaccccgagtgttcagtcactcggctcggatccagatgaatacgcaagttcaggttctagcctgggaggaagcgactctcccgtgtttgaggcaggcgtgtttgcaccccctcaacctgtggctgcacctcgcaggctacccatttttaaccgaataagcgtttctgaatag

SEQ ID NO: 212188 - DNA, 1017 bp, synthetic construct
  misc_feature 1..1017: note = Description of Artificial Sequence: Synthetic coding sequence
  source 1..1017: mol_type = other DNA
atgaccaccaccctggtgagcgccaccatcttcgacctgagcgaggtgttgtgcaaaggaaacaagatgctgaattatagtgctccatcagctggcggatgccttctggataggaaagccgttgggactcctgccggtgggggctttccacggagacattctgtaaccctgcccagctccaaattccatcagaaccagctgttgagctccctgaagggcgaaccagcaccagctttgtcttccagagacagccgcttccgggaccgatctttcagcgagggaggggagagactcctccctactcaaaaacagccaggcggtggtcaggtgaactctagccgctacaaaactgagctttgcaggccgtttgaggagaatggagcatgcaaatatggagacaagtgccagttcgctcacgggattcatgaactacgaagcctcactagacatcccaagtataagaccgagttgtgtcgtacattccatacaataggtttttgcccttacggacctaggtgccatttcatccataacgccgaggagagacgtgcacttgcgggagctcgcgatctctctgccgaccgaccacggttgcagcactcattctcttttgccggattcccatcagctgccgccaccgcagctgctactggactgctggactcacccacaagcataactcctcccccaattctgtctgccgatgatctcctgggatcccccaccctgcctgatggcacgaataatccgtttgctttttccagccaggagttggccagtctttttgcgccttctatgggcctccctgggggaggatctcccactacatttctgttcagacccatgtctgaatctccacacatgtttgattctccccctagccctcaggatagcttgagcgaccaggaagggtacttgtctagcagctcaagttctcacagtgggagcgattccccaacactcgacaattcaaggcgtctgcctatattttcgcggctgtcaatcagcgacgattag

SEQ ID NO: 212189 - DNA, 501 bp, synthetic construct
  misc_feature 1..501: note = Description of Artificial Sequence: Synthetic coding sequence
  source 1..501: mol_type = other DNA
atgaacacctacacccggagcgccagcttcacccccaagaccttcacattcccacttgcacagaacaggacttctcaccccactaccacatctaagcttaaatatctgggtcggcccagtccgaggcgagatgctcttcaggcaaacggagagggacccgaggtggggcctggaacagaggaacccgcgcatcggctgcccgtcggatctggatcagccggggaggccgccgcaagtctaggaacagcaagggtacggagtggtagggccgagtgcaccgccaagctggctggggacggtcacgcccgtctggcctcagcgttcctgcacaggagggctgctctgccacctccccttggcacttgtcggcctcggctgggcgagggcgggtccgcccctgcactgggtccctcccccagacggggacgcagagtttccgaaggactgcgcgacagcctgccccccctcgggtcccttacgctgggcaagtctccaaagtag

SEQ ID NO: 212190 - DNA, 966 bp, synthetic construct
  misc_feature 1..966: note = Description of Artificial Sequence: Synthetic coding sequence
  source 1..966: mol_type = other DNA
atgaccaccaccctggtgagcgccaccatcttcgacctgagcgaggtcctgtgcaaggggaacaagatgcttaactatagcgcgccctccgccggcggatgtctcctagaccggaaagcagtaggaacaccggcggggggcgggtttcctcgacgtcactctgtgacacttcctagcagcaagttccatcaaaatcagctcttgagcagcctgaagggtgaaccagctcctgcattgtcttctcgcgattctaggttccgtgaccgtagcttctcagaagggggtgagcggctcctgcccacccagaaacaaccctttgaagagaacggcgcgtgcaaatatggtgataagtgtcagtttgctcacggtatccacgagttgagaagcctcacccgacatcctaaatataagaccgaactgtgccggacattccatacaataggtttctgcccctacgggccccgatgccatttcatccacaatgcggaagagagacgggcactcgccggagcccgggacttgtcagctgacagaccgcgcctccagcacagcttcagttttgctggtttccctagtgccgcggctacagccgcggccactggcctgctggattcgcctacttcaattactcctccccccatcctctctgccgatgaccttctggggtcccctacattgccggacggtacgaacaacccatttgctttctcctcgcaggagctggctagtttgttcgccccgagtatgggcctgccaggaggcgggtcccctacaacatttctcttccgcccaatgagtgaaagcccacacatgttcgattctccgccatcaccccaggacagcttaagtgatcaggaaggctatttatccagttcttcatcttcacatagtgggtcagacagtcctactctggataacagcagacgcctgcccatcttttctcgtctgtccatatccgatgactag

SEQ ID NO: 212191 - DNA, 1017 bp, synthetic construct
  misc_feature 1..1017: note = Description of Artificial Sequence: Synthetic coding sequence
  source 1..1017: mol_type = other DNA
atgaccaccaccctggtgagcgccaccatcttcgacctgagcgaggtgctgtgtaaaggaaataaaatgttgaattactctgctccttcggcgggtggatgccttttggacaggaaggcagtgggtacgcctgccggcggtgggtttccccgccggcactctgtgacccttccatctagcaagttccaccagaatcagctcttgtcgtctctgaaaggggaacccgctccagcccttagtagcagagactctcggttccgggacagaagcttttccgaaggtggtgagaggctgctacctacacagaagcagcctggcggtggccaggtaaatagctctcgctataagacagagctatgccgacctttcgaggaaaacggggcctgtaagtacggagataagtgccagtttgctcatggtattcacgagcttcgctctttaacgcgccatcctaagtataagactgagctatgtcgcacctttcacacgattggtttttgcccctatggcccccggtgccatttcatccataacgccgaagaaagacgggcactcgcgggcgccagagatctttctgccgatcgtcccagactgcagcactcattttctttcgccggattccctagtgcagcggctacagcagccgccaccggcttgctcgattcacctacatccattacccctccccccatactcagtgccgatgacctgctgggatccccaaccttaccagatgggactaataatccattcgcctttagctctcaagaactcgctagcttgtttgcacccagcatgggactgccgggtggcggctctcccaccaccttcttgttccgtcctatgtctgaatcccctcacatgttcgattcccccccaagcccacaggattcactgtctgatcaggagggctatctgtcttcttctagcagtagccattcagggtccgacagtcccaccttggacaacagtaggcgacttcctatattttcccgcttgagcatttctgacgattag

SEQ ID NO: 212192 - DNA, 1485 bp, synthetic construct
  misc_feature 1..1485: note = Description of Artificial Sequence: Synthetic coding sequence
  source 1..1485: mol_type = other DNA
atgagcaccaccctgctgagcgccttctacgacgtggacttcctgtgtaaaaccgaaaagagtctagccaacttaaatctgaacaacatgttagacaaaaaggctgtcgggacacctgtggctgcagctccaagttccgggttcgcacccggattcctgagacgccacagcgcgtccaatctgcacgctctggcgcatcccgctccctctccaggcagctgcagcccaaaattccccggggcagccaacggatctagctgcggcagtgcggctgcggggggtcctacttcatatgggacgttgaaggagccttcaggcggaggtggcacagctcttctcaataaggagaacaaattccgcgaccgatctttcagcgagaacggagaccgctctcaacacttattacatctgcaacagcagcaaaagggaggcgggggcagccaaatcaacagtaccagatacaagactgagctctgcagacctttcgaagaatctggcacctgcaagtatggcgaaaaatgccagttcgcgcacggattccacgaactccgtagccttacgcgacaccctaagtacaaaactgagctgtgtagaacgtttcacactataggtttctgtccatacggtccccgttgccacttcattcacaacgccgacgaaaggcggcctgcaccaagtggaggagctagcggcgacttgcgcgcttttggcacacgggacgcccttcacctgggcttccctcgcgaaccccggcctaagctgcaccacagcctgagctttagtggattcccttcaggccaccatcaacctccaggaggcctcgagagtccactactcctggacagtcctacctcacgaacaccaccccctcctagctgtagctcagcttctagctgttcgagctcagcatcttcttgtagttccgccagcgcagcgtccaccccttccggtgcaccaacgtgctgcgcttccgcggccgcagcggctgccgcagccctcttgtatgggacaggaggtgcagaagacttactggccccaggcgcaccttgtgcggcttgttcctcggcctcctgtgctaacaacgccttcgctttcggcccagagctctcttctctgatcacccctctggctatacagacacacaattttgctgctgtagctgccgccgcatactataggtcccagcaacagcagcaacagcaaggtctcgcacccccagcccagcctccggcacctccatctgcaaccctgcctgctggagccgcggcgcctccgtcccctccattttccttccaacttccccgacgcctctctgatagcccggtctttgacgccccaccatcccccccagattcactctctgatagagacagttacctgtcgggatccctctcttctggatccctttctggcagcgaatccccaagcctggaccctggccggaggttgcctatcttctccagattgtcaatcagtgacgactag

SEQ ID NO: 212193 - DNA, 651 bp, synthetic construct
  misc_feature 1..651: note = Description of Artificial Sequence: Synthetic coding sequence
  source 1..651: mol_type = other DNA
atgagcgccctgggccagatcaccatcaccgtgagccggtgctggaacaccgaaaggaaccagactgacaaaaatccgtgtctgcacggagcttaccttcaactccgcgaaacagtcaaaaacaagagcacacacctcaagaagcccctgatgaagcaggcccctccttggaaggatcatttgacgtttcaacctctgcatccagccgagcgcaaaacccaggtgtggcggtggcagagcggcaatagctctgaccttgaaacgacctcaagcgcctcaccttggcctaccggatcaaaccgggatgtggtgcttaatacattggccgaaagttgttgtggcctgtcggaacttatcaccgcccccccgtacgccggggtttccatccaggggttttcccagatctgggtactgttccctttttgcggcggcactttccatcacaatgagaaagacgtgcttgggcttcaggactttgagcgggagtccgtaagtacgagccaatccaggaatatttcccttttaaccctcggtcagctgcagaattgcgtcattgggaagctgacaatcatcgatctgctcacggaacacctgctcggtgtgcgacacggcgtaatttgctttccctgggggcttccaagctcttcttag

SEQ ID NO: 212194 - DNA, 1224 bp, synthetic construct
  misc_feature 1..1224: note = Description of Artificial Sequence: Synthetic coding sequence
  source 1..1224: mol_type = other DNA
atgcagcagaaggccttcgaggagagccggtacccctggcaggagagtttcgagaatgtcgccgtctgtttgcccctcagatgccctcgctgtggagaccatactaggtttcgctcactgtctagccttagggcgcacttggaattcagccactcctacgaggagcggactctgttgaccaaatgcagccttttccccagccttaaggatacggatctggttacctcttccgagcttctgaagcctggaaagctgcagtctagtggcaatgtcgtcaaacagaagccttcatatgtcaacctgtactctatctcacatgaacacagcaaggaccgaaagcccttcgaggttgtcgctgagagacccgtgtcatatgtgcagacctacacagccatggacctgcatgccgactcattagacggcaccaggtctggccctgggctgccaaccagcgacactaaggcctcgttcgaagcccacgtcagagagaaatttaacaggatggtggaagccgttgaccggaccatcgagaaacggatcgataagctaaccaaggagctggcccagaagaccgccgaacttcttgaggtgcgcgcggcatttgtccaattgacgcagaaaaagcaggaagttcagaggagggagagagccctcaatcgacaagttgacgtcgccgtcgagatgattgctgtcctgcgacagcgcctaacggaaagcgaagaggagctacttcgcaaagaggaggaagtggttacttttaatcattttctggaggccgccgccgagaaggaggtgcaggggaaagcacgactgcaagatttcatcgagaatcttttacagcgtgtcgagctggccgagaagcaattggagtactaccagtctcaacaggcctccggctttgtgcgggacttgagcggacacgtcttgaccgatatatcctccaatcgaaaacctaaatgtctctcccgcggccacccacattctgtgtgtaaccaccctgacctgaaagctcacttccatccgaagggacgaaaccatctgaagaaggccaaggatgacagggccagcatgcagcctgccaaagccatccacgagcaggccgaatcaagccgagatctatgccgacctcccaaaaagggcgagcttctgggcttcgggcgtaaaggcaatattcgccctaaaatggcaaaaaagaagcccaccgctatagtaaatatcatttag

SEQ ID NO: 212195 - DNA, 1002 bp, synthetic construct
  misc_feature 1..1002: note = Description of Artificial Sequence: Synthetic coding sequence
  source 1..1002: mol_type = other DNA
atgcagcagaaggccttcgaggagagccggtacccctggcaggagagctttgaaaatgtggcggtatgcttgcccctgcgatgcccacgctgcggggaccatacaagatttcgctcgctcagtagcctgcgggctcatctggagtttagccacagttacgaagaacggacactgctcaccaagtgcagtttgttcccatctctaaaagacacagacctggttaccagcagcgagttgctaaagcctggaaaattgcagagtagtgggaatgtcgtgaaacagaaaccatcatacgttaacctctattccatctcacatgagcactccaaggaccggaagccttttgaggtcgtcgcagagaggcccgttagttacgtgcagacctataccgccatggatctgcacgccgactcactggacggaactcggagcggtcctgggctgcccacctccgatactaaggcctcctttgaagcacacgtccgggaaaagttcaatcgtatggtcgaagcagtggatagaaccatcgagaagaggatagataagctaaccaaggagttagcacagaagacagcggaactgctggaggtcagagctgcttttgtacagctcacccaaaagaagcaagaggtgcaaagacgcgaaagggctctgaacaggcaggtggatgtggcagtcgaaatgattgccgttctgcgacagaggttaaccgaatccgaagaagagctcctgagaaaggaggaggaagtggtcaccttcaaccacttccttgaggcagcggctgagaaggaagttcaggggaaggcacggctgcaggacttcatagaaaatttgctccagagagttgagctggctgaaaagcaactcgaatactaccagtcacagcaagctagcggctttgttagggatctgtcaggtcatgtaagctggaagggagcaggagaggctagactggtctgtcaaaacgacctcgagctagaagagtctgctatcgttgagtag

SEQ ID NO: 212196 - DNA, 1389 bp, synthetic construct
  misc_feature 1..1389: note = Description of Artificial Sequence: Synthetic coding sequence
  source 1..1389: mol_type = other DNA
atgcagcagaaggccttcgaggagagccggtacccctggcaggagagctttgaaaatgtggccgtttgtcttcctctgcggtgtcctagatgcggagatcacactcgtttccgatcattgagctctctgcgggcccatcttgaattctcccacagctacgaagaaaggaccctgctgaccaagtgcagcctgtttccaagccttaaggatactgacctcgtaacctcatccgagctcctgaagccaggaaaattacagtcttctggcaacgtggtcaagcagaagccatcttacgttaacctgtacagcatcagccatgagcactctaaagatcgaaaaccgttcgaagtcgtcgccgagaggccagtgtcttacgtccagacttataccgctatggacctgcacgccgacagcctagacgggactaggtcagggcctggcctgccaacttctgacacaaaggcctcatttgaagcccacgttagagagaaattcaaccggatggtcgaggcagtagaccggacaatcgagaagcggattgataaactgacgaaagagttggcccaaaagactgccgagttgttagaagtacgcgctgcattcgtgcaacttactcagaagaaacaagaagtccagcgaagagaaagggctctaaaccgccaggtcgatgttgcagttgagatgattgccgtgctcaggcagaggctgacggagtccgaagaagaactgctgcgcaaggaggaggaggtggtcacatttaatcatttcctggaagccgccgccgagaaggaagtgcagggaaaggcccgccttcaggacttcatcgagaacttactgcagagggtggagctggccgagaagcagcttgagtattaccaatcacagcaggcctccggattcgtcagagacctgtccggccatgtcagttggaagggcgctggcgaagcccgccttgtgtgccagaatgacctggagctggagatctttggccatattaatcaccatttatcgggtcttaaggattcacattgccttgtgtttctgcaggctccacccgtaccttggatcatcctagcaagtttcctctggattctcggcaatccatggacatcttcgaccgcgaccgcaggattctctcaaatctgggttcttttccccttctgcggtggcacatttcatcacaatgaaaaggacgtgttgggtctccaagacttcgagcgagaaagtgtgtcaacaagtcagagtagaaatataagcttgttgacccttggtcagctgcagaattgcgtgattggcaagctaaccattatcgacttactgactgaacacctactaggggtgcggcacggcgttatttgctttccctggggactgccaagcagctcttag

SEQ ID NO: 212197 - DNA, 162 bp, synthetic construct
  misc_feature 1..162: note = Description of Artificial Sequence: Synthetic coding sequence
  source 1..162: mol_type = other DNA
atgcagcagaaggccttcgaggagagccggtacccctggcaggagtctttcgagaatgtggcggtttgcctgccacttcgatgcccccgatgcggtgaccatactcgcttcagatctctgtcctcattgagagcccacctggagttctcacattcttactag

SEQ ID NO: 212198 - DNA, 1893 bp, synthetic construct
  misc_feature 1..1893: note = Description of Artificial Sequence: Synthetic coding sequence
  source 1..1893: mol_type = other DNA
atgagcgtgagcagcggcgtgcagatcctgaccaagcccgagaccgtggacagacgccgatcagctgagacaacaaaagaagcgggtcgcccactggagatggccgtgagtgagcccgaagcaagcgccgcggagtggaaacaacttgatcctgcccagtccaacctctataatgacgtcatgctggaaaactattgtaatcaggcatcaatggggtgccaggcccctaagccagatatgatctccaaattggagaaaggggaggctccttggctcgggaagggcaaacggccctcccagggatgccctagtaaaatcgctagacctaagcagaaagaaacagatggaaaagtgcaaaaggatgacgatcagctggaaaacatacagaagtcacaaaacaaacttcttagggaggtggcagtgaagaagaaaacccaggccaagaagaatggatctgattgcggttccctggggaagaagaacaatttacacaaaaagcacgtgcctagcaaaaaaaggctgcttaagttcgagtcttgtgggaagatcctgaaacaaaatttagatctgccagaccactcacgaaactgtgtgaagcgcaagagtgatgcagccaaagagcataaaaagagcttcaatcattccctttctgatacgagaaaaggaaagaagcagacaggtaaaaagcatgaaaaactgtccagccattcctcaagcgataagtgcaacaagaccgggaaaaagcacgataagctctgctgccatagctcttctcacattaagcaggacaagatccaaacaggagaaaagcacgagaagtctccgagcctgagtagtagtacgaagcatgagaagccacaggcatgcgtgaaaccatacgagtgcaaccagtgtggaaaggttttatctcataagcaggggctgatcgaccaccagcgggtgcataccggcgagaagccctatgaatgtaatgaatgtggcatcgccttcagtcagaaatcccacctggttgtacatcaacgcacacatactggcgaaaagccatacgagtgtatccagtgtgggaaggcccacggacataaacacgctctaaccgatcacctgagaattcacacaggtgaaaagccttacgagtgtgcagagtgtggcaagacattcagacactcctcgaacctcatccagcacgttagaagccacaccggagagaagccttatgagtgcaaagaatgcggcaagtccttccgctacaattcctcccttaccgaacacgtcagaacccacaccggcgaaatcccctacgagtgcaacgaatgcggcaaggcctttaaatactccagttctcttaccaaacatatgcggatccataccggggagaagccatttgaatgtaacgagtgcggcaaagccttcagtaaaaaaagtcacctgatcatccaccaacgcacccacactaaggaaaagccttacaagtgcaatgagtgtggcaaggcgtttggccacagttcttctcttacgtaccacatgcgaacacataccggtgagagtccctttgagtgcaatcagtgtggcaagggatttaaacagatcgaggggctcacccaacatcagagggtccacacaggtgaaaagccatacgagtgcaatgagtgtgggaaggccttttcacagaaatcccacctgattgttcaccagagaactcacaccggagagaaaccgtacgaatgcaacgagtgtgagaaggcattcaatgcaaaatctcaattggttatccatcagaggtcacacaccggtgagaaaccttatgagtgtaatgaatgcgggaaaacattcaaacagaacgcctctctgacaaagcacgtgaagacacactcggaggataaatctcacgaatag

SEQ ID NO: 212199 - DNA, 1938 bp, synthetic construct
  misc_feature 1..1938: note = Description of Artificial Sequence: Synthetic coding sequence
  source 1..1938: mol_type = other DNA
atgagcgtgagcagcggcgtgcagatcctgaccaagcccgagaccgtcgaccgccgtagatccgctgaaacaaccaaggaggctggcagacctctcgaaatggccgtatccgaacccgaagccagcgcagcagtgtctgtcaccttcaagcatgtgacaatggcctttacgcaaaaagagtggaaacaactggacccagcccagagcaatctgtataatgatgttatgctcgaaaactactgtaatcaggcctccatggggtgtcaggccccaaaacctgatatgatctccaagctggagaagggagaggccccctggctggggaagggaaagcggccgtcccagggttgcccatctaagatcgcccgcccaaaacagaaagagaccgacggaaaagttcagaaggacgatgatcagctcgagaatatccagaagtcacagaacaagctccttcgtgaggtagctgttaaaaagaaaactcaggcaaagaaaaatggctccgattgcggaagccttgggaagaagaacaacctgcacaagaagcacgtgccatccaagaaacggctccttaaattcgaatcctgtgggaaaatattgaaacaaaacctggacctgccggaccattctaggaattgtgtgaagcgaaaatcagacgcagcgaaggaacataagaagagttttaatcacagcttgtctgacacacggaaaggcaagaagcagaccggtaagaagcatgaaaagttatctagtcactctagctccgacaaatgtaacaagaccggaaaaaaacacgataaactgtgctgtcactccagctctcacattaagcaggacaagatccagacgggcgagaaacacgaaaagtctccatctctctcatcatcaaccaagcacgaaaagccccaggcttgtgttaaaccctatgaatgcaatcagtgtggcaaagtgctgtctcataagcagggcctgatcgatcatcagagagtgcatacgggcgagaagccatacgagtgtaacgagtgtgggatcgcattcagccagaagagtcatctggtggtccaccagcgcactcatacaggggaaaagccatatgagtgtatacagtgtggcaaggcgcacggtcataaacacgctctgacagaccacctgaggatccatacgggtgaaaagccctatgaatgtgccgagtgtggcaaaaccttccgtcattcctccaatttgatccagcacgtcaggtcacacactggcgagaaaccttacgaatgtaaggagtgtggaaagagtttccgatacaacagctcactcacggagcacgtacgtacacacacaggtgaaattccgtacgagtgcaacgagtgcggcaaagcgtttaaatattcttcctcactgacaaaacatatgagaatccacacaggcgagaagccctttgagtgcaatgagtgcggtaaggcttttagcaagaagtctcacctaatcattcaccagcggacgcataccaaggaaaagccctacaaatgcaacgaatgtggtaaggcattcggacattcctccagcttgacttaccatatgagaacgcataccggcgaatccccttttgagtgcaaccagtgtgggaagggctttaaacagatcgaaggactaactcagcaccagagagtgcatactggcgagaaaccttacgagtgcaatgagtgcgggaaggcatttagtcaaaagtcccatctgattgtgcaccaacgcacacatactggtgagaaaccctatgaatgcaacgagtgtgagaaagcattcaacgctaaatcccagctggtgatccaccagagatcacacacaggagagaagccctacgaatgtaacgagtgcggcaagacctttaaacagaatgccagcttgaccaaacatgtcaaaactcactctgaggataagtcccacgagtag

SEQ ID NO: 212200 - DNA, 1896 bp, synthetic construct
  misc_feature 1..1896: note = Description of Artificial Sequence: Synthetic coding sequence
  source 1..1896: mol_type = other DNA
atgagcgtgagcagcggcgtgcagatcctgaccaagcccgagaccgtggatcgcaggcggtccgctgagaccacaaaggaagccggacgcccactggaaatggcagtttcagagccagaagcgagcgctgccaaggagtggaaacagttggacccggcacagtccaatctgtacaacgacgttatgctcgagaattactgtaatcaggcctcaatgggatgccaggcacccaagccagacatgatttctaagttggaaaaaggggaagccccttggctcggcaaaggcaagagaccgtcccagggatgtccgtccaaaatcgcccgaccaaagcaaaaggagactgacgggaaggtacagaaagatgatgatcagctcgagaacattcagaaaagccagaacaaattactgagagaggtcgccgtcaagaagaaaacccaagccaaaaaaaacggatctgattgtgggtcactggggaagaaaaataacctgcacaagaaacacgtgccttcaaagaaacgtctactgaaattcgaatcctgtggcaaaatactgaaacagaacctagaccttcccgaccactcacgcaactgtgttaagcgcaaatcagatgccgccaaggaacacaaaaagtcatttaatcactccctgtccgacactagaaaaggcaaaaagcaaacagggaaaaaacacgaaaagctgtcttcacatagcagcagtgacaagtgcaataagaccggaaagaagcacgataagctttgttgccatagttcgtcacacatcaaacaggacaagattcagacaggcgaaaagcacgagaagagcccttctctgagctcgtcaaccaagcatgaaaagccacaggcttgtgtgaaaccatatgagtgcaaccagtgcgggaaggtattgtcccacaaacaggggctcatcgaccatcagagagtgcacacaggagaaaagccatatgagtgtaacgagtgcggcattgcattttctcagaagagtcacctggtcgttcatcagaggacccacacgggcgagaagccgtacgaatgtatccagtgtggcaaagctcatggccataagcacgcactaactgatcacttacgaatccataccggcgagaagccttacgagtgtgctgagtgcggcaaaactttcagacatagctctaaccttatacagcacgtccggtcccatacaggggagaagccctacgaatgcaaggaatgcggcaagagttttagatataactcatctctgaccgaacacgtgagaactcacactggcgaaatcccatatgaatgtaacgagtgcggcaaggcatttaagtactccagctccctcactaaacacatgaggatccatactggggagaaaccatttgagtgcaacgagtgcggtaaagccttttctaagaaatcccatttaattatccatcagaggacacacaccaaggaaaaaccttataaatgtaacgaatgcggaaaagcgttcggacacagttcctctctaacgtaccatatgaggacccacaccggagagtcgccgttcgagtgtaaccaatgcggaaaggggtttaaacaaattgaaggactgacccagcaccagcgcgttcatacaggcgagaagccatacgaatgcaatgaatgtgggaaggcgtttagccagaagtcccaccttatcgtacaccagcgcacccacaccggggaaaaaccgtacgaatgcaacgaatgcgaaaaagcgttcaatgcgaaatcccaattggtgatccatcagagatcacatactggtgagaaaccttatgaatgcaacgagtgtggaaagacattcaaacaaaacgctagcttgactaaacacgttaaaactcactcggaagataaatcccacgaatag

SEQ ID NO: 212201 - DNA, 1653 bp, synthetic construct
  misc_feature 1..1653: note = Description of Artificial Sequence: Synthetic coding sequence
  source 1..1653: mol_type = other DNA
atgcccctgcagggcagcgtgagcttcaaggacgtgaccgtggacttcacccaggaggaatggcaacagctggatccagcccagaaggccttgtatcgtgatgttatgcttgaaaactactgccacttcgtaagcgtgggctttcacatggccaaacctgatatgattcgtaagctggagcagggggaagaactttggacacaaagaatttttccttcctacagctatctagaggaggatggaaaaacagaggatgttttggtgaaattcaaggagtatcaagataggcactcccggcctttaatcttcattaatcacaaaaaactcataaaggagcggagcaacatctacggaaaaacgttcacactcggcaagaaccgcattagcaagacgatcctctgcgagtacaagcctgacggaaaggtgcttaagaatatcagcgaattagtaataagaaatatttccccaattaaggaaaaattcggagattcaactggctgggagaagtccctgcttaacaccaagcacgaaaaaattcaccccgcagtgaacttacataaacaaacggagcgggtgctctccggcaaacaggagctgatccagcaccagaaggtgcaggcaccagaacagccttttgatcacaatgagtgtgagaagtcctttctgatgaaaggtatgctgttcacccacacacgcgcccaccggggggagcggaccttcgagtataacaaggatggcatagcattcatcgagaagtcctcgctctctgtacatccaagcaatctgatggagaagaaaccatctgcctataacaagtacgggaaattcctctgccgcaaacctgtatttatcatgccccagcgcccacagacagaagagaagccctttcactgcccgtattgtgggaacaacttcagaaggaagtcttatcttatagaacaccaacgcattcatactggagaaaaaccttatgtgtgtaaccaatgtggtaaagctttcaggcaaaaaacagctcttacactgcatgaaaagactcacattgaggggaaaccttttatttgtatcgactgcgggaagtcatttagacaaaaagcgactctcactagacatcacaaaactcacaccggcgaaaaggcttacgagtgtcctcaatgtgggtccgccttcaggaaaaagtcgtacttgatcgatcatcagcggactcatacaggggaaaaaccctatcagtgtaatgaatgcggcaaagcctttatccagaaaactacactgaccgtgcatcagcggacccatacaggcgagaaaccttatatctgcaacgagtgtggtaaatctttttgtcaaaagaccaccttaacactacaccaacggatccacactggcgagaagccctatatttgcaatgagtgcggaaaaagctttagacaaaaagcaattctgacagtccatcaccgcattcataccggggagaaatccaatggttgtccacaatgcggaaaagcattcagccgtaagtcaaacttaatccggcaccaaaagacccatactggtgagaaaccttacgagtgcaagcagtgcgggaaatttttcagctgtaagtctaacctcatcgtacatcaaaaaactcacaaagtcgagacaaccggaatacaatag

SEQ ID NO: 212202 - DNA, 1650 bp, synthetic construct
  misc_feature 1..1650: note = Description of Artificial Sequence: Synthetic coding sequence
  source 1..1650: mol_type = other DNA
atgagccagggcagcgtgagcttcaaggacgtgaccgtggacttcacacaggaggagtggcagcaactggacccagcacaaaaggccctatatagagacgttatgctagaaaactactgccactttgtcagtgtgggcttccacatggcaaaacctgacatgatcagaaaactggagcagggggaagagctgtggacccagcgaatatttccgtcatattcttacctggaggaggacggaaagaccgaagacgtattggtgaagtttaaagagtaccaggatcggcactcaaggccacttatctttatcaatcacaagaaactcattaaagaacgctccaatatctatgggaagacattcactctcggcaaaaataggatttctaagaccattttgtgcgaatataagcccgatggcaaggttttgaaaaacatcagtgaattggtcatcaggaatatctctcctatcaaagagaaatttggcgatagtacagggtgggaaaaaagccttctgaatacaaagcacgagaaaatccaccccgcagttaatctgcataagcagaccgagcgcgtcctctcgggaaagcaagagctgatccagcaccagaaggtgcaagccccggagcagccttttgatcacaacgagtgcgagaaatcgtttctgatgaagggcatgctgttcacccacactagggctcacaggggggagcgcacgttcgagtataacaaggacggcattgcgtttatcgagaaaagtagcttgtccgtacacccgtccaatctcatggagaagaaacctagtgcctataataagtatggtaagtttctgtgtcgtaaacccgtgttcatcatgccacaaagaccacagactgaagaaaaaccttttcattgtccttattgtggcaacaatttccggcgaaagagctatctcatcgagcatcagagaatccacacaggggagaaaccctatgtctgtaatcagtgtgggaaagccttcaggcagaaaaccgcacttactctacatgagaaaacgcacatcgaaggcaagccatttatttgtattgactgtggcaaaagctttaggcagaaggccaccctgacccggcaccataagacgcacactggggagaaggcctacgaatgtccacagtgtggcagcgcttttagaaagaagtcctacttgatcgaccatcagagaacccataccggagagaaaccctaccagtgcaacgaatgcggcaaagccttcatacagaagactaccctgactgtccaccaaagaacacatactggtgaaaaaccttatatctgcaacgaatgcggcaagagcttctgtcagaagacgaccctcacccttcaccagcgcatacacaccggggaaaagccgtacatttgcaacgagtgtggcaagagcttccggcagaaggccatcctcacagtgcaccacaggattcacactggtgagaaatcaaacgggtgcccacagtgcggcaaggcctttagtagaaagtcaaacctcattcgtcatcagaagacccatactggagagaagccatacgaatgcaaacagtgcgggaaattcttctcttgtaaatccaatctcatcgtccatcaaaagactcacaaggtggagaccaccgggatccaatag

SEQ ID NO: 212203 - DNA, 1503 bp, synthetic construct
  misc_feature 1..1503: note = Description of Artificial Sequence: Synthetic coding sequence
  source 1..1503: mol_type = other DNA
atggaggagagccacttcaacagcaacccctacttctggcccagcatccccacagtgagcggccagatcgaaaatacaatgttcataaacaagatgaaggaccaactcttgcctgagaaaggttgtggcttggcacctccgcactatcctaccttgctcaccgtgcctgcatccgttagcctgccatccgggattagtatggacacagagagcaagtcagaccagctaaccccccactcacaggcgtccgtgacacaaaatatcactgtcgtccctgtgccatctacaggcctcatgacagccggtccaggcctggtcatcacttccccgtccggatctctggtaacaacagcaagctcagcccagacattcccgatctctgccccaatgatcgtaagcgctctgccacccgggtcccaggctctacaggtggtgcctgacttgtctaagaaggttgcgtccactttaactgaggagggaggcggaggcggtggaggcggtggtagcgtggcaccaaaacccccacggggtaggaagaaaaaacggatgctggagtcaggcctccctgagatgaacgatccctatgtgctgtctcccgaggacgacgatgatcaccagaaggacggtaagacataccgctgtcggatgtgttctctcacattctattccaaaagcgaaatgcaaatccactcgaagtcacacaccgaaacaaagccgcacaagtgtcctcactgcagtaaaactttcgccaattcctcctatcttgcccagcacatccgcattcattccggcgctaagccttactcctgtaatttctgcgagaaatcatttagacagctttcgcatctccagcaacatactcgtattcatacaggagacaggccatataagtgcgcccaccctgggtgtgagaaagcatttacccaattatctaacctgcaaagtcacaggcggcaacataataaagacaagccctttaaatgccacaattgtcatagagcttacactgatgcagcaagtctggaggtccacctatccacccacaccgtgaaacacgccaaggtatatacatgcaccatctgcagtcgggcatacacttctgagacttacctgatgaagcatatgcggaagcataacccccctgacctgcagcagcaggtacaggccgcagccgctgctgccgcggttgcacaggctcaggctcaggcccaagctcaggcccaggcccaggcacaggcccaggcgcaagctcaggcatcgcaagcctcacaacaacagcagcagcagcaacagcagcagcagcagcagcagcaacagccaccaccccacttccaatccccaggcgcagccccccagggaggcggcggcggcgacagcaacccgaatccaccccctcagtgttcctttgatttaactccatataaaacagcagagcaccataaagacatttgtctaacagttactacgtcaacaatccaggtggaacaccttgcctcctcctag

SEQ ID NO: 212204 - DNA, 1734 bp, synthetic construct
  misc_feature 1..1734: note = Description of Artificial Sequence: Synthetic coding sequence
  source 1..1734: mol_type = other DNA
atggaggagagccacttcaacagcaacccctacttctggcccagcattccgaccgtatccggtcagattgaaaatacaatgtttataaacaagatgaaggaccaactgctccctgagaagggttgcgggctcgcccccccccattatccaactctgcttaccgttcccgctagcgtgtcactaccaagtggtatcagcatggatacagaatctaagtcagatcagctcacaccccacagccaggcttctgtgactcagaatatcactgtagtgcccgtgccctcaactggcctcatgacagccggggtcagctgctcccaaaggtggaggagagagggcagtcagtccagaggaccaggtttggtgattacctccccctccggttccttagtgacaaccgctagcagtgcccagactttccccatctcggctcctatgatcgtgagcgccctgccccctggctcacaggctctccaggtggtccccgatctgtccaaaaaagtcgccagcacccttacagaggaagggggggggggaggcggaggcgggggctcggtggcacccaaaccaccccgcggtcgcaagaaaaagaggatgctcgagtcaggccttcccgagatgaatgatccatatgttctgtccccagaggatgatgacgatcatcagaaagacgggaagacctaccgttgtcggatgtgcagcctcaccttctactctaagagcgagatgcagattcactctaagtcacacaccgaaaccaaaccacataaatgcccgcattgttcaaagacctttgctaacagctcctaccttgcccagcatatacggatccactcgggcgctaagccttactcttgtaatttttgcgaaaagagcttccggcagctgtcacacctccaacagcacacaaggatccactcaaaaatgcataccgagacaatcaagccccacaagtgcccacactgttcaaagacgttcgccaatacaagttatctggcccagcacctgaggattcactctggtgcgaagccatataattgttcctattgccaaaaagcctttcgtcaactttctcacttacaacagcacaccaggatccacaccggagaccgaccgtacaaatgcgcccaccctggttgtgagaaagccttcactcagctgagcaatcttcaatcccataggcgccagcataataaggacaagccctttaagtgtcacaactgtcacagggcatacactgatgctgcatcactggaggttcatctctctacacatactgttaagcacgcgaaggtttacacttgcaccatatgctcacgcgcatacacctccgaaacataccttatgaaacacatgcgtaaacataatccacctgatttacagcaacaagtccaggcagccgccgcggccgccgcagtggcccaggcgcaagcccaggcacaggctcaggctcaggcccaagctcaagcccaggcgcaggcccaggccagtcaagcgagccaacagcaacagcagcagcagcagcagcaacagcagcagcagcagcaacctccccctcacttccagagtcccggggccgcccctcaggggggggggggcggagactcaaaccctaacccccccccacagtgcagtttcgacctgactccgtacaagaccgccgagcatcataaggatatctgtcttactgtcacaacaagcacaatccaagtggagcacttggcatccagctag

SEQ ID NO: 212205 - DNA, 1551 bp, synthetic construct
  misc_feature 1..1551: note = Description of Artificial Sequence: Synthetic coding sequence
  source 1..1551: mol_type = other DNA
atggaggagagccacttcaacagcaacccctacttctggcccagcattcctaccgtgtctggccagattgagaacaccatgttcattaacaagatgaaagatcagcttctgccggagaaaggctgcggcttggcccccccccattatcccactctcctcacagttccagccagtgtgtctctgcctagcggtatttcaatggatactgagtcgaaatctgatcagctgactccccacagtcaggcctccgtgacgcaaaacatcactgtcgtgccggtgcctagcaccggcctgatgactgccggagtcagctgtagccagcgttggcgcagagaaggctcccagtctagaggccctggcctcgttattacttcccccagtggctccttagtaactaccgcttcttctgcccagacatttcctatctctgctccaatgattgtgtcagcactgcccccaggtagccaggcactccaggtggttcctgacctcagcaagaaggtggcatccaccctgacagaagaagggggtggggggggcggaggagggggctccgtcgcaccaaaaccacctagaggacgcaagaaaaagcgtatgttggaatccgggttgcctgagatgaacgatccttacgttttatctccggaagacgacgacgatcaccagaaagatggcaagacgtaccgctgccgcatgtgttctctgactttctactctaagtcggagatgcagattcacagtaaatctcatacagaaacaaagccccataagtgcccgcattgttctaagacattcgccaactctagctatttggctcagcatatcaggatacattctggagcaaaaccgtacagttgcaatttctgcgagaaatcatttaggcagctgtcccacctacagcaacacaccagaattcacacgggcgacaggccctacaagtgtgctcaccccggctgtgagaaagcatttactcagttaagcaacctacaatcacaccgccggcagcacaataaggacaaacccttcaaatgccataattgccatcgggcttacactgatgcagccagcctggaggtacacttgagcacccatacggtcaagcacgccaaagtgtatacttgtaccatttgctcccgcgcatatactagcgagacttacctaatgaaacacatgcggaaacataatcctcctgacctccagcagcaagtgcaagcagccgctgcggctgctgccgtggcccaggcccaagcccaggcccaggcacaggcgcaagcacaggctcaggcccaggctcaggctcaggccagccaggcatcccagcagcagcaacaacagcagcagcagcagcagcagcaacaacagcagccgccaccccactttcagagtccgggggcagcacctcaaggcggtggcggaggggacagtaacccaaacccacctccccagtgtagttttgatctcaccccgtacaagaccgcagaacatcataaggatatatgtcttacagtcacaacaagcactatccaagtggagcacctggcctcctcctag

SEQ ID NO: 212206 - DNA, 1551 bp, synthetic construct
  misc_feature 1..1551: note = Description of Artificial Sequence: Synthetic coding sequence
  source 1..1551: mol_type = other DNA
atggaggagagccacttcaacagcaacccctacttctggcccagcattcccacggtttccgggcagattgaaaacaccatgtttattaataagatgaaagatcagctgctgcccgagaaaggttgtggcctcgcgcccccccactatccaacactcttaacagtgcctgcgtcggtgtccttgccctcaggtatctctatggatacagagtccaagtcagatcagttaacacctcactctcaggcctctgttacacagaatatcactgttgtgccagtaccgagcacagggctgatgaccgctggtgtgtcttgctcacagaggtggcggcgggagggttcacagtcacgtggccccgggttggtgattacgtctccttcaggctcactcgtgactactgcctcatcagctcaaaccttccccatctccgcacccatgatagttagtgctctgcccccagggtcacaggccctgcaagtcgttcccgatctgagcaaaaaggtggcttctactctcaccgaggagggcggaggtggcggaggaggaggcggctcagttgctcctaaacccccacgggggaggaaaaaaaaacggatgctggagtctggcctgccagagatgaacgatccttacgtcctgagccctgaagacgacgatgaccaccagaaggacggtaagacatatagatgtcggatgtgttccctgacattctactcaaagagtgaaatgcagatccactcaaagagccatactgagaccaaaccgcacaagtgtcctcactgctctaagacttttgcgaattcatcctatcttgcacagcacattcggatacactccggcgccaaaccgtacagttgcaacttttgcgaaaaaagcttcagacagctttcccatctgcagcagcacacaaggattcacactggcgacagaccgtataagtgtgcccatcctggctgtgaaaaagcatttactcagcttagcaatctccagtctcatagaagacagcacaataaggataagccctttaagtgtcataactgtcatagggcatataccgatgcagccagcctcgaggtgcacttgagcacacataccgtcaaacatgccaaagtttacacttgcaccatatgttccagggcatatacgtctgagacttacttgatgaagcatatgaggaagcataatcctccggatctgcagcaacaggttcaggctgccgcggcagcagccgctgtagcgcaggctcaggcccaggcccaagcacaggcccaagcccaggcccaagctcaggctcaggcacaggccagccaggccagtcagcaacagcaacaacaacaacagcaacagcaacagcagcagcagcaacctccgcctcacttccagtcccccggtgctgctccgcaaggaggcggtggaggtgatagcaaccccaaccctcctccccaatgcagttttgacctcaccccctataagacagccgaacaccataaggatatctgcctcactgtaaccacttccacaattcaggttgagcatctggcctcaagttag

SEQ ID NO: 212207 - DNA, 1734 bp, synthetic construct
  misc_feature 1..1734: note = Description of Artificial Sequence: Synthetic coding sequence
  source 1..1734: mol_type = other DNA
atggaggagagccacttcaacagcaacccctacttctggcccagcatccctacagtgtccggacagatcgaaaacaccatgtttatcaataagatgaaagaccaactactgcccgaaaagggttgcggattggctccgccacattaccccactttactgaccgtccctgcgtcagtgtccttgccgagcggcattagtatggatacagagtctaagtccgatcagctgacacctcatagccaagcatccgtcactcagaatatcacagtagtaccagtcccatccaccggcctcatgacagcaggagtttcgtgctcccagagatggaggagggaagggtctcagtcacgcggcccaggcctagtaatcacgagcccaagcggttccctggtcactacagcctcatccgcccagacatttcctatcagcgcccccatgatcgtgtccgccttgccaccaggatcgcaggccttgcaggtggttccggatctgtccaaaaaagtggctagtaccctcacagaggaaggtggtggcggcgggggtggaggcggcagcgtggcccctaagccaccacgcgggcgcaaaaaaaagagaatgttagagtcaggcttacctgaaatgaacgacccttatgtcttgtcccccgaagatgacgatgaccaccagaaggatggtaagacataccgctgtagaatgtgtagtttaaccttttacagcaaatctgagatgcaaatccactccaagagtcacaccgagacaaaaccccacaaatgtccccactgctcgaagacgttcgccaatagttcatacctggcacagcatataagaatccattctggggccaagccatacagctgtaacttctgcgaaaagtcctttcggcagctgagccacctgcagcagcacacccgcatccatagcaagatgcacacggagacgatcaagccacacaaatgtccccattgcagtaagactttcgcaaacacctcttacctagcccagcacctacgcattcattcgggggccaagccctataattgttcttactgccagaaggcctttaggcagctcagtcatctgcagcagcataccagaatccacacaggagacaggccatacaaatgtgcccatcccggctgtgagaaagcctttacacagctgtcgaacctacagtctcaccgtcgccagcacaacaaggacaaacctttcaagtgtcacaactgccaccgagcttatacagatgctgcatccctggaggtgcacctttctacacacactgtgaagcatgccaaagtgtacacctgtactatttgctcccgcgcttatacctccgaaacctatctcatgaagcacatgcggaaacataatccaccagacttgcagcaacaggtgcaagccgccgccgccgctgccgcagttgcccaagcccaggcccaggctcaagcccaggctcaggctcaggcccaggcgcaggctcaggcccaggcatctcaggcatctcagcaacagcagcaacagcaacaacagcagcaacagcaacagcagcagcctcctcctcactttcagtcacctggcgccgccccgcagggcggaggaggaggggattccaaccctaatccacctcctcaatgttcttttgaccttacaccctacaaaaccgctgaacatcataaagacatctgcctcacagtgacgacctcaaccatccaagtggagcacctcgcctcatcctag

SEQ ID NO: 212208 - DNA, 1008 bp, synthetic construct
  misc_feature 1..1008: note = Description of Artificial Sequence: Synthetic coding sequence
  source 1..1008: mol_type = other DNA
atggaggagagccacttcaacagcaacccctacttctggcccagcatccccacggtttcgggccagatcgagaataccatgtttatcaacaagatgaaggatcagttgcttcctgaaaagggctgcggactagccccgcctcactatccgacactcctgaccgtgccagcctccgtctccctgccctctggcatctctatggacactgagagcaaatctgatcaactgactcctcactcccaggcttctgtgacccagaacatcaccgtggtgccagtgcccagcaccgggctgatgaccgcgggggtctcatgctctcagagatggagaagggagggctcccagagccgtgggcctgggcttgttataacttcaccatctggcagtcttgtgacaactgcctcctcagcccagactttccccatatctgcacctatgatcgtgtcagctctaccgccgggctcacaggccctacaggttgtacccgatctctccaagaaggttgccagtacactgactgaggaggggggagggggcgggggtggcgggggttccgtcgcccctaagccccctcgagggcggaaaaagaagagaatgttggagtccggcctgccagaaatgaacgacccctatgttttgtcaccagaggatgatgacgatcaccagaaagatggcaagacttaccgcagcgagggtaattgcggcacaggcaacgggcagtcactgggactgatggactccgtgcctgggtctacaacaaacctgctttgcgatcccggctgccgcatgtgcagcttgactttttattcaaagagcgagatgcaaatacacagtaagagccatactgaaacaaaaccccataaatgcccccactgcagcaagaccttcgcgaattcctcttacttggcccagcatatccgcattcattccggggcgaaaccatattcctgcaacttttgtgagaaatcttttcggcagctctcccacctacagcagcatacacgctag

SEQ ID NO: 212209 - DNA, 834 bp, synthetic construct
  misc_feature 1..834: note = Description of Artificial Sequence: Synthetic coding sequence
  source 1..834: mol_type = other DNA
atggaggagagccacttcaacagcaacccctacttctggcccagcattcctactgtatcaggccaaatagaaaatactatgtttatcaacaagatgaaagaccagctactacccgagaaaggctgtggattggctccaccgcactaccccacactgctgactgtgcccgccagtgtatccctgcccagcggtatctcaatggataccgagtcaaaatccgaccagctgaccccacacagtcaggcgtctgtgacacagaacatcaccgtagttcctgttccctcaactggacttatgacagcaggcccaggcctcgtgataacctctccatctggttctttggtaacgactgccagctcagcacagacctttccgatcagcgctcctatgattgtcagtgccctccccccagggtctcaggcgttacaggtggtcccagatctgtcaaaaaaggtggcatcaacactgactgaagaagggggtggaggtgggggcggaggcggatccgtggcgccaaagccgccccggggccggaaaaagaagagaatgctggagtccgggcttccggagatgaacgacccgtatgttctgagccctgaggacgacgacgatcaccagaaggacggtaagacctaccggtgtaggatgtgcagcctgacattctatagcaagagcgaaatgcagatacattccaagtctcacaccgaaacaaaaccacacaagtgtccgcactgctccaagacctttgcaaattcctcatatctagcccagcatatccgcattcacagtggcgccaaaccctattcatgtaatttctgtgaaaaaagcttctag

SEQ ID NO: 212210 - DNA, 1386 bp, synthetic construct
  misc_feature 1..1386: note = Description of Artificial Sequence: Synthetic coding sequence
  source 1..1386: mol_type = other DNA
atggaggagagccacttcaacagcaacccctacttctggcccagcataccgaccgtgtcaggtcagattgagaacacaatgtttatcaataaaatgaaggatcagcttctcccagagaaaggctgtggcctggcaccaccacattaccccacgttgctgacggtgcctgccagcgtgtcacttccatcagggatcagcatggataccgaaagcaaaagcgatcaattgaccccacactcgcaggctagcgtcacacagaacataaccgtggtccccgtgccaagcacaggcttgatgacagccgccctgcaagtggttccagacttatccaagaaggtggccagtaccctcacagaagaggggggcggcgggggcgggggcggaggatcagtggcgcccaagccgccacgagggagaaagaaaaaaagaatgctagagtcagggctgcccgaaatgaatgatccctacgtcctctcccccgaagacgacgacgaccatcagaaggatggcaaaacttaccggtgtaggatgtgctcactgaccttctactccaagagcgaaatgcagatacacagcaaatctcataccgagacaaaaccccataagtgcccacactgctccaagaccttcgcaaatagctcatatctcgcccagcacatccggattcattcaggggccaaaccttattcctgtaacttctgtgagaagtctttcaggcaactctctcatttgcagcagcacactcgcattcacaccggggacagaccttataaatgtgcccatcctggctgcgaaaaggcattcacccagctgtcaaacctgcagagtcacagacgacagcacaacaaagataaacctttcaagtgtcacaactgtcatcgcgcgtatacagatgccgcgagcctggaggtgcatttgtcgacgcacactgtaaaacacgctaaggtctacacatgcactatttgctctagggcctataccagtgagacatatctgatgaagcacatgcgtaaacacaatcctccagatctgcagcagcaggttcaggccgctgccgctgcggcggccgtggcccaagcccaggcacaggcgcaggctcaagctcaagcccaggcgcaagctcaggcacaggctcaagccagccaggcctcacagcagcagcagcaacagcagcaacaacaacagcagcaacagcagcagcctcctccacactttcagtcccctggcgcagcgccacagggggggggcggcggggatagcaatcctaaccccccacctcagtgctcttttgacctgacaccctataagacggccgagcatcacaaagacatctgccttacagtcactacgtccaccatccaagtggagcaccttgcctctagctag

SEQ ID NO: 212211 - DNA, 1161 bp, synthetic construct
  misc_feature 1..1161: note = Description of Artificial Sequence: Synthetic coding sequence
  source 1..1161: mol_type = other DNA
atgatcctgggcagcctgagccgggccggccccctgcccctgctgagacaaccgcctattatgcagcctcccctcgacctgaagcagattcttccgtttcctctcgaacctgccccgaccctcggtctgttttctaactactcaacaatggatcctgtacaaaaagctgtcctgtcccacaccttcggtggaccacttctcaaaactaagaggccggtgatttcttgtaatatctgccagatcagatttaatagtcaatcccaagctgaggcacactacaaggggaacagacatgctcggcgtgtgaagggcattgaagccgccaagactcgcgggagggagcccggagtacgtgagcctggtgacccagcccctcccggctctactccaaccaatggagatggagtggccccccgacccgtgtccatggagaacggactgggacccgccccaggatcacccgaaaagcagcctggcagcccttctccaccatccattccggaaacaggacaaggggtgaccaaaggggaggggggtacacctgccccagccagtcttcccggggggtcaaaggaagaggaagaaaaggctaagcggcttctgtactgtgccttgtgtaaagtggcagtcaattctctgtcccagctggaggctcacaataaaggaactaagcataaaacaattcttgaggctcggagcggtctcggccctatcaaagcctacccaaggctgggacctcccacccctggggagcccgaggctccagcgcaggataggacctttcattgtgagatctgtaacgtgaaagtaaattctgaggttcagctgaagcaacacatcagtagcagaagacaccgggacggcgtggccggcaagcccaacccactattgtcacgccataagaagagtcggggcgctggcgaactcgctggaactctgacgttcagtaaggagctcccaaaaagcctggcaggcggacttttaccgtcacctctcgccgtcgccgcagtgatggctgcagccgctgggtcgcctctgtctctgcgtcccgcgccagctgctcctctgctgcagggacctcccataacacatcccctcctgcaccccgccccaggtccgattcgtaccgcccacggtccgattctcttctccccatattag

SEQ ID NO: 212212 - DNA, 918 bp, synthetic construct
  misc_feature 1..918: note = Description of Artificial Sequence: Synthetic coding sequence
  source 1..918: mol_type = other DNA
atgatcctgggcagcctgagccgggccggccccctgcccctgctgagacagccacccattatgcagccccccctggatctgaagcaaatcctacccttcccgctggagccagccccaaccctgggactattctccaactactccaccatggaccccgtgcaaaaggctgtattgagccatacattcggaggacccttgctcaaaactaaaagacccgtgattagctgcaatatctgccagatccgtttcaactcacagtcgcaggccgaggctcattacaagggcaatagacacgcaagaagggttaagggcatcgaggctgctaagacccgcggcagagagccaggtgtgcgagagcccggggatcctgcaccacctggatccactccaaccaatggggatggagtcgcccctcggcctgggacaaagcataagaccatactggaagctcgatctggcctcggtccgattaaggcctacccccgcctgggccctcctacaccaggcgagccagaggctcctgcacaagaccggacctttcattgcgagatctgtaatgtgaaagtgaatagcgaggtgcagttaaaacagcacatctcatccaggagacaccgtgacggcgtggccggaaagccaaacccactactgtcaaggcacaagaaaagtcggggcgcaggggagctagctggcacactgacattttcaaaggagctgccaaagagcctggccggtggtttgctgccctcgcccttagctgtagctgctgtcatggccgctgccgcgggaagtcccctctccctgcggcctgcacctgctgcccctctcctccagggcccaccgatcacgcatccactgttgcaccctgccccgggacccatcagaacagcccatggccccattttattctctccgtattag

SEQ ID NO: 212213 - DNA, 1101 bp, synthetic construct
  misc_feature 1..1101: note = Description of Artificial Sequence: Synthetic coding sequence
  source 1..1101: mol_type = other DNA
atgcagccccccctggacctgaagcagatcctgcccttccccctggaacctgcccccaccttgggactcttctccaactactctaccatggacccagtccagaaggcagtgcttagccacaccttcgggggtcccttgctcaagactaagcgcccagtgatctcatgtaacatctgtcagatcaggttcaacagtcaaagtcaggcagaggcccactacaaaggaaacagacacgcccggagagtcaagggaatcgaggccgcgaagactcgagggagggagcctggagtccgtgagccaggagatcctgcccctcccggctctacacccactaacggcgatggggtggcgcccagacccgtgtcaatggagaacggactaggacctgcgccaggatcccctgagaagcagcccggatcgcctagcccaccaagtattcctgagacgggccagggggtcaccaagggagaaggaggcaccccagctcccgcctccctgccagggggaagcaaggaagaggaggaaaaagcaaagcgactgctctattgcgcactttgcaaggtagcagttaactcgctctctcaacttgaggctcacaacaaaggaacaaagcacaaaacaattctggaggctcgtagcggcctcggacccatcaaagcctaccccaggctggggccgccgacacccggcgaaccagaggcaccagcgcaggatagaacctttcattgcgagatctgtaatgtcaaggtgaattcagaggttcagttgaagcagcatatttcaagccggcgccatagagatggggtcgctgggaaacccaatccattgcttagccgtcataagaagtcgcgtggagcaggagaactcgccggtacattaactttttccaaggagctgcccaagtctttggccggtggactactaccttctccactcgccgttgccgcggtgatggctgctgccgcaggttcaccgctttcccttagaccagctcctgctgcgcctctgctacaggggccgccgatcacccaccctctccttcaccccgctcctgggcctatccgtacagcacatgggccgatccttttcagcccctactag

SEQ ID NO: 212214 - DNA, 699 bp, synthetic construct
  misc_feature 1..699: note = Description of Artificial Sequence: Synthetic coding sequence
  source 1..699: mol_type = other DNA
atgcagccccccctggacctgaagcagatcctgcccttccccctggagccagccccgactctaggcctgtttagtaattacagcacaatggacccagttcagaaagctgtgcttagtcacacattcggaggccccttgttgaaaacaaagcgacccgtcatctcctgcaacatctgtcagatcagattcaatagccagagccaagccgaggctcattacaaagggaacagacacgcccggcgggtgaagggcattgaggcggctaaaaccaggggacgggagcccggggtcagggagcccggggacccagcccctccaggatctacgcctactaacggggacggagtggctccaagacccgttagcatggagaatgggctgggtccagcacctggatctccagagaaacagccagggtccccttcacctccaagtatcccggaaacagggcaaggggtgaccaagggcgagggtggcactcccgctcctgcctctctgcccgggggatccaaagaggaggaagagaaggctaagcgtcttttatattgcgccctgtgtaaagtggccgtcaacagtttaagtcagctcgaggctcataataaggggacaaaacacaagacgattctggaggccagatcaggcctcggtcccatcaaggcctaccctcgtctcggcccacccactcctggtgagccatag

SEQ ID NO: 212215 - DNA, 1101 bp, synthetic construct
  misc_feature 1..1101: note = Description of Artificial Sequence: Synthetic coding sequence
  source 1..1101: mol_type = other DNA
atgcagccccccctggacctgaagcagatcctgcccttccccctggagcccgccccaaccttaggcctgttctctaactatagtactatggatcccgtgcagaaagccgttttaagccatacatttggagggcctctcctcaagactaaaagacccgtcatcagttgcaacatttgtcagataaggttcaatagtcagagtcaggccgaggcccactataagggcaatcgtcacgcccgccgtgtaaaagggatagaagccgccaaaactcgcggaagagaacccggagtgcgggagccgggggatccagcccctcccgggtccacccccacaaatggggatggtgtagcgccacgccccgtgagtatggagaacggcctgggacccgccccaggatcccccgaaaagcaacccgggagcccgtccccgccttccatcccagagacaggacagggcgtgaccaagggcgaaggaggtacgccggcacccgctagtctccctggaggcagtaaagaggaggaggagaaagctaagcggcttctctactgtgctctctgcaaggtagctgtaaattcgctaagtcaactagaggcgcataacaaaggcactaagcacaagaccatcctggaagcccggtcaggcctggggccgatcaaggcctatcctcgactcgggccacctaccccaggcgagcccgaagcaccagcacaggaccgaacctttcactgtgaaatctgtaacgtcaaagtcaactcggaggtgcagctgaagcagcatatctccagcaggcggcatagagatggggtggctggcaaaccaaatccgctcttgagtaggcataagaaatccagaggcgctggagaactggctggaactcttacattttcaaaggagctgcccaaatccctggcaggaggattgctcccaagtcccctggccgttgccgccgtgatggctgcggccgccggcagccccctctcacttagaccagctcctgcggcacccctcctacaggggccccccatcacacatcctctcctccaccccgcccctgggccaatccgcacagcacacgggcctattcttttctctccatattag

SEQ ID NO: 212216 - DNA, 498 bp, synthetic construct
  misc_feature 1..498: note = Description of Artificial Sequence: Synthetic coding sequence
  source 1..498: mol_type = other DNA
atgcagccccccctggacctgaagcagatcctgcccttccccctggagcctgcccccacactgggcctgttttccaactacagtaccatggacccagttcagaaggccgttctttcgcatacattcggcgggcctctcctgaagacaaagagaccagtcatcagctgtaacatttgccaaatccggtttaattcacagtcccaggctgaagcccattacaaagggaaccgtcatgcccggagagtcaagggcatcgaagccgccaaaactcgggggcgcgaacctggagtgagggaacctggggaccctgccccacctggctccacaccaaccaacggagatggcgtggccccaaggcctgtcagtatggagaatggcttaggcccggctcccggttcccccgagaaacaaccaggctccccaagtcccccatcaattccggagacaggccagggcgtgaccaagggagaaggaggaacaccggcccccgcctcctag

SEQ ID NO: 212217 - DNA, 438 bp, synthetic construct
  misc_feature 1..438: note = Description of Artificial Sequence: Synthetic coding sequence
  source 1..438: mol_type = other DNA
atgcagccccccctggacctgaagcagatcctgcccttccccctggaacctgctcctacattggggctgttcagtaattattccactatggaccctgttcaaaaggctgtgctttcccataccttcggcggaccactactgaaaacaaagcgaccggtaatatcatgcaatatctgtcagatccgttttaattcccaaagccaggctgaggcccattacaaggggaaccgtcacgcccggagggtcaaaggcatagaggctgcaaagacgagaggccgggagcctggcgtgcgcgaacctggcgaccctgcgccacctggttcaaccccaaccaacggggacggggtagcacctcgaccagttagcatggaaaacgggttagggccagcacctgggtcacccgagaagcagccaggctccccatctccacccagttag

SEQ ID NO: 212218 - DNA, 1101 bp, synthetic construct
  misc_feature 1..1101: note = Description of Artificial Sequence: Synthetic coding sequence
  source 1..1101: mol_type = other DNA
atgcagccccccctggacctgaagcagatcctgcccttccccctggaacccgctccgaccctagggctcttttctaactactctactatggatccagttcagaaggccgtactgtctcatacattcggcgggcccctcctgaaaacaaagcgtcccgttatcagctgtaacatttgtcagatcaggttcaacagtcagtctcaagccgaagcacattacaaaggtaatcggcacgctaggcgtgtaaaaggtattgaggcagccaagaccaggggtagagagcccggcgtcagagagcccggcgatccagcccccccgggtagtaccccgactaatggtgacggggtcgcacctaggcctgtgagcatggaaaacggcctcggcccagccccgggaagtccagaaaagcaacccgggtccccctcacccccaagcatccctgaaactgggcagggagttacaaaaggagaaggaggaacccctgctcctgcctccctccctggaggcagcaaagaggaggaggagaaagctaagcgtctgctgtactgtgcgctttgtaaggtagctgtcaattcattaagccaactggaagcacacaacaaaggcactaagcacaaaactatcttggaggcgcgatccggcttgggaccgatcaaggcatacccgagactcggacctcccacgcctggcgaaccagaagcaccagctcaggacaggacctttcattgtgagatttgcaatgtgaaagtgaacagcgaagtgcagctgaaacagcacatatctagccgccggcatagggatggagttgctggcaaaccaaaccccctcctgtctcgacataagaagtccagaggagccggcgagttagccggaaccctgacctttagcaaggagctgccaaaatctctggcaggcggcctgctgcctagcccgttggcagtcgcagcggttatggcagctgcagcgggctccccactgtcactgcgccccgcccctgcagctccgctgctccaagggccccccataacccaccctctgctgcaccccgcgcccggtccgattaggacagctcacggccctattctgtttagcccatactag

SEQ ID NO: 212219 - DNA, 858 bp, synthetic construct
  misc_feature 1..858: note = Description of Artificial Sequence: Synthetic coding sequence
  source 1..858: mol_type = other DNA
atgcagccccccctggacctgaagcagatcctgcccttccccctggaaccggctcctacccttggccttttcagcaattatagtactatggatccagtccagaaggctgtgctcagccacaccttcggcgggcccttactgaagacgaagcgtccagtgatttcctgtaatatctgtcagatacggttcaactcccagtcccaagctgaagcccactacaaaggtaataggcacgcacgtcgcgtgaaggggatagaagccgccaaaacaaggggccgcgaaccaggtgttcgggagccaggagacccggctccacccggtagcaccccgacgaatggagacggtgttgctcccaggcctggcacaaaacacaagactattctggaagcccgatctggcctgggaccaatcaaggcatacccaaggcttggtcccccaacgcccggcgaacctgaagcaccagcacaggatcgtacttttcattgcgagatatgcaatgtgaaagttaacagtgaagtccagctaaaacaacacatctctagtcggcgccatcgcgatggagtggcaggcaagccgaatccactgctcagcaggcataagaagtctagaggcgccggtgagctggcaggaacactcactttcagtaaggagctgcctaaaagcctggcgggcggactcctgccaagtccacttgccgtggccgcagtgatggcggcagctgctggcagccccctgtcactgcgcccagcaccagcagcaccccttctccagggcccccctatcacccatcctctactccaccccgcccctgggcccatccggaccgcccacgggcctattctgttcagtccctactag

SEQ ID NO: 212220 - DNA, 1110 bp, synthetic construct
  misc_feature 1..1110: note = Description of Artificial Sequence: Synthetic coding sequence
  source 1..1110: mol_type = other DNA
atgatgcagcccagcctggacatcaagcccttcatgagcttccccgtcgacagttcttccgcagttggtttattcccaaattttaacacgatggacccagtgcagaaagcagtgatcaatcacactttcggcgtatcaatcccccccaaaaaaaagcaggtgatctcttgcaacgtctgtcagttgcgatttaattcagattcccaggccgaggctcattacaagggttccaagcatgctaagaaagtgaaagccctcgatgccacgaagaacaagcctaagatggtgcccagtaaagactctgccaaggcgaatccctcctgtagcatcaccccaatcacaggaaacaatagtgataagtctgaagacaagggaaagctcaaagcttcttcatccagtcagccatccagtagtgaaagcggatctttcctgctaaaatctgggactactccgctcccacctggcgccgcgacctccccgtcaaagagcacaaatggtgccccagggaccgtggttgagtccgaagaagaaaaggccaaaaagttgctctactgcagcctgtgcaaggtggccgtgaattcactgagccagctggaggctcataatactgggagtaagcacaaaaccatggtggaagcccgaaatggggctggccccatcaagtcttacccaagacctggatcgcgcctgaaaatgcagaacggttctaagggttctggactccagaacaaaacatttcactgtgaaatttgcgatgttcacgtgaactctgagatccagctgaagcagcatataagcagtagacgacataaggatcgcgttgccggaaagccactaaaaccaaaatacagtccctataacaaacttcagagaagcccctcgattctcgctgcaaaacttgccttccagaaggacatgatgaaacctctcgccccagcattcctgagttctcccctcgctgctgcagcagctgtctcaagcgctctgtcactgcccccaagacctagtgcgtcactgtttcaggccccggcaattccccccgccctgttgaggccaggacatggacccataagggctactcccgctagcatcctgttcgctccatactag

SEQ ID NO: 212221 - DNA, 1188 bp, synthetic construct
  misc_feature 1..1188: note = Description of Artificial Sequence: Synthetic coding sequence
  source 1..1188: mol_type = other DNA
atgtggagcggcctgcccagccggggcagcacctgccacaccaccacactgcctgcgttggtccggactcccaccctgatgatgcaaccatcgctggacataaagccctttatgtcatttcccgtggatagcagctctgccgttggcctgtttcctaacttcaacaccatggaccccgtgcagaaggcagtgatcaatcacacttttggtgtgagcattcctccaaaaaagaaacaggtaataagctgcaacgtatgccaactgcggtttaactccgattcacaggcggaggctcactacaaaggaagcaaacacgccaaaaaggttaaggccctagatgcaacaaaaaataaacctaagatggtgccctctaaggatagtgcaaaagccaatccatcttgttcgataacacccatcaccggcaacaattccgacaagagcgaggataaaggaaaactgaaagcaagcagcagtagtcagccaagctcttctgagtccggaagcttcttattaaagtcgggtaccaccccactgcctcccggcgcagccaccagtccctccaagagtaccaatggagcccccggcacagtagtcgagtcagaagaagagaaagctaagaaactgctgtactgctctctgtgcaaagtagcggtgaattctctaagccagctggaagctcataatacagggtccaaacacaagaccatggtggaagcaaggaatggggcaggcccaattaagtcctacccacgacctggatcccgtctcaagatgcagaacgggagcaagggaagtggtctgcagaacaaaacctttcactgcgagatctgcgacgtgcatgtaaatagcgaaatccagctcaaacagcatatctctagtcgaaggcacaaggatagagtagcaggaaaaccattaaaacccaagtattcgccctacaacaaactccagaggagcccctcaatactcgcagccaaactcgcttttcagaaagacatgatgaagcctcttgccccggcctttctcagctctccactagcggcagccgccgcagttagtagtgccctttccctcccaccgcggccgagcgcctcactgttccaggctccagctatccctcccgctctgctccgaccaggtcacggccccatacgcgcgacacccgcaagcatcttattcgctccttactag

SEQ ID NO: 212222 - DNA, 1110 bp, synthetic construct
  misc_feature 1..1110: note = Description of Artificial Sequence: Synthetic coding sequence
  source 1..1110: mol_type = other DNA
atgatgcagcccagcctggacatcaagcccttcatgagcttccccgtagattctagctcagccgttggactttttccaaactttaacaccatggatcccgttcagaaggcggtgattaaccacaccttcggtgtgagtataccacccaagaagaagcaggtaatttcttgtaatgtgtgtcagctaagattcaatagcgattcacaggccgaagcgcattacaaaggatccaaacacgcgaagaaggtgaaggccttggatgccaccaagaacaaacctaagatggtgccctccaaggattctgctaaggctaacccaagttgtagcattactcctattactggaaacaatagtgataagtccgaggataagggcaaactgaaggcgtcgagtagttctcagcctagttcttcagagagcggaagcttcctgctgaagtctggtaccacacctctccctcccggtgcggcgacatcaccctccaaatctaccaatggtgcgccaggtaccgtcgtcgagtctgaggaagaaaaagctaagaaactgctatattgctctctttgcaaggtcgctgtcaacagcttaagtcagctcgaagcccacaatacgggcagcaaacataagactatggttgaagcccgcaatggagccgggcctattaagtcataccctcggcctggctcccggcttaaaatgcagaacggctctaaggggtccgggctgcagaataaaacattccactgcgagatatgcgatgtgcacgtgaattccgaaattcagctcaagcagcacatatccagtcggcggcacaaagaccgtgtggcaggaaagcctttgaaaccgaaatatagcccatataataaattgcagaggagccccagcattttggctgcgaaactggctttccaaaaagacatgatgaaaccgctggcgccagcttttttgtcctctcccctggccgcggctgccgcagtgtcttccgctctgagcctgcctcctaggccatccgcatccctgttccaggcaccagccattccacctgcattacttaggccgggccacggaccgatcagggccaccccagcctcaattcttttcgccccatactag

SEQ ID NO: 212223 - DNA, 1416 bp, synthetic construct
  misc_feature 1..1416: note = Description of Artificial Sequence: Synthetic coding sequence
  source 1..1416: mol_type = other DNA
atgaacatggccaacttcctgcggggcttcgaggagaagggcatcaaaaatgaccgcccagaggaccagctctccaaggagaagaagaagatcttattcagtttctgtgaggtctgtaacatccagctgaatagtgcagcgcaggcccaggtgcatagtaatggcaagtcacaccgcaaacgtgttaagcagctgtccgacggacagccccctcctcctgcgcaggcctcacccagtagcaattcatctaccggcagtacctgccacaccacgacactgcctgcgttggtgaggactcccaccttgatgatgcaaccttctctggacattaagcctttcatgtcttttccagtggactcaagtagcgccgtggggctgtttcccaactttaataccatggaccctgttcagaaggctgtgattaatcatacctttggcgtttccatcccccccaaaaaaaagcaggtaatctcttgtaatgtttgtcagctgaggttcaattctgattctcaggctgaggctcactacaagggaagtaagcacgccaaaaaggttaaggctctggacgctacaaagaataaacccaagatggtgccaagcaaggactctgccaaggccaacccttcttgctccatcacccctatcaccgggaacaattctgataagtctgaggacaaagggaaattgaaagctagttcctctagccagcccagttcgagtgagagcggaagcttcttactgaaatcaggcacaacccccttaccgccaggagctgcaacatccccgtcaaaatcaactaacggcgctcccggaacagtcgtcgaaagtgaggaagagaaagccaagaaactcttgtactgtagcctgtgtaaggtggccgtgaattctttatcccaactggaggctcacaacactggatctaagcacaagaccatggtagaagctcggaacggagccggccccattaaatcatatcctcggcctggtagtaggctcaagatgcagaatggctctaaaggctccgggctccagaacaaaaccttccactgtgagatttgcgatgtccacgtgaactccgaaattcagttgaagcagcacatttcctcccgccgccacaaggatagagttgccggaaagccattgaagccaaagtactccccctataacaagttgcagcgatctcctagcatcctcgcagctaaacttgcctttcagaaggacatgatgaaaccactggcgcccgcattcctctcctctcctctggctgccgcagccgccgtgagttcagcccttagccttcctcctcggccatctgcatctctcttccaggccccggctatcccccctgctctgttgcgtccgggacatggccccataagagcaactcctgcttccatcttgtttgcgccctattag

SEQ ID NO: 212224 - DNA, 96 bp, synthetic construct
  misc_feature 1..96: note = Description of Artificial Sequence: Synthetic coding sequence
  source 1..96: mol_type = other DNA
atgaacatggccaacttcctgcggggcttcgaggagaagggcatcaaaaacgatagacctgaggaccaattatccaaagagaaaaagaaaatctag

SEQ ID NO: 212225 - DNA, 417 bp, synthetic construct
  misc_feature 1..417: note = Description of Artificial Sequence: Synthetic coding sequence
  source 1..417: mol_type = other DNA
atgctgggcagcacctgccacaccaccaccctgcccgccctggtgcgtacacctactctaatgatgcagccatccctagacatcaaaccatttatgtcattccccgtcgacagtagctctgcagtcggactttttccaaactttaataccaaaaggcgagggctgttcgagacaaacaagttctgccagatggaccctgtgcagaaagctgtgattaaccacacattcggcgtgagcatcccacccaaaaaaaagcaggtgatttcctgtaacgtgtgccaactgcgctttaattcggactctcaggcggaggcccactacaaaggcagcaagcacgccaaaaaggtaaaagctctggatgctacaaaaaataaacctaagatggtgccctctaaggattcggctaaggctaattag

SEQ ID NO: 212226 - DNA, 228 bp, synthetic construct
  misc_feature 1..228: note = Description of Artificial Sequence: Synthetic coding sequence
  source 1..228: mol_type = other DNA
atgaacatggccaacttcctgcggggcttcgaggagaagggcatcaaaaacgatagacccgaagaccagttgtctaaagaaaaaaaaaagattctttttagcttttgtgaggtttgcaacattcagctcaattcagctgcacaagctcaagtccacagtaatggcaagtcccatcggaaacgtgtaaaacagctgtctgacggtcagccaccccctccagcccagtag

SEQ ID NO: 212227 - DNA, 792 bp, synthetic construct
  misc_feature 1..792: note = Description of Artificial Sequence: Synthetic coding sequence
  source 1..792: mol_type = other DNA
atgatgcagcccagcctggacatcaagcccttcatgagcttccccgtcgactcgtctagtgccgtgggcctctttccgaatttcaatacaatggaccctgtccagaaggcagtcatcaatcacacttttggtgtgtcgatccccccaaaaaaaaagcaagtcatttcctgcaatgtgtgtcagcttagattcaactcggactcccaggctgaagcacactacaagggtagtaagcacgccaaaaaggttaaggcacttgatgccacaaagaacaagcctaagatggtgccatcaaaggactcagccaaggctaaccctagttgctcaatcacaccaataaccggcaacaattctgataagagtgaggacaaagggaaactcaaggcatcctcttctagccagcctagttccagcgaatcaggtagcttcctccttaagagtgggaccaccccgctgcccccaggagcagcaacgagcccgagcaagtccacaaacggcgcccctggcaccgtcgttgaatcggaagaagaaaaggctaaaaagctattgtattgttctttatgcaaagtggccgtcaacagcctgagtcaactcgaggcgcataatacgggcagtaagcacaaaaccatggtcgaggcacgaaacggggctgggcctattaagagctaccctcggcccggttcaagactcaagatgcagaatgggagcaagggatcgggccttcagaacaagaccttccactgcgagatttgcgatgtccatgtgaattcagaaatccagttgaagcagtag

SEQ ID NO: 212228 - DNA, 1002 bp, synthetic construct
  misc_feature 1..1002: note = Description of Artificial Sequence: Synthetic coding sequence
  source 1..1002: mol_type = other DNA
atgagcgccaagctgggcaagagcagcagcctgctgacccagaccagtgaagagtgtaacggcatcttgacagagaagatggaagaagaggagcagacttgcgaccccgactcatcgctacattggagcagcagctatagccccgagactttccggcagcagttccgacaatttggttaccaggatagccccggaccgcatgaagctttgtctcggctctgggagctgtgccatttgtggctgaggccggaggtgcacaccaaagagcagattctcgagttactcgtcctagagcagtttcttgccatcctacccaaggaactgcaagcttgggttcagaagcatcatcctgaaaatggggaagaaaccgtcaccatgctggaggacgtcgaacgtgaactcgatggccccaagcaaatatttttcggacgaaggaaagatatgattgccgaaaagcttgcccctagtgagattactgaggagctgcccagcagtcagctgatgcctgtgaaaaaacagctgcagggtgcatcatgggagctacagtccttgcgcccacacgacgaagacatcaagactaccaacgtcaaaagtgcctcaagacagaaaacatcgttgggaatcgagctacactgcaatgtgtcaaacattctgcatatgaacggatctcagagttcaacttacagaggaacctacgagcaggacggccgctttgagaaacgacaaggcaatccgtcctggaagaagcaacaaaaatgtgatgaatgtggaaagattttctcacaaagctccgcactgattctccaccagcgcattcattccggcaagaaaccttacgcttgtgacgaatgtgcgaaagcattctccagatctgccatactgatccagcacaggagaacccataccgattctaaatacgaacacgctattgccgaggcccagaagaacatgtacttcaaaaccagactcaagtgtccacggtctctgtcaggtggccgatag

SEQ ID NO: 212229 - DNA, 1008 bp, synthetic construct
  misc_feature 1..1008: note = Description of Artificial Sequence: Synthetic coding sequence
  source 1..1008: mol_type = other DNA
atgagcgccaagctgggcaagagcagcagcctgctgacccagacctctgaagagtgcaatggcattctcacagaaaaaatggaggaagaggagcagacatgcgacccagactcatcactgcactggagttcttcctacagtccggaaacatttcgccagcaatttcgacaatttgggtaccaggatagtcccggaccacacgaggctctgagtcgcctatgggaactctgccacctctggctgagaccggaagtccacaccaaagaacaaatactagagctgttagttctggagcagttcctggctatccttcccaaggagcttcaggcctgggtccagaagcaccaccctgagaatggcgaggagactgtcactatgctggaagacgtggagagagagctggatggccctaaacagatattttttggcagacgtaaggacatgattgcagaaaaattggccccaagcgaaataacagaagagttgccgagttctcagctgatgcctgttaaaaagcagcttcagggcgcatcgtgggagttgcaaagcctgcgcccccatgatgaagatattaaaactaccaatgtgaaaagcgccagcagacaaaagaccagcctggggatagaactgcactgcaacgtgtccaacatcctgcacatgaatggcagtcaatccagtacatatagggggacctacgagcaagatggcaggtttgagaagagacaggggaaccctagttggaagaaacagcagaagtgtgatgagtgcggcaagatcttttcccaaagctccgccctcatattacatcaacggatccattctgggaagaaaccatacgcttgtgatgagtgtgctaaggcattttctcgctcggctattctgatccagcatcgccgaacacacaccggagagaaaccatacaaatgccacgactgcggcaaggcattcagtcagagctccaacttgttccgacatcgcaaacgtcacattaggaaaaaggtgccttag

SEQ ID NO: 212230 - DNA, 828 bp, synthetic construct
  misc_feature 1..828: note = Description of Artificial Sequence: Synthetic coding sequence
  source 1..828: mol_type = other DNA
atggccgtggagagcggcgtgatcagcaccctgatcccccaggacccacctgagcaggagctgattttggtgaaggttgaagataacttttcgtgggatgagaaatttaagcaaaatgggtctacccagtcttgtcaagagctattcaggcagcagttccgtaagttttgctaccaagaaacacccgggcctcgcgaggccctgagtaggttacaagaactgtgttaccagtggcttatgccagagctgcatactaaggagcaaattcttgagctccttgtgctagagcagttcctatcaatcctcccggaagaactccaaatatgggtccagcagcacaacccagagagcggggaggaggcggtgacccttttggaagaccttgagcgtgaatttgacgaccctggacagcaggtgcccgccagcccacaggggcccgccgtgccctggaaggatttaacctgtctgcgggcttcacaagaatccaccgacattcacctgcagcctttaaaaacccagctcaagtcctggaagccgtgtcttagccctaaatctgactgcgaaaattccgaaaccgctacgaaggaaggcatcagcgaggaaaagtctcaaggactacctcaggaacctagttttcgcggtattaaactgtcgagacctccgaaagccagctcagcaattcggtgggagtgtgtgtctcccggatcattccctggcgacatcattgccgcggaggctactcactcgactatttcctgtttcgcaataaatactttacccgcaacaatcctgccttcaaagaacgtaaacaggaaatacttttcctag

SEQ ID NO: 212231 - DNA, 1605 bp, synthetic construct
  misc_feature 1..1605: note = Description of Artificial Sequence: Synthetic coding sequence
  source 1..1605: mol_type = other DNA
atggccgtggagagcggcgtgatcagcaccctgatcccccaggacccgcctgagcaggagctcatccttgtgaaggtggaggataatttcagctgggacgaaaaatttaaacagaatggtagcacacagtcatgtcaggagctttttcggcagcaattccgcaagttctgttaccaggaaacccccggaccccgcgaggctctgtctcggctacaggaactttgctatcagtggttaatgccagagttacatacaaaggagcagattctcgagctgctggttttagaacaattcctgagtattttaccggaggagttgcagatctgggttcagcagcataatcccgagtccggggaggaggctgtgaccctgctggaggacttggagcgggagtttgacgatcctggacagcaagttcctgcctcaccgcagggtccggcagttccttggaaggacctgacttgcttgagagcttcccaggagagcactgacatacatcttcaacccctgaagacccaactgaagtcttggaaaccttgcttaagccccaagagcgactgtgagaatagcgagaccgccaccaaagaaggtatctcggaggaaaaatcacaaggtctccctcaggaacccagcttcagggggatcagcgaacacgagtccaatctggtgtggaaacaagggtctgctaccggcgagaaactgaggagcccttctcagggaggcagcttcagccaagtgatttttaccaacaagtctctcggaaagagggacctctatgacgaagctgaaagatgtttgattttaacgacagactccattatgtgtcagaaagtgccacctgaggagagaccatatcggtgtgatgtgtgcggccactccttcaagcagcattcctccctcacccagcatcagcgaatacacaccggcgaaaaaccatataaatgcaatcaatgtggcaaggcattcagtcttcgatcttatcttattatccatcagcgcatccacagcggagagaaggcatacgagtgcagcgaatgcggcaaagctttcaaccagtctagtgctctgattcgccaccgtaagattcacacaggggagaaagcttgcaagtgtaatgaatgcgggaaagcgttttcccagtcttcttacctgattatacaccagagaatccacacaggagagaagccctatgaatgcaacgagtgcgggaaaacgttttcccagtcatccaagctcattcgccaccagcgaatccacaccggcgaaagaccttatgaatgcaacgagtgtggcaaggcattccggcagtcctcagagctgattacccaccaacggatccactcaggagaaaaaccgtatgagtgtagcgaatgtgggaaagccttctcgttatcatccaacttgattaggcatcaacgaatccacagtggggaagagccatatcagtgcaacgagtgcggtaagacttttaagcgctcctctgcactggtgcagcatcagcgtattcatagcggggatgaggcctacatttgcaacgaatgtggcaaggcattccgccatcgctctgtcttgatgcgtcatcagcgagtgcacacaattaagtag

SEQ ID NO: 212232 - DNA, 738 bp, synthetic construct
  misc_feature 1..738: note = Description of Artificial Sequence: Synthetic coding sequence
  source 1..738: mol_type = other DNA
atggccgtggagagcggcgtgatcagcaccctgatcccccaggacccccccgaacaggagctgattctggtcaaagtggaagacaacttcagttgggatgagaagtttaaacaaaacggcagcacccagtcctgccaggagctttttagacagcagttccggaaattctgctaccaggaaacccccgggcctcgagaggctctgagtcggttgcaagagttgtgctaccagtggctgatgccagaactgcatacgaaggagcagatcctcgagctactggtcctggagcagtttctgtccatcctccccgaagaactccagatctgggtgcagcagcacaacccagagtccggtgaggaggctgtcacactcttagaagatcttgaaagggagttcgacgatcctggccagcaggtgcccgcttctccacagggaccagccgtaccatggaaggatctgacatgtctgagagcctctcaggagtccactgatatccacctacagccccttaaaacccagctgaagtcctggaaaccttgtctatcgcctaagtctgagctgtcgcggcctcccaaagcctcttctgccatccgatgggagtgtgtgtcaccagggtcattccccggggacatcattgccgcggaagcgacacactcgacaatctcctgcttcgccataaacactctgcccgctacaatcctaccaagcaagaatgtgaaccgcaagtacttctcatag

SEQ ID NO: 212233 - DNA, 2340 bp, synthetic construct
  misc_feature 1..2340: note = Description of Artificial Sequence: Synthetic coding sequence
  source 1..2340: mol_type = other DNA
atggccgccaacggcgacagccccccctggagccccgccctggccgccgaaggacgtggtagttcctgcgaggcttcagtgtcttttgaagacgtgactgtggacttcagcaaggaagaatggcagcatctggatcctgcccaacggagactatattgggatgtgacactcgaaaattactcccacctcttgagtgtgggctaccagattcccaagtccgaggcagctttcaaactggaacaaggcgaaggcccatggatgctggaaggagaggctccacatcagagctgctccggtgaagctattggaaagatgcagcaacaaggcattcctggcggcatattcttccattgcgagcggttcgaccaaccaataggcgaagattccttgtgctccattctcgaagagctttggcaagataacgaccagctagagcagcggcaggaaaaccagaacaacctcctatctcatgttaaagttctgattaaagaaagaggctacgaacacaagaacattgagaagataattcacgtcacgaccaagctggtgccttccataaagcgcctgcataactgtgatacgatccttaagcacactctgaattcacataaccataacaggaatagcgccaccaagaatttgggtaagatcttcgggaatggaaacaacttccctcattccccatcgtccactaagaacgaaaacgcaaagaccggtgctaattcttgtgaacacgatcactacgaaaagcacctatcacataaacaggctcccacacaccaccagaagatacaccccgaggaaaagttatacgtgtgcaccgaatgcgtgatgggatttactcagaaatcgcacctgtttgagcaccaacgaatacatgccggtgagaagtcacgagagtgcgataagtccaacaaagtcttcccccagaagccccaggtcgatgtgcacccttcagtatacaccggtgagaaaccatatttatgtactcagtgcggaaaggtttttacactgaaatctaacctgattacacaccagaagattcatacagggcagaaaccctataagtgcagcgagtgcggaaaggctttcttccagcgctcggacctgttccggcacctgaggatacataccggggagaaaccatacgagtgttcagagtgcggaaaaggttttagtcagaattccgatctttcaatccaccaaaaaacacataccggagagaagcattacgagtgcaatgagtgcggaaaagcctttactagaaaatcagctctgcgaatgcaccagcggattcacaccggagagaagccatatgtgtgtgccgattgcggtaaggccttcatacagaaaagccatttcaacacccaccaacgaattcacactggcgaaaagccttacgagtgcagtgattgcggaaagagttttacaaaaaaatctcaactccacgtccaccagcgcatccataccggcgagaagccgtacatctgcactgaatgcggaaaggtgtttacccaccgcaccaacctcactacacaccagaagacccacacaggcgagaagccttatatgtgtgccgaatgcggaaaggctttcactgatcagtcaaaccttattaagcatcaaaaaacacacacgggggaaaaaccttataagtgtaatggatgcggaaaagcattcatttggaagtctcgccttaagatacaccagaaatcccatatcggagagcgccattacgaatgtaaagattgcggaaaggcctttatacaaaagagcacgttgagcgtccaccagcgaatccatacaggtgaaaaaccttatgtgtgtcccgaatgcgggaaagccttcatacaaaaaagtcacttcatcgcccaccatcgcattcacaccggtgaaaaaccatacgagtgttcagactgcggcaagtgttttacgaaaaaatctcaactgagggtccaccagaaaatacatacaggcgaaaagccaaacatttgtgctgagtgtgggaaagcatttacagacaggagtaacctaattacacaccagaagattcataccagggagaaaccatacgaatgcggtgactgcggtaagaccttcacctggaagtctcgcctgaatattcaccaaaagagtcataccggcgaaaggcactacgagtgttcaaagtgcggaaaggcatttattcagaaagccaccctatccatgcaccagatcattcataccggcaaaaaaccttatgcctgtacggagtgtcagaaggctttcaccgacaggagcaacctgatcaaacatcagaagatgcatagcggagagaagcgttacaaggcttctgattag

SEQ ID NO: 212234 - DNA, 2340 bp, synthetic construct
  misc_feature 1..2340: note = Description of Artificial Sequence: Synthetic coding sequence
  source 1..2340: mol_type = other DNA
atggccgccaacggcgacagccccccctggagccccgccctggccgccgagggccgaggaagctcgtgcgaagcctccgtctcattcgaggacgtaacggtggatttttccaaagaggagtggcaacacctggacccagcacaacggcggctgtactgggacgtaaccctggaaaattacagccacctgctctccgtgggctatcaaatacccaagtccgaagctgcattcaaactggagcagggtgaaggcccatggatgttagagggggaggcccctcatcagagctgcagcggcgaagctattggcaagatgcagcagcagggcatccctggagggatctttttccactgcgaacgcttcgaccaacctattggtgaagatagtctgtgttctatacttgaagagctgtggcaagataatgaccaacttgaacagcgacaggagaatcagaacaatctgctgagtcacgtgaaggtcctgatcaaggaacgaggatacgagcacaaaaatattgagaaaataatacacgttaccaccaaactggttccctctattaagcgcctccataactgcgatactatcctaaagcacaccttaaactcccacaaccataatcggaacagcgccactaaaaacttgggaaagattttcggaaatggcaacaactttcctcatagcccgtcctccactaaaaacgaaaatgctaaaaccggggccaattcctgtgagcacgaccattacgaaaagcacctaagtcacaaacaagctcccacacaccatcagaagattcatcctgaagaaaagctgtacgtctgcacagaatgcgtcatgggttttacacaaaaatctcacctctttgagcaccagcggatacatgcaggcgaaaagtctagagaatgtgataagtctaataaggtctttccacagaaaccacaggtcgacgtgcaccccagcgtgtacaccggagaaaagccgtacttgtgcacacagtgtggaaaggtctttacattgaaatctaacctcattacgcatcagaaaattcacactggacaaaagccttataagtgctcagagtgcggcaaagccttttttcagaggtctgacctctttcgtcacctgagaatacacacaggcgagaaaccctacgaatgcagcgagtgcggtaagggattctcgcagaattctgacctgtccattcaccagaaaacccacacgggtgaaaaacattatgaatgtaacgagtgcggcaaggccttcacacgtaaaagcgcgcttcgcatgcatcaaaggattcacacaggagaaaagccctatgtatgtgccgattgcggaaaggcgttcatccaaaagagccattttaatactcaccaacggattcacactggggaaaaaccttatgaatgctccgattgtggaaagtctttcactaagaaatcccagctgcacgtgcaccaaagaattcatacaggcgagaaaccttacatttgtacggagtgcggaaaggtctttacccaccgcacaaatcttactacacaccaaaaaacacatacaggcgaaaagccctacatgtgtgctgagtgcgggaaagcgttcactgaccaatccaacctaatcaaacatcaaaagacccataccggtgagaaaccttataagtgcaacggttgtggaaaggccttcatctggaagagcaggctgaagattcaccaaaaatcccacataggagagcggcattacgagtgtaaggattgtggaaaggcattcatccagaagtcgactctgtcggtgcaccagcggatccacactggcgagaaaccatatgtgtgccccgagtgtggcaaagctttcatccagaagtcacacttcattgcacatcaccgaattcacaccggggaaaagccgtacgaatgcagtgattgcggcaaatgctttaccaagaaatctcaattacgggtgcaccagaaaatacacacgggcgagaagcccaatatctgtgctgagtgtgggaaggcctttaccgaccggagcaatttgattacacaccagaagattcacaccagagagaagccttacgagtgcggggactgcgggaagacctttacatggaaatcgaggctgaacattcatcagaaatcacatacaggcgaaaggcactacgagtgttctaaatgtgggaaggctttcatccaaaaagccaccctaagcatgcaccaaatcattcataccggaaaaaaaccatacgcatgcacagagtgccagaaagctttcactgatcgaagcaatctgattaagcatcaaaaaatgcacagtggggaaaagcggtataaggcctctgattag

SEQ ID NO: 212235 - DNA, 2370 bp, synthetic construct
  misc_feature 1..2370: note = Description of Artificial Sequence: Synthetic coding sequence
  source 1..2370: mol_type = other DNA
atgggcaccctgccccacggcccccggccctggctgcagcgggacgtagccgcccacgtctctgctgaccacgctgcgctgaacagcatcgtgtcacttcaagcctccgttagcttcgaggatgtgactgtcgatttctccaaggaggaatggcaacacctggacccagcccagaggaggctttactgggatgtcaccttagagaactacagccatctcctgtccgttggttaccagattcctaagagtgaagcggctttcaagctagaacagggagaaggtccctggatgttagaaggcgaagccccacaccagtcgtgttccggcgaggcgatcggcaagatgcagcagcagggaatccctggaggaattttcttccactgcgagcggtttgatcagcccataggcgaggacagcctgtgtagcatattggaggagctgtggcaggacaatgaccaactcgagcagcgacaggaaaatcaaaacaaccttttgtcccacgtgaaggtcctaattaaggagaggggctacgagcataagaacatcgagaaaatcattcatgtgaccactaaacttgtgccctccattaagcggttgcacaattgtgacacaatacttaagcataccctgaattcacacaaccataatcgcaacagcgccacaaagaacttgggaaaaattttcggtaacggaaataacttcccacacagtccatcatccaccaaaaatgagaatgcgaaaacgggagcaaatagctgcgagcacgatcactacgaaaagcatctgtcccataagcaggcaccaacacaccaccagaagatccacccagaagagaaactgtatgtgtgtacggaatgcgtcatggggttcacgcagaagtcccacctcttcgaacaccagcggattcatgccggtgaaaaaagtcgggaatgtgacaaaagcaacaaagtgtttccgcagaaaccacaggtggatgtgcacccctcagtgtacaccggtgaaaagccttacctgtgtacacagtgcggcaaggtgttcactctgaaatcaaatcttattactcatcagaagattcacactggtcagaaaccatacaagtgtagtgagtgcggtaaggcatttttccagaggtcggatcttttccgtcacttgcgcatccacacgggcgaaaagccatacgaatgctccgaatgcggcaagggattttcacaaaacagcgacctgagtatccaccagaagacacatacaggagagaaacattatgagtgtaatgagtgcggtaaagctttcacaagaaaatccgccctccggatgcatcagaggatccacacaggtgaaaaaccctacgtgtgtgcagattgcggtaaagcctttattcagaagagtcactttaacacacaccaacggatccatactggagagaagccgtacgagtgttccgactgtggaaagtcctttaccaagaaatctcagctgcacgtacaccagcggatccacaccggcgaaaaaccatacatctgcactgaatgcggcaaggttttcacccatcgaactaatctgacaactcatcagaagacacatacaggggaaaaaccgtatatgtgtgccgagtgtggaaaggcctttacggatcagtctaacctaattaagcaccagaagacccacacgggcgaaaagccttacaaatgtaacggctgtggcaaagcctttatttggaaaagccgccttaaaattcaccagaagagccacatcggcgagaggcattacgaatgcaaggactgcggaaaagcctttatccaaaaaagcacactgtcagtccatcaaaggatccacaccggcgagaaaccttacgtctgccccgaatgtggcaaggcatttatccagaaaagtcattttatcgcccaccatcggattcacaccggagaaaagccatatgagtgctccgactgtggcaaatgcttcacaaagaagtcccagctgcgggttcatcagaaaatccataccggggaaaagcccaatatttgcgccgaatgcgggaaggcctttactgataggagtaatctgatcacccatcagaaaatccacacacgagagaagccatacgaatgcggagactgtggtaagacgttcacttggaagtctcggctcaatatacatcagaaatcccatactggcgaacggcactacgaatgctccaagtgtggcaaagcttttattcaaaaggctaccttatccatgcatcagatcatccatacaggcaaaaagccatatgcctgcaccgagtgtcagaaggccttcactgacagaagcaatctcataaagcaccagaagatgcactcaggtgaaaaacgatacaaagccagtgattag

SEQ ID NO: 212236 - DNA, 537 bp, synthetic construct
  misc_feature 1..537: note = Description of Artificial Sequence: Synthetic coding sequence
  source 1..537: mol_type = other DNA
atgggcaccctgccccacggcccccggccctggctgcagcgggacgtagccgcccacgtgagtgctgaccacgccgcgctcaactctatagtctcgctgcaagcttccgtatccttcgaagatgtgactgttgacttttcaaaggaagagtggcagcaccttgatcctgcccagagacgtctgtactgggacgtcacccttgaaaactactcccatctactctcagtggggtatcaaatcccaaagtccgaagccgcttttaaactggaacaaggcgaaggaccatggatgctggaaggggaggcacctcatcagtcatgttcaggcgaggccataggaaaaatgcaacagcagggcatcccaggaggtattttttttcattgcgaacgcttcgaccagccaatcggggaagattctctgtgtagtatcctggaggaactgtggcaggataatgatcaacttgagcagcgtcaagagaatcagaacaatctgttgtcacacgttaaggtgctgatcaaagagcgaggatatgaatag

SEQ ID NO: 212237 - DNA, 3855 bp, synthetic construct
  misc_feature 1..3855: note = Description of Artificial Sequence: Synthetic coding sequence
  source 1..3855: mol_type = other DNA
atgcacaagaagcgggtggaggagggcgaggccagcgacttcagccttgcctgggattcgagcgtgacggccgccgggggtctagaaggcgagccggaatgtgatcagaagacttcccgagccttggaggatcgcaacagcgtaaccagccaggaggaacggaatgaagacgacgaagacatggaggacgaaagtatatatacatgcgaccattgccaacaggactttgaatcactggcagacttgactgaccatagggctcatcgttgccccggagacggtgatgacgatccgcaactttcttgggtcgccagtagtccaagctctaaagacgtggccagccctactcagatgatcggggatggatgcgacctgggcctcggtgaggaggaggggggaacaggcctaccgtatccttgtcagttctgcgataagtcatttatccggctctcttatctcaagagacatgagcagatccactccgacaaactcccctttaaatgtacctactgcagcaggttatttaaacataagcggtcgcgggacagacacatcaagcttcacactggagataaaaagtaccactgtcacgaatgtgaggctgctttttcacgtagcgaccaccttaaaatccacctcaagactcactcatccagcaagccgttcaaatgtacagtctgtaaacgaggatttagctcaacctcttcactacagagtcatatgcaagcccacaagaaaaataaagagcatctggccaagtccgagaaggaggcaaagaaagacgactttatgtgtgactattgcgaagatacattttcccagacggaagagctggaaaaacacgtgttgacccgtcacccccaactctctgaaaaggcagacctgcagtgcatccactgtccagaagtctttgttgacgaaaacaccctgttagcccacatacaccaggcccatgcaaatcagaagcacaaatgtccaatgtgtcccgaacagttttcctcagtggaaggcgtttactgccatttagacagtcatcgccagcctgatagttccaaccattcagtatcgccagaccccgtgcttgggagcgtcgcgagcatgtcctctgctactcctgatagcagcgcatcagtggagagggggagcacgccggattctactctcaagcctctgcgcgggcagaagaagatgcgcgatgacgggcaagggtggaccaaggttgtgtattcctgcccttattgctcgaagcgcgacttcaatagcctcgccgttctggaaatacatcttaagaccatccatgcggacaaacctcagcagagccacacttgccagatttgcttagattcaatgcccactttatacaatttgaacgaacacgttagaaagctccataagaaccacgcgtaccctgtcatgcagttcggcaacatttcagcttttcactgcaattactgccccgaaatgttcgcagatatcaattccctacaggagcacataagagtcagccactgcggcccaaatgctaatccatccgacggcaataatgctttcttctgcaaccaatgtagtatgggcttcctgaccgagtcttcactgaccgagcatatccagcaggcccattgctccgtcgggtcagctaagctggaatcacccgtggtacagcccactcagtcgttcatggaagtttacagttgtccgtattgcaccaacagtcccatctttggctctatcctgaaattgactaaacacattaaggagaatcataaaaacatacccctggctcactccaaaaagtccaaagccgagcaaagccccgtgagcagtgacgtcgaggtctcttcacccaagaggcaaaggttatctgcaagtgctaattcaatttcaaatggagagtacccttgtaaccaatgcgatcttaagttcagcaactttgaaagtttccaaacacatttaaaactccacctcgaactcctcctgcgcaaacaggcctgtccccagtgcaaagaagatttcgattcccaagagtccctgctgcagcatttgaccgttcattatatgaccacatcaacacactacgtgtgtgaatcatgcgacaaacagttctccagtgtcgacgatctgcagaagcacctgcttgatatgcacacgtttgtattataccattgcaccctgtgtcaggaagtctttgacagcaaagttagcatacaggttcacctggccgtgaagcatagcaacgaaaaaaagatgtatcggtgtaccgcgtgcaattgggactttcgcaaagaagccgacctgcaggtgcacgtgaaacacagccacctggggaatccagccaaagcccacaagtgtatcttttgtggggaaaccttcagcactgaggtagaacttcaatgtcacattaccacccattctaaaaagtataattgcaagttctgctccaaagcgtttcatgcaatcatcctgttagaaaagcacctgagagagaaacactgcgttttcgacgccgccacagagaacggaaccgccaacggggtgccacccatggctacaaaaaaagccgagccagctgacttgcagggcatgctcttgaaaaacccagaggcccccaacagtcacgaggccagtgaagacgacgtggacgcttctgagccaatgtacggctgtgacatttgtggagctgcatataccatggaggtactgctccaaaatcaccgcctacgggaccataatatcaggcccggcgaggatgacggatcccgtaagaaagctgagtttataaaagggtcacacaagtgcaatgtgtgttctaggacctttttttccgaaaacggcttgcgcgaacatcttcagacacatcggggcccagccaaacattacatgtgtcccatctgcggagaaaggtttcctagtctcctcacactgacagaacataaggttacccattctaaatctcttgacaccggaacgtgcagaatctgcaagatgcctctgcagtccgaagaagagttcatcgagcactgtcagatgcatcccgatctccgcaactcactcaccggttttcggtgtgtggtgtgtatgcagaccgtgactagcacccttgaacttaaaattcatggtactttccatatgcagaaactggccggctcttccgctgcttcaagtcctaatgggcagggcttacaaaagctgtataagtgcgccctctgcttaaaggagtttagaagcaaacaagacttggttaagttagatgtaaatggactgccttacggcctgtgtgctggatgcatggcgagatctgctaacggccaggtggggggcctcgctcccccggaacctgccgatcggccctgcgcaggcctgcggtgtcccgaatgcagcgttaaatttgaatcagcagaggaccttgaatctcatatgcaagtggaccatagagacctgacaccggagacaagtggccccaggaagggcacccagacttcgcctgtccctcggaagaagacatatcagtgcatcaagtgccagatgacctttgaaaatgaaagggagatccaaattcatgttgccaaccacatgatcgaggaagggattaaccacgagtgtaaattatgtaatcagatgttcgactccccagccaaactcctgtgtcatcttattgagcactccttcgagggaatgggaggcaccttcaagtgccccgtttgttttactgtgtttgtccaggctaataagcttcagcagcacattttcgccgtacacggacaagaggacaagatctatgattgcagccagtgcccacagaagtttttctttcagacagaattgcagaatcatactatgagtcagcatgcccagtag

SEQ ID NO: 212238 - DNA, 3504 bp, synthetic construct
  misc_feature 1..3504: note = Description of Artificial Sequence: Synthetic coding sequence
  source 1..3504: mol_type = other DNA
atgatcggcgacggctgcgacctgggcctgggcgaggaggagggcgggacaggtctgccctatccatgtcagttttgcgataaaagctttatccggctgtcttatcttaagcgccacgaacagattcattcagataagctcccgttcaaatgcacctactgctccaggctgtttaaacacaagagatcccgagatcgccatattaagctgcatacaggggacaagaagtaccactgtcatgagtgtgaggccgcttttagtaggagtgatcatctgaaaatacacttgaagacccactcttccagcaagccctttaaatgcacagtttgcaagcggggcttcagtagtactagttccctgcagagccatatgcaggctcataagaaaaataaagaacacctggcgaaaagcgagaaagaggcaaagaaagacgattttatgtgcgactattgcgaggatacattcagccagaccgaggaactcgagaagcacgttctaacccgacatccacaactgagtgaaaaagccgatcttcagtgtattcactgtcccgaggtgtttgtagatgaaaacactctccttgcccacatacaccaggctcacgcaaatcagaagcacaaatgtcccatgtgccccgaacagttcagctctgtggagggggtgtattgccatctggattcacataggcaacctgactcctcgaaccattcagtctcaccggatcccgtgttaggctctgttgccagcatgtcttccgcgacccctgatagctcagcatctgttgaacgaggctcgacccctgattcaacactgaaacctctgagagggcagaagaagatgcgagacgatggacagggttggaccaaggtggtgtattcatgtccgtactgttctaagcgagacttcaattcgctggcagtgcttgagattcacctaaagaccatccacgctgacaagccccagcagtcccatacttgtcagatttgcctggattccatgcccaccctgtacaacctcaatgaacatgtacgtaagttgcacaaaaatcatgcttaccccgtgatgcaattcggcaacatatccgccttccactgtaattactgtcccgaaatgtttgctgatattaactcgctgcaggagcatattcgcgtgtcccattgtgggccgaacgccaacccctcagacggaaataatgcctttttctgtaatcaatgctccatgggtttcctgaccgagtccagtctgaccgagcatatccagcaagcccattgttctgtcggctccgctaaactagagagtcccgtcgtccagccgacccagtcatttatggaggtgtacagttgcccatactgcaccaacagccccatcttcggttctatactcaaactcactaaacacattaaggaaaaccataaaaacatccctctcgcccactcaaagaagtctaaggctgagcaatcaccagtgtctagcgacgtggaagtgtctagccccaaacgccagcgtctgtctgcctcggccaattctataagtaacggagagtacccttgtaaccaatgtgatcttaagtttagcaattttgagagcttccagacacacctgaagcttcaccttgagctcctgctgagaaagcaggcgtgtccacaatgcaaggaagatttcgatagtcaggagagtcttcttcagcatctcacagtgcactatatgacaacgagcacacattatgtatgcgagtcctgcgataagcagttctcatcagtggatgatctgcagaagcacctgctcgatatgcataccttcgtgctttatcattgtaccctgtgtcaggaagtgtttgattcaaaggtatccatacaggttcacctcgccgtcaaacactcaaacgagaagaagatgtaccgatgcactgcttgcaattgggatttccgcaaagaggctgatttgcaggtgcatgtaaagcacagtcacttagggaatcccgctaaggcccacaaatgtatattttgcggagaaacgttcagcactgaagtggagctgcagtgtcatatcaccactcatagtaagaagtacaattgcaagttctgctctaaagccttccatgccatcatcctcttggagaagcacttaagagagaagcactgtgtgttcgatgcagcgacagagaacggtaccgcaaacggggttccacccatggcaacaaaaaaggccgaacctgccgacctgcagggtatgctcttgaaaaatcccgaagctcctaattcacatgaggccagcgaggatgacgtcgacgcttccgagccaatgtacggctgcgacatctgcggggccgcctacactatggaggtccttcttcaaaatcaccggttacgcgatcacaacattaggcctggggaagatgatgggtcgaggaaaaaagcagaatttattaaggggtctcataagtgtaatgtgtgcagtcgtacatttttttccgagaacgggttgagagagcacctccagacacacagagggcctgcaaagcactacatgtgcccaatttgtggtgaaagattccctagcttgctgaccctcacggaacacaaggttacacatagcaagagcctggatacgggcacctgcaggatctgtaagatgcctttgcagtctgaagaggaatttattgagcattgtcagatgcatcctgacctgcgcaacagcctgacagggttccgctgtgtagtgtgtatgcaaacggtgacaagcaccttggaactgaagatacatggtacatttcacatgcaaaagctggcagggagtagcgccgcatccagcccaaatggccaaggactgcagaagctctataagtgcgccctgtgtctgaaggaattccggagtaagcaggatcttgtcaagcttgacgtgaatggccttccatatgggctgtgtgccgggtgcatggctaggtccgctaatggacaggtcggagggctagcccctccagagcctgcggaccgcccttgcgccggtctgcgctgcccagagtgcagtgttaagtttgaatctgccgaggacctcgaatctcacatgcaggtggaccatcgggatctgacacctgagacctcgggccctagaaaggggactcagacctccccggttccgaggaaaaagacttatcagtgtattaaatgtcagatgactttcgagaacgagagagagatccagatacacgttgccaaccacatgatcgaggagggaattaaccatgaatgtaaactctgtaaccaaatgttcgactccccagcaaagctactctgtcacctgatcgagcactctttcgaaggcatgggcggcacattcaaatgtccagtgtgcttcaccgtctttgttcaggccaataaactacagcagcacatctttgccgtgcacggtcaggaggataagatttacgactgctcacaatgccctcagaagttttttttccaaactgagctacagaaccacaccatgtcgcagcacgcccagtag

SEQ ID NO: 212239 - DNA, 3855 bp, synthetic construct
  misc_feature 1..3855: note = Description of Artificial Sequence: Synthetic coding sequence
  source 1..3855: mol_type = other DNA
atgcacaagaagcgggtggaggagggcgaggccagcgacttcagcttagcctgggactcaagcgtgacagcagccggtggccttgagggagaacccgagtgcgaccaaaaaaccagtagagcactggaggatcgcaatagcgtcacatctcaggaagagaggaatgaggatgatgaggatatggaggatgaaagtatctacacatgcgaccattgccagcaggatttcgaatcactggcagatctgaccgatcatcgggcacatcgatgtcctggggatggcgatgacgacccacagctgtcctgggtagcctcgagtccaagcagtaaggatgtggcctccccaacccagatgatcggggacggctgcgaccttggcctcggcgaggaggagggcggcacagggctgccgtacccttgccagttttgcgacaaatctttcattagactgagttacctcaaaaggcatgaacagatccactcagataaactgccttttaagtgcacatactgttctaggctgtttaagcataaacggtctagagatcggcatatcaagctacacacgggcgacaagaaataccattgtcacgagtgcgaagccgcattttcccgatcggatcatctgaagatccatttgaagacacattcctctagcaaaccatttaaatgtaccgtctgcaagcggggcttttcctctacctcttccctgcagtcacacatgcaggcccacaaaaagaataaggaacatctcgcaaagtccgaaaaggaggctaaaaaggatgacttcatgtgtgactattgtgaagataccttcagccagaccgaagaactggagaagcacgtactgacgaggcatccccagctgtcagagaaagcggatctgcaatgtattcactgccccgaagtgttcgttgacgaaaacaccctattggcccatatacaccaggcacatgcaaaccagaagcacaaatgtcctatgtgtcctgaacagttttccagtgtggagggggtctattgccatctggatagtcataggcagcctgactctagcaatcattccgtgtctcctgaccccgtcttaggatctgtcgccagcatgagttccgccactcccgacagttcggcgtctgtcgaaagagggtccacgcctgactcaaccctgaaaccccttcgggggcagaagaaaatgcgggacgacggccagggttggacaaaggtcgtgtactcctgtccatactgtagcaaacgagatttcaacagtcttgcagtacttgaaatccacctcaaaaccatacacgccgacaagcctcaacaatcccacacttgccagatatgtctcgacagcatgcccacactgtacaaccttaatgaacatgtgcgcaagttgcataaaaatcacgcctatccagtgatgcagtttggcaatatttcggccttccactgcaactattgtcccgaaatgttcgcagacattaattctctgcaggagcacataagagtcagccattgtggcccaaacgccaacccaagcgacggtaacaacgcttttttttgcaaccagtgtagcatgggatttctgacagaatcttcactcacggaacacatccagcaggcccactgctcagtaggatcagcaaagctggagtcacccgtcgtgcagcctactcagtcttttatggaggtgtatagctgtccctattgcactaattccccaatcttcggcagtatactcaaactcacaaagcacatcaaagagaaccacaaaaacatccccctggctcattcgaagaagagcaaggcagaacagagccctgtatcctcagatgtggaggtgtccagcccaaagcgtcagcgcctctctgcttctgccaactcaatctcaaatggtgaatatccctgcaatcagtgcgacttgaaattcagcaatttcgagagcttccagacgcatctcaaactccatttagagctcctgctcaggaagcaggcatgtcctcagtgtaaggaggattttgactcacaggagagcctcctccagcatttgactgtacactatatgacaactagcactcactacgtctgcgaatcatgcgacaagcaattcagcagcgtggatgatctacagaaacatctgctggacatgcatacctttgtcttataccattgcacattgtgccaggaggtgtttgattctaaggtgagcatacaagtgcacttggccgtgaaacactctaacgaaaaaaagatgtaccgctgtaccgcatgtaattgggactttagaaaagaagccgatcttcaggtgcatgttaagcactcccatctgggcaatccggcaaaggcacacaaatgcatcttctgcggcgaaactttcagcaccgaagtggagctgcagtgccatatcacaacccacagcaagaaatataactgtaagttttgctccaaggcattccacgctattatactactcgagaagcacctgagggagaaacactgcgtctttgacgctgccactgaaaacggcacggctaacggtgtccctcccatggccactaagaaggctgaacctgcggacctgcagggaatgttactcaaaaatcctgaggcaccgaattctcatgaggcctccgaagacgacgtggatgcgtctgaacccatgtacgggtgtgacatatgcggagccgcttatacaatggaggtgttacttcagaatcaccgccttcgtgatcacaatatacgcccaggagaggatgacggctctcgtaaaaaggccgaatttattaagggctcccataaatgcaatgtctgctctcgcaccttcttctctgagaacggtctgcgagaacacctgcaaacacacaggggccccgcgaagcattatatgtgtccaatttgtggggagaggttcccttcactcctgaccttgactgagcataaagtgacccactcaaagtctctcgacacaggaacgtgccgaatctgcaaaatgcctctgcagtcggaagaggagtttattgaacactgtcaaatgcatcctgacctccgaaattctcttactggcttcagatgcgtggtttgtatgcagaccgtgaccagtacactggaactcaagatccatggaacattccacatgcagaagctcgctggatcatccgccgcatccagtcccaacggccaaggcctgcaaaagctgtacaagtgtgctctgtgcttgaaagagttccggtcgaaacaagacctcgtgaagctcgacgttaacggcctgccttacggcctctgtgcaggatgcatggcccgtagcgcgaatggtcaggtcgggggcctggcgccgccagagccggctgatcgaccatgcgcaggtctcagatgtcccgagtgttcagtcaaatttgaaagcgccgaggatctcgagtcacatatgcaagtcgaccatcgcgaccttactcctgagaccagcgggcctcgcaagggaacacagactagtcccgtgccaagaaaaaaaacttatcagtgcatcaagtgccagatgacgtttgagaatgagagagagatccaaatccacgtggccaaccatatgattgaagagggtatcaatcacgagtgtaagctttgcaatcagatgttcgacagtcctgctaagttgctctgccatctgatcgaacactcctttgaagggatgggtggtacctttaagtgccccgtgtgtttcacagtctttgtgcaggccaacaaattgcagcagcacattttcgctgtgcacgggcaggaggacaaaatctatgattgttcccagtgcccccaaaagttctttttccagactgagctccagaatcataccatgagtcaacacgcccaatag
